United States Patent Application Publication US 2018/0126003 A1 - sequence listing, part 123

SEQ ID NO: 215614 - DNA, 1209 bp, Artificial Sequence
  derived and/or modified sequence
atgaaccaggagaaccggagcagcttcttctggctgctggtgatcttcactttcctcctgaagataacggcatcattttccatgtctgcatacgtgactgtgacctattacaacgagacgtcaaactatacggccatcgaaacatgcgagtgcggggtctacggcctggcatctccagttgcgaatgctatgggggtggtgggaatacccaaaaacaataattaccaagcttgtgatcacaataccgagttttcaaacacaaagaagccatggattgctttgatagagcggggaaactgcacattcagtgagaaaattcagaccgccggacgcaggaacgcggatgccgtggtaatttataacgctcctgagaccgggaatcaaacaatccaaatggcgaacttcggggccgtggacattgtggccatcatgatcgggaaccttaaggggaccaaaattctgcagtcgattcagcgcggtattcaggtgaccatggtgattgaagtcggtaagaagcatggaccatgggtcaatcactactccatctttttcgtgtctgtgtctttcttcattattacagccgctactgtgggatatttcatcttctatagcgcaagacgactcaggaacgcccgggcccagtctcgcaagcagagacaactaaaggcagatgccaagaaagccatcggtagattgcagttgcggactctcaaacagggggacaaagaaataggtcccgatggcgacagctgcgcagtgtgcatcgaactctataaaccgaatgaccttgtaaggatccttacatgtaaccacatcttccataaaacttgtgtcgacccatggctgctggaacacaggacctgcccgatgtgtaaatgcgacatcctaaaagctctgggaatcgaggttgacgtggaggatggatctgtcagcctgcaggttccagtgtccaacgagatatcaaattccgccagtagccacgaggaggacaatcgcagtgagaccgcatctagcggttatgccagcgtgcagggaaccgacgagcctcctcttgaggaacatgtccagagcactaatgagtccctacagctggtcaaccacgaggccaactcggtcgcggtggacgtcatcccccatgtggacaaccccacattcgaggaggatgagactcccaatcaggaaaccgccgtgagagaaatcaagagctag

SEQ ID NO: 215615 - DNA, 750 bp, Artificial Sequence
  derived and/or modified sequence
atgagcgcctacgtgaccgtgacctactacaacgagaccagcaactacacggctatcgagacttgtgaatgcggggtatacgggcttgcttcccccgttgctaatgccatgggagttgttgggatccctaagaacaataattatcaggcatgcgatcacaatactgagttctctaataccaaaaagccttggattgctctcatcgaaaggggaaactgtactttctcggaaaaaatccagacagcaggccgccgaaatgcagatgccgtggtgatctataacgctccggagaccggcaaccaaaccatccagatggctaacttcggcgccgttgacattgttgcgattatgatcgggaatctgaaaggcaccaagatactgcagagcattcaacggggcatccaggtcactatggttatagaggtcggtaagaaacatggtccctgggttaatcactacagtattttttttgtgtctgtctccttcttcattatcaccgccgcaaccgtggggtacttcatattctactccgcccgacgcctacgtaatgctcgggctcaatctaggaagcaacggcagctgaaggctgacgccaagaaagctattgggaggctgcagctgcgtaccctaaaacaaggagataaggaaattggtcccgacggcgattcctgcgctgtttgtattgagctttataagcctaacgatttggtgcgcattctgacgtgtaatcatatcttccacaagacctag

SEQ ID NO: 215616 - DNA, 1209 bp, Artificial Sequence
  derived and/or modified sequence
atgaatcaggaaaacagatcgtcatttttctggttactagtcatctttacatttctacttaagattaccgcctctttttcaatgtctgcctacgtgactgtcacgtactataatgagacctcgaactacacggcaatcgagacatgcgaatgtggagtgtacggactggcgagcccagtggcgaatgccatgggcgtcgtggggatccctaagaacaacaactaccaggcgtgcgaccataacaccgaatttagcaacacaaaaaaaccctggatcgctcttatcgagaggggcaactgcaccttttccgaaaaaattcagacggccggtcgcagaaacgcagacgccgtggtgatttataatgcacctgagactggtaatcagacaatccaaatggcaaattttggcgctgttgacatagttgcgatcatgattggaaacctgaagggtactaaaatcctccagagcatacaaagaggaattcaagtgaccatggttattgaggtgggaaaaaagcacggtccatgggtcaaccactactctatctttttcgtctccgtttcctttttcatcatcactgctgctacagtgggttacttcatcttctattctgcgcgtagactgagaaacgcgagggcgcagtcccggaagcagcggcagctcaaggccgacgccaagaaggccatcggaagactccagctaaggacactaaaacaaggagacaaggaaatcggaccggacggagattcttgcgccgtttgcatagagttgtataaaccaaacgatctcgtccggatcctgacctgtaaccacatctttcacaagacctgtgtggatccgtggctgttagagcatagaacatgccctatgtgcaaatgcgatatcctaaaggcccttggaattgaggtggacgttgaggatggatccgtttccctccaagtcccagtgagtaacgagattagtaactcagcctcttctcatgaagaggacaatcgctccgagacagcgtcatctggatacgccagtgtccaagggaccgatgaaccccctctggaggaacacgtccagagcaccaatgagagcttgcagctggtgaatcatgaagctaacagtgtggctgtagacgttatcccccacgtggacaatcccacttttgaggaagacgaaactcctaaccaggaaactgctgtaagggagatcaagagttag

SEQ ID NO: 215617 - DNA, 750 bp, Artificial Sequence
  derived and/or modified sequence
atgtccgcttacgtaactgttacctactacaacgaaacaagtaattatacagccatagagacctgtgaatgcggggtgtacggcctagcatctcctgtggccaatgcaatgggagtggtgggaattcccaaaaataacaactaccaggcatgtgatcataacacggagttctctaatactaagaagccctggatcgcgcttatagagcgaggcaattgcaccttttccgagaagatccagaccgccggtcggcgtaacgccgacgccgtggttatctacaacgcccctgagaccggaaaccagactatacaaatggcaaacttcggcgctgtcgatatcgtggcgatcatgatcgggaaccttaaaggcactaaaatcctgcagtccattcagcggggaattcaagtcactatggttattgaagtgggcaagaagcatgggccttgggtgaatcactatagcatctttttcgtgagtgtgtcattctttatcattacagccgcaactgtgggctattttatcttttattctgcacgccgactcagaaatgcacgcgcacagagccggaaacagcgccaactcaaggccgatgccaagaaggctatagggagattgcagctgaggacattaaagcagggtgataaggaaattgggcctgacggcgactcatgtgctgtctgtatcgaattgtacaagcccaatgaccttgtccggattttaacttgtaaccacatcttccacaaaacatag

SEQ ID NO: 215618 - DNA, 2654 bp, Artificial Sequence
  derived and/or modified sequence
atagagctgatgtatccagaggttatgttgctagaggtgagatcagttacctacgtgcaactgaaatttcaaacttctgttcagcagggacgtgagtggacaatggtgactgatagttggaaatatcagcaaacatcttaaattttatactcaaatgaatgagcaatgaaccaggagaataggtccagttttttttggctccttgtaatttttacctttttacttaaaattacagcatctttttcaatgagtgcctatgtgactgtgacttattacaatgaaaccagcaactacactgcaatagagacatgtgaatgtggcgtttatggattagcttcaccagtggctaatgctatgggagtggtaggcatccctaagaacaataactaccaagcttgtgaccacaacactgagtttagtaatactaagaagccctggattgcgctgatagaaagaggtaattgtacattttcagaaaaaattcaaacagcgggcagaagaaatgctgatgctgttgtgatttacaatgctccagagactggcaatcagacgatacagatggcaaattttggtgcagtagacattgttgcaatcatgatcggcaatctgaaaggcacaaaaattctgcaatctattcaaagaggcatacaagtgacaatggtcatagaagtagggaaaaaacatggcccttgggtgaatcactattcaatttttttcgtttctgtgtccttttttattattacggcggcaactgtgggctattttatcttttattctgctcgaaggctacggaatgcaagagctcaaagcaggaagcagaggcaattaaaggcagatgctaaaaaagctattggaaggcttcaactacgcacactgaaacaaggagacaaggaaattggccctgatggagatagttgtgctgtgtgcattgaattgtataaaccaaatgatttggtacgcatcttaacgtgcaaccatattttccataagacatgtgttgacccatggctgttagaacacaggacttgccccatgtgcaaatgtgacatactcaaagctttgggaattgaggtggatgttgaagatggatcagtgtctttacaagtccctgtatccaatgaaatatctaatagtgcctcctcccatgaagaggataatcgcagcgagaccgcatcatctggatatgcttcagtacagggaacagatgaaccgcctctggaggaacacgtgcagtcaacaaatgaaagtctacagctggtaaaccatgaagcaaattctgtggcagtggatgttattcctcatgttgacaacccaacctttgaagaagacgaaactcctaatcaagagactgctgttcgagaaattaaatcttaaaatctgtgtaaatagaaaacttgaaccattagtaataacagaactgccaatcagggcctagtttctattaataaattggataaatttaataaaataagagtgatactgaaagtgctcagatgactaatattatgctatagttaaatggcttaaaatatttaacctgttaacttttttccacaaactcattataatatttttcataggcaagtttcctctcagtagtgataacaacatttttagacattcaaaactgtcttcaagaagtcacgtttttcatttataacaattttcttataaaaacatgttgcttttaaaatgtggagtagctgtaatcactttattttatgatagtatcttaatgaaaaatactacttctttagcttgggctacatgtgtcagggtttttctccaggtgcttatattgatctggaattgtaatgtaaaaagcaatgcaaacttaggcgagtacttcttgaaatgtctatttaagctgctttaagttaatagaaaagattaaagcaaaatattcatttttactttttcttatttttaaaattaggctgaatgtacttcatgtgatttgtcaaccatagtttatcagagattatggacttaattgattggtatattagtgacatcaacttgacacaagattagacaaaaaattccttacaaaaatactgtgtaactatttctcaaacttgtgggatttttcaaaagctcagtatatgaatcatcatactgtttgaaattgctaatgacagagtaagtaacactaatattggtcattgatcttcgttcatgaattagtctacagaaaaaaaatgttctgtaaaattagtctgttgaaaatgttttccaaacaatgttactttgaaaattgagtttatgtttgacctaaatgggctaaaattacattagataaactaaaattctgtccgtgtaactataaattttgtgaatgcattttcctggtgtttgaaaaagaagggggggagaattccaggtgccttaatataaagtttgaagcttcatccaccaaagttaaatagagctatttaaaaatgcactttatttgtactctgtgtggcttttgttttagaattttgttcaaattatagcagaatttaggcaaaaataaaacagacatgtatttttgtttgctgaatggatgaaaccattgcattcttgtacactgatttgaaatgctgtaaatatgtcccaatttgtattgattctctttaaatataaaatgtaaataaaatattccaataaaa

SEQ ID NO: 215619 - DNA, 839 bp, Artificial Sequence
  derived and/or modified sequence
tggaggaggggcaagcaaaggggaatgtagataactaaagtgaaatagagctgatgtatccagaggttatgttgctagagcatctttttcaatgagtgcctatgtgactgtgacttattacaatgaaaccagcaactacactgcaatagagacatgtgaatgtggcgtttatggattagcttcaccagtggctaatgctatgggagtggtaggcatccctaagaacaataactaccaagcttgtgaccacaacactgagtttagtaatactaagaagccctggattgcgctgatagaaagaggtaattgtacattttcagaaaaaattcaaacagcgggcagaagaaatgctgatgctgttgtgatttacaatgctccagagactggcaatcagacgatacagatggcaaattttggtgcagtagacattgttgcaatcatgatcggcaatctgaaaggcacaaaaattctgcaatctattcaaagaggcatacaagtgacaatggtcatagaagtagggaaaaaacatggcccttgggtgaatcactattcaatttttttcgtttctgtgtccttttttattattacggcggcaactgtgggctattttatcttttattctgctcgaaggctacggaatgcaagagctcaaagcaggaagcagaggcaattaaaggcagatgctaaaaaagctattggaaggcttcaactacgcacactgaaacaaggagacaaggaaattggccctgatggagatagttgtgctgtgtgcattgaattgtataaaccaaatgatttggtacgcatcttaacgtgcaaccatattttccataagacat

SEQ ID NO: 215620 - DNA, 1209 bp, Artificial Sequence
  derived and/or modified sequence
atgaaccaggagaacagaagcagcttcttctggctgctggtgatcttcaccttcctgctgaagatcaccgccagcttcagcatgagcgcctacgtgaccgtgacctactacaacgagaccagcaactacaccgccatcgagacctgcgagtgcggcgtgtacggcctggccagccccgtggccaacgccatgggcgtggtgggcatccccaagaacaacaactaccaggcctgcgaccacaacaccgagttcagcaacaccaagaagccctggatcgccctgatcgagagaggcaactgcaccttcagcgagaagatccagaccgccggcagaagaaacgccgacgccgtggtgatctacaacgcccccgagaccggcaaccagaccatccagatggccaacttcggcgccgtggacatcgtggccatcatgatcggcaacctgaagggcaccaagatcctgcagagcatccagagaggcatccaggtgaccatggtgatcgaggtgggcaagaagcacggcccctgggtgaaccactacagcatcttcttcgtgagcgtgagcttcttcatcatcaccgccgccaccgtgggctacttcatcttctacagcgccagaagactgagaaacgccagagcccagagcagaaagcagagacagctgaaggccgacgccaagaaggccatcggcagactgcagctgagaaccctgaagcagggcgacaaggagatcggccccgacggcgacagctgcgccgtgtgcatcgagctgtacaagcccaacgacctggtgagaatcctgacctgcaaccacatcttccacaagacctgcgtggacccctggctgctggagcacagaacctgccccatgtgcaagtgcgacatcctgaaggccctgggcatcgaggtggacgtggaggacggcagcgtgagcctgcaggtgcccgtgagcaacgagatcagcaacagcgccagcagccacgaggaggacaacagaagcgagaccgccagcagcggctacgccagcgtgcagggcaccgacgagccccccctggaggagcacgtgcagagcaccaacgagagcctgcagctggtgaaccacgaggccaacagcgtggccgtggacgtgatcccccacgtggacaaccccaccttcgaggaggacgagacccccaaccaggagaccgccgtgagagagatcaagagctag

SEQ ID NO: 215621 - DNA, 750 bp, Artificial Sequence
  derived and/or modified sequence
atgagcgcctacgtgaccgtgacctactacaacgagaccagcaactacaccgccatcgagacctgcgagtgcggcgtgtacggcctggccagccccgtggccaacgccatgggcgtggtgggcatccccaagaacaacaactaccaggcctgcgaccacaacaccgagttcagcaacaccaagaagccctggatcgccctgatcgagagaggcaactgcaccttcagcgagaagatccagaccgccggcagaagaaacgccgacgccgtggtgatctacaacgcccccgagaccggcaaccagaccatccagatggccaacttcggcgccgtggacatcgtggccatcatgatcggcaacctgaagggcaccaagatcctgcagagcatccagagaggcatccaggtgaccatggtgatcgaggtgggcaagaagcacggcccctgggtgaaccactacagcatcttcttcgtgagcgtgagcttcttcatcatcaccgccgccaccgtgggctacttcatcttctacagcgccagaagactgagaaacgccagagcccagagcagaaagcagagacagctgaaggccgacgccaagaaggccatcggcagactgcagctgagaaccctgaagcagggcgacaaggagatcggccccgacggcgacagctgcgccgtgtgcatcgagctgtacaagcccaacgacctggtgagaatcctgacctgcaaccacatcttccacaagacctag

SEQ ID NO: 215622 - protein, 573 aa, Artificial Sequence
  derived and/or modified sequence
MRPRGLPPLLVVLLGCWASVSAQTDATPAVTTEGLNSTEAALATFGTFPSTRPPGTPRAPGPSSGPRPTPVTDVAVLCVCDLSPAQCDINCCCDPDCSSVDFSVFSACSVPVVTGDSQFCSQKAVIYSLNFTANPPQRVFELVDQINPSIFCIHITNYKPALSFINPEVPDENNFDTLMKTSDGFTLNAESYVSFTTKLDIPTAAKYEYGVPLQTSDSFLRFPSSLTSSLCTDNNPAGQAYWFTPVIPALWEAEARGSLEVPDSRKKVPITVQSIVIQSLNKTLTRREDTDVLQPTLVNAGHFSLCVNVVLEVKYSLTYTDAGEVTKADLSFVLGTVSSVVVPLQQKFEIHFLQENTQPVPLSGNPGYVVGLPLAAGFQPHKGSGIIQTTNRYGQLTILHSTTEQDCLALEGVRTPVLFGYTMQSGCKLRLTGALPCQLVAQKVKSLLWGQGFPDYVAPFGNSQAQDMLDWVPIHFITQSFNRKDSCQLPGALVIEVKWTKYGSLLNPQAKIVNVTANLISSSFPEANSGNERTILISTAVTFVDVSAPAEAGFRAPPAINARLPFNFFFPFV

SEQ ID NO: 215623 - DNA, 1879 bp, Artificial Sequence
  derived and/or modified sequence
gcgcctggctgtcgcggttgccgggcaacgcgctgtccatgtcgcgggcctcgctgggactccctgggagatgaggccgcgaggtctcccgccgctcctggtggtgctcctgggctgctgggcctccgtgagcgcccagaccgatgccaccccggcggtgacgacagagggcctcaactccaccgaggcagccctggccaccttcggaactttcccgtcgaccaggccccccgggactcccagggctccagggccctcctccggccccaggcctaccccagtcacggacgttgctgttctctgtgtctgtgacttatccccagcacagtgtgacatcaactgctgctgtgatcccgactgcagctccgtggatttcagtgtcttttctgcctgctcagttccagttgtcacgggcgacagccagttttgtagtcaaaaagcagtcatctattcattgaattttacagcaaacccacctcaaagagtatttgaacttgttgaccagattaatccatctattttctgcattcatattacaaactataaacctgcattatcctttattaatccagaagtacctgatgaaaacaattttgatacattgatgaaaacatctgatggttttacattgaatgctgaatcatatgtttccttcacaaccaaactggatattcctactgctgctaaatatgagtatggggttcctctgcagacttcagattcgtttctgagatttccttcgtccctgacatcatctctgtgcactgataataaccctgcaggccaggcgtactggttcacacctgtaatcccagcactctgggaggccgaggcgagaggatcacttgaggtacctgattcaagaaaaaaggtccctatcactgttcagtccatcgtcattcagtctctaaataaaacgctcacccgacgggaggacactgatgtgctgcagccgactctcgtcaacgctggacactttagcctttgcgtgaatgttgttcttgaggtaaagtacagcctcacatacacagatgcaggtgaagtcaccaaagctgatctctcattcgttctggggacagttagcagcgtagtggtcccactgcagcaaaagtttgaaattcattttcttcaggaaaatacccagccagtccctctcagtggaaaccctggttatgtcgtggggctcccattagctgctggattccagcctcataaggggtctgggattattcagaccacaaatagatatggacagcttactattcttcatagcacaactgagcaagactgcttagcactggagggggtccggaccccagtattatttggttacactatgcaatctggctgtaaactaagactgactggagctctcccgtgtcagctcgtagcacagaaggtgaagagcctgctgtggggccagggcttcccagattacgtggccccttttggaaattcccaggcccaggacatgctggactgggtgcccatccacttcatcacccagtcattcaacaggaaggattcctgccagctcccaggggctttggttatagaagtgaagtggactaaatacggatccctgctgaatccacaggccaaaatagtcaatgtaactgcaaatctaatttcatcctcctttcctgaggccaactcaggaaatgaaaggacgattcttatttccactgcggttacttttgtggatgtgtctgcacctgcagaggcaggcttcagagctccaccagccatcaatgccaggctgccctttaacttcttcttcccgtttgtttgacaatgctcagatgcatcagttccttaatatacacgtgaaatttgaaaactgtacattcggtgagattaaattttatatacaactagc

SEQ ID NO: 215624 - DNA, 1722 bp, Artificial Sequence
  derived and/or modified sequence
atgagaccaagaggactgccgccactactggtagtcttgttaggttgttgggctagcgtgagcgcacaaaccgatgccacccccgctgtcactaccgaggggctcaatagtactgaggcggcacttgccacctttggcacttttccctctacaagaccccctggcacacctcgggctccaggccctagttccgggcctagacccacccctgttactgatgtggccgtcttgtgcgtgtgtgacctgagtcctgcccagtgcgatataaattgttgttgtgaccccgattgttcaagtgtggacttctccgtgttcagcgcctgctctgtgccagtggtgacaggggactctcagttctgcagtcagaaggctgtgatctactcattgaactttacagcaaacccaccacagagagtgttcgagctcgtggatcaaataaatcccagcatattttgcatacacatcaccaattataagccagccctgagcttcatcaatcctgaagtccctgacgaaaataatttcgatacgctcatgaagacctccgacggattcacgctgaacgccgagagttacgtaagctttaccacgaagctggacatccctaccgccgctaagtatgagtacggagtgcccctacagaccagtgattcattcctgcgatttccatcctctctgacgtcctccctgtgcacggataacaaccccgctggccaggcctattggtttacacctgtgatccccgctctttgggaggccgaggccagaggttcactggaggtccccgactcccgcaagaaagtgcccatcacggtgcaatccatcgttatccagagcctgaacaaaacactgactcgcagggaggacaccgacgtgctacagccaacgctagtgaatgccggtcatttcagcctgtgtgtgaacgtcgtcctagaagttaaatactctcttacttatacagacgctggcgaagttaccaaagcagacctctcttttgtcttaggcaccgtatcttctgttgtggtgcccctacagcaaaaatttgaaatccacttcctccaagaaaacacacaacctgttccactgtcaggcaatcccggttacgtagttggattacccctggctgccggatttcagccgcacaagggcagcggtatcattcagacaacaaataggtacggtcagctaacaatactacacagtactactgagcaggactgtctagctctcgagggtgtgcggacaccagtgctgtttggctacactatgcagagtggatgtaagctgaggctgaccggtgccctgccttgccagctggttgctcaaaaagtgaagagtttattgtgggggcagggcttcccagattacgtggcccctttcggaaattcacaggcacaggatatgcttgactgggtgcccatccatttcattacacaaagtttcaatcgaaaggattcatgccaattgccgggtgctctggtcatcgaggtcaagtggacaaagtacgggagcttactcaacccgcaagccaagatcgtgaacgtgacagcgaatctgatatctagctctttccctgaggccaatagcggcaacgaaagaactattctcatcagcaccgctgtcacgttcgtggacgtctcggcgcctgcagaggccggattcagagcgccacccgcaattaacgctcgccttccctttaactttttctttccttttgtctag

SEQ ID NO: 215625 - DNA, 1722 bp, Artificial Sequence
  derived and/or modified sequence
atgcggcctcgcgggttgccccctctcttggtagttctgctaggctgctgggcctccgttagcgcacagaccgatgcgactcccgccgtgaccacagaaggtctcaactccacagaagcggccctagccacatttgggactttcccctcaacccgtcccccaggaaccccacgggcccccggtccgtctagtggcccacggccaactcccgtgaccgatgttgccgtactgtgtgtttgcgatttgtcacctgcccagtgtgatatcaattgttgttgcgaccccgattgttctagtgtagactttagcgtcttcagcgcctgtagcgttccagtcgtgacaggcgattcacagttttgctcacaaaaagccgtcatttacagtctgaatttcactgccaatcccccacagagggtatttgaactggtggaccagatcaacccatccatcttttgtattcacattacaaactataagcccgccctttcctttataaacccagaagtaccagacgaaaataacttcgatacattaatgaagacatcagatgggtttacactgaacgctgagtcctacgtaagtttcaccactaaattagatattcccactgctgcaaaatatgagtacggggtccccttgcagacaagcgattccttcctcagatttccctccagtctgacctcttccttatgcaccgacaataatcccgcgggacaggcatactggtttaccccggtgatccccgcactgtgggaagccgaagcaagaggttctctggaggtaccagattcgcgtaaaaaagtcccaattaccgtgcagtcaatcgtcatccagagtctgaataagactttaacgagacgtgaagataccgatgtgcttcagcccacactggtgaacgccggccatttctccctgtgtgttaatgtggttctcgaggtgaaatactcgcttacatacaccgacgctggtgaggttactaaagcggacctgagttttgtactgggcactgtgagtagtgtagtagtacctctgcagcaaaaattcgaaatccattttttgcaggagaacacacagccagttcctctttcaggcaatccaggttacgtcgtaggcctcccgctcgcggccggctttcagccacacaaaggcagcggaattatccaaactaccaatcgatacggccagctgacgattctccattcgactaccgaacaggactgtcttgcccttgagggtgtgcgtacgcctgttctattcggatataccatgcagagtggctgtaagctgcgactgaccggcgctcttccttgtcaactcgtcgctcagaaggttaagtcgctgctgtggggccaggggttccctgattatgttgctccctttggtaacagccaggcacaggatatgctggactgggtgccgatccatttcatcacacagtcttttaataggaaggactcatgccagctccccggcgccctcgtgatagaagttaagtggacaaaatatggctcacttctcaatccccaagctaagatcgtgaacgtaacagccaacttaatctcttcttcattcccggaagctaactcaggcaacgaaaggaccattttgatcagcactgcagtgacgttcgttgatgtgtccgcgcccgctgaggctggcttcagggctcctccagctatcaatgccagactcccatttaatttttttttcccattcgtatag

SEQ ID NO: 215626 - DNA, 1722 bp, Artificial Sequence
  derived and/or modified sequence
atgcgacccagagggctcccaccgttgcttgtagtcctattgggttgttgggcgtctgtcagtgcacagactgacgcaacccctgcagttactaccgaaggcctcaattcaactgaggctgccctggctacctttggaaccttcccctctacccgacctcccggtactccccgagctcctgggcccagctccgggccacgacccaccccagtaaccgacgttgccgttctatgcgtgtgtgatctttctcccgcccaatgtgacatcaactgttgctgcgacccagattgctcttccgtggattttagcgtgttctctgcgtgctcggttccagtcgttacaggtgatagccagttttgctcccagaaagcagtgatctactccttgaattttaccgccaacccccctcagcgggtgtttgaattggtcgatcaaatcaacccctctatcttctgcattcacattactaactataagccagctctaagctttattaaccctgaagtgcctgacgaaaacaactttgacaccctgatgaaaacctctgacggattcacccttaatgcagaaagttatgtgtctttcactacaaaacttgacatccctaccgctgctaaatatgaatacggagtgcccctgcaaaccagtgactcctttctgcggttccctagctcactgacatcttctctgtgcaccgacaataaccccgccggacaggcctactggttcacacccgtgatacccgccctgtgggaggcagaagcgaggggctcactcgaggtcccggactcacgaaaaaaagtgccgatcaccgtgcagtctatcgtcatccagtctctgaataagaccctaacaagaagagaagataccgacgttctccaacctacactcgttaatgccggacacttcagcctatgtgtgaatgttgttctcgaggtgaagtatagtctcacatataccgatgccggcgaggtgacgaaggccgatttaagcttcgtgttgggtacagttagcagcgttgttgtaccattacagcagaaatttgagattcactttttgcaggagaacacacaacccgtacccctgagcgggaatcctggctacgttgttgggctacccctcgcagcaggtttccagcctcataagggaagtggaataatacagactacaaaccgctatgggcaactaacaattctgcactcaacaaccgagcaagattgcctggctcttgaaggtgtgagaactcctgtgttgtttggctacaccatgcagtctggctgcaaactgcgtcttaccggggccttgccttgccagttagtcgcacagaaagtcaaaagtcttctgtggggtcaaggttttcccgactacgttgctcccttcggaaactcccaggctcaggacatgctggattgggtgccaattcactttattacacagtcattcaaccgaaaggacagctgtcagttgccgggggccctcgtcatcgaagtcaaatggacaaagtacggctctcttttgaatccacaagctaagatagtgaatgtgacagcaaacctaatctcttctagttttccggaagccaactctgggaatgaacgcacaattctaatatccacagcagtaacctttgtcgacgtctccgcgcctgccgaagccggattccgagctcccccagcaatcaacgcccgccttccatttaacttcttttttccatttgtatag

SEQ ID NO: 215627 - DNA, 1722 bp, Artificial Sequence
  derived and/or modified sequence
atgagacccagaggcctgccccccctgctggtggtgctgctgggctgctgggccagcgtgagcgcccagaccgacgccacccccgccgtgaccaccgagggcctgaacagcaccgaggccgccctggccaccttcggcaccttccccagcaccagaccccccggcacccccagagcccccggccccagcagcggccccagacccacccccgtgaccgacgtggccgtgctgtgcgtgtgcgacctgagccccgcccagtgcgacatcaactgctgctgcgaccccgactgcagcagcgtggacttcagcgtgttcagcgcctgcagcgtgcccgtggtgaccggcgacagccagttctgcagccagaaggccgtgatctacagcctgaacttcaccgccaaccccccccagagagtgttcgagctggtggaccagatcaaccccagcatcttctgcatccacatcaccaactacaagcccgccctgagcttcatcaaccccgaggtgcccgacgagaacaacttcgacaccctgatgaagaccagcgacggcttcaccctgaacgccgagagctacgtgagcttcaccaccaagctggacatccccaccgccgccaagtacgagtacggcgtgcccctgcagaccagcgacagcttcctgagattccccagcagcctgaccagcagcctgtgcaccgacaacaaccccgccggccaggcctactggttcacccccgtgatccccgccctgtgggaggccgaggccagaggcagcctggaggtgcccgacagcagaaagaaggtgcccatcaccgtgcagagcatcgtgatccagagcctgaacaagaccctgaccagaagagaggacaccgacgtgctgcagcccaccctggtgaacgccggccacttcagcctgtgcgtgaacgtggtgctggaggtgaagtacagcctgacctacaccgacgccggcgaggtgaccaaggccgacctgagcttcgtgctgggcaccgtgagcagcgtggtggtgcccctgcagcagaagttcgagatccacttcctgcaggagaacacccagcccgtgcccctgagcggcaaccccggctacgtggtgggcctgcccctggccgccggcttccagccccacaagggcagcggcatcatccagaccaccaacagatacggccagctgaccatcctgcacagcaccaccgagcaggactgcctggccctggagggcgtgagaacccccgtgctgttcggctacaccatgcagagcggctgcaagctgagactgaccggcgccctgccctgccagctggtggcccagaaggtgaagagcctgctgtggggccagggcttccccgactacgtggcccccttcggcaacagccaggcccaggacatgctggactgggtgcccatccacttcatcacccagagcttcaacagaaaggacagctgccagctgcccggcgccctggtgatcgaggtgaagtggaccaagtacggcagcctgctgaacccccaggccaagatcgtgaacgtgaccgccaacctgatcagcagcagcttccccgaggccaacagcggcaacgagagaaccatcctgatcagcaccgccgtgaccttcgtggacgtgagcgcccccgccgaggccggcttcagagccccccccgccatcaacgccagactgcccttcaacttcttcttccccttcgtgtag

SEQ ID NO: 215628 - DNA, 1722 bp, Artificial Sequence
  derived and/or modified sequence
atgagacctcgcggcctgccccccctgctggtggtgcttttagggtgctgggcatcggtcagcgcgcagacggatgcaaccccagccgtgaccacagaaggcctgaactcaacagaggcagccctggccacattcgggacattcccatcgactcgccccccgggtacgcctcgagctccagggcctagttcaggccctaggcccacacccgtgactgatgtcgccgtattgtgtgtctgcgatttgtcccccgcacagtgtgatataaactgctgttgtgatcccgactgttcctccgtggatttcagtgttttctctgcctgtagtgtcccagttgttactggagactctcagttctgttcccagaaggcggtcatttattccttgaactttactgcgaaccccccccaacgtgtatttgagctggtggaccaaatcaacccatccattttttgtatccatataacgaactacaagcccgctctgagcttcatcaatccggaggtcccggatgagaacaactttgatacactaatgaaaacgtctgatggttttaccctgaatgcagaaagctacgtgagttttacaaccaaactagatatcccaacggctgccaaatacgagtacggcgtccccttacagactagtgattcttttctgcgcttcccatcgtcactcacttccagtctgtgcacagataataaccccgcgggtcaggcatattggttcacccccgtaattccagcactgtgggaggctgaagcacgtggatcactcgaggtgccggattcgagaaaaaaggtacccatcaccgtgcaatccatcgttatccaatctttgaacaagacactgaccagaagagaggacactgacgtcctgcagccaaccctggtcaacgccgggcacttcagcctgtgtgtgaatgtagttttggaagtgaagtactcgctcacctataccgacgccggcgaagtgactaaggcggatttgtcattcgttctgggaaccgtctcatcagttgtggtacctttgcagcagaaattcgaaatccactttttacaggaaaacacgcagccagtgccactgagcggtaatccaggctacgtggtgggcctgcctctggccgccgggttccagccacacaagggaagtggcatcatccagaccactaatcgatatgggcagctcactattcttcattctaccacagagcaggattgccttgctcttgagggcgtcaggactcctgtgctgtttgggtataccatgcagagcgggtgtaaactgcggttgaccggggcacttccatgtcaactggtggcccagaaggtgaaatcattactctgggggcagggttttccagattacgtggcaccgtttggtaatagccaggctcaggatatgctagactgggtccccatccatttcatcacgcagagctttaatcggaaggattcttgtcaactgcccggggccctcgtaatcgaagtgaagtggactaaatacggcagtcttctaaacccacaggccaagattgttaatgtgacagctaacctgattagcagttcttttcccgaggcaaattccgggaacgagcggaccatcctgatctcaaccgctgtgactttcgtggatgtgtcagctcccgccgaggccggctttagagcccccccggccattaatgcgcgattgccctttaattttttctttcctttcgtgtag

SEQ ID NO: 215629 - DNA, 1722 bp, Artificial Sequence
  derived and/or modified sequence
atgaggccccggggcctgccccccctgctggtggtgctgctgggctgctgggcctctgtgtctgcccagacagatgccaccccagctgtgaccacagagggcctgaacagcacagaggccgccctggccaccttcggcaccttccccagcaccaggcctcctggcaccccccgggcccctggccccagcagcggcccccggcccacccctgtgacagatgtggccgtgctgtgtgtgtgtgacctgagccctgcccagtgtgacatcaactgctgctgtgaccctgactgcagctctgtggacttctctgtgttcagcgcctgcagcgtgcctgtggtgactggagacagccagttctgcagccagaaggccgtcatctacagcctgaacttcaccgccaaccccccccagagggtgtttgagctggtggaccagatcaaccccagcatcttctgcatccacatcaccaactacaagccagccctgtccttcatcaaccctgaggtgcctgatgagaacaactttgacaccctgatgaagaccagtgatggcttcaccctgaatgctgagagctatgtgtccttcaccaccaagctggacatccccacagctgccaagtatgaatatggagtgcccctgcagaccagtgacagcttcctgcgcttccccagcagcctgaccagcagcctgtgcacagacaacaacccagctggccaggcctactggttcacccctgtgatcccagccctgtgggaggccgaggcccggggcagcctggaggtgcctgacagcaggaagaaggtgcccatcaccgtgcagagcatcgtcatccagagcctgaacaagaccctgacccggcgggaggacacagatgtgctgcagcccaccctggtgaatgccggccacttcagcctgtgtgtgaatgtggtgctggaggtgaagtacagcctgacctacacagatgctggggaggtgaccaaggctgacctgagctttgtgctgggcaccgtgtcctctgtggtggtgcccctgcagcagaagtttgagatccacttcctgcaggagaacacccagcctgtgcccctgagcggcaaccctggctacgtggtgggcctgcccctggccgccggcttccagccccacaagggcagcggcatcatccagaccaccaacagatatggccagctgaccatcctgcacagcaccacagagcaggactgcctggccctggagggcgtgaggacccctgtgctgtttggctacaccatgcagagcggctgcaagctgcggctgaccggggccctgccctgccagctggtggcccagaaggtgaagagcctgctgtggggccagggcttcccagactatgtggcccccttcggcaacagccaggcccaggacatgctggactgggtgcccatccacttcatcacccagagcttcaacaggaaggacagctgccagctgcccggggccctggtgattgaggtgaagtggaccaagtatggcagcctgctgaacccccaggccaagatcgtgaatgtgacagccaacctgatcagcagcagcttccctgaggccaacagcggaaatgaaagaaccatcctgatcagcacagctgtgacctttgtggatgtgtctgccccagctgaggccggcttccgggcccccccagccatcaatgcccggctgcccttcaacttcttcttcccctttgtgtag

SEQ ID NO: 215630 - DNA, 1722 bp, Artificial Sequence
  derived and/or modified sequence
atgcggccccggggcctgccccccctgctggtggtgctgctgggctgttgggcttccgtgagcgctcaaacagacgccaccccggctgtgaccactgagggccttaatagtaccgaagccgcactagccaccttcggaacattcccatctacaaggcctccaggaactccgagggcccctggaccttcttctggcccaagacctacaccggtcacagatgtcgccgtgctgtgtgtgtgcgaccttagcccagcccaatgcgacataaattgttgctgtgaccctgactgcagttccgttgatttttccgttttttccgcctgtagtgtaccagtggtgaccggtgattcacagttttgctcccagaaggctgttatatattctctcaacttcaccgccaaccctcctcagcgggtgttcgaactcgtcgaccagataaatccatcaatcttttgcattcacatcaccaactacaagcccgcactgtccttcattaatccagaggtccccgacgagaacaattttgacacattgatgaaaacgtccgacggattcaccctgaatgcggagagctacgtgtcctttacaaccaagctcgacattcccaccgccgcaaagtacgagtatggcgtgcccctccagacttccgacagcttccttcgtttcccatcctctttaaccagctctctttgtaccgacaataatccagcgggccaggcctactggttcacgccggtgatcccagctctatgggaggcagaagcgcgtggctctctggaggtccccgattcccgtaagaaggtgccaataactgtacagtccattgtcatccagagtttgaacaagaccctgacccgcagagaagacacagacgttttgcaacccactctggtgaatgcgggccacttctcactgtgtgtgaacgttgtgctagaggtaaaatattccctgacctacaccgacgccggggaagtcactaaagctgacctctcattcgtcttagggacagtgagcagcgtcgtggtgcccctccagcagaagttcgagatccacttcttgcaggagaatacccagcctgtgcccttatccgggaatcctgggtatgtggtgggcctgcccctggcggcaggattccagccccacaagggatccggtattattcagaccacaaatagatacggccaattgactatcctccactcaaccacggaacaagattgtctggccttagaaggagtcagaactccagtccttttcggatacacgatgcagagcggctgcaaactgaggctcaccggagccctgccttgtcagctcgtggcgcagaaggtcaagtcacttttgtggggacaaggtttccctgactacgtggctcctttcggtaactcgcaggcccaggatatgctggattgggttccgatacatttcatcacacagtctttcaaccgaaaggactcctgccaattgcccggtgctttggtcattgaggtgaaatggaccaagtacggatcactgctgaacccgcaggctaagatcgtgaatgtaacggctaacttaatttcctcctctttccctgaagcgaattcaggcaacgagagaacgatccttatctccaccgctgtcacttttgtcgatgtgtcagccccagccgaggctgggttcagagccccaccggctattaatgcaagactgccatttaatttttttttccccttcgtgtag

SEQ ID NO: 215631 - RNA, 1722 nt, Artificial Sequence
  derived and/or modified sequence
augcggccucgcggguugcccccucucuugguaguucugcuaggcugcugggccuccguuagcgcacagaccgaugcgacucccgccgugaccacagaaggucucaacuccacagaagcggcccuagccacauuugggacuuuccccucaacccgucccccaggaaccccacgggcccccgguccgucuaguggcccacggccaacucccgugaccgauguugccguacuguguguuugcgauuugucaccugcccagugugauaucaauuguuguugcgaccccgauuguucuaguguagacuuuagcgucuucagcgccuguagcguuccagucgugacaggcgauucacaguuuugcucacaaaaagccgucauuuacagucugaauuucacugccaaucccccacagaggguauuugaacugguggaccagaucaacccauccaucuuuuguauucacauuacaaacuauaagcccgcccuuuccuuuauaaacccagaaguaccagacgaaaauaacuucgauacauuaaugaagacaucagauggguuuacacugaacgcugaguccuacguaaguuucaccacuaaauuagauauucccacugcugcaaaauaugaguacgggguccccuugcagacaagcgauuccuuccucagauuucccuccagucugaccucuuccuuaugcaccgacaauaaucccgcgggacaggcauacugguuuaccccggugauccccgcacugugggaagccgaagcaagagguucucuggagguaccagauucgcguaaaaaagucccaauuaccgugcagucaaucgucauccagagucugaauaagacuuuaacgagacgugaagauaccgaugugcuucagcccacacuggugaacgccggccauuucucccuguguguuaaugugguucucgaggugaaauacucgcuuacauacaccgacgcuggugagguuacuaaagcggaccugaguuuuguacugggcacugugaguaguguaguaguaccucugcagcaaaaauucgaaauccauuuuuugcaggagaacacacagccaguuccucuuucaggcaauccagguuacgucguaggccucccgcucgcggccggcuuucagccacacaaaggcagcggaauuauccaaacuaccaaucgauacggccagcugacgauucuccauucgacuaccgaacaggacugucuugcccuugagggugugcguacgccuguucuauucggauauaccaugcagaguggcuguaagcugcgacugaccggcgcucuuccuugucaacucgucgcucagaagguuaagucgcugcuguggggccagggguucccugauuauguugcucccuuugguaacagccaggcacaggauaugcuggacugggugccgauccauuucaucacacagucuuuuaauaggaaggacucaugccagcuccccggcgcccucgugauagaaguuaaguggacaaaauauggcucacuucucaauccccaagcuaagaucgugaacguaacagccaacuuaaucucuucuucauucccggaagcuaacucaggcaacgaaaggaccauuuugaucagcacugcagugacguucguugauguguccgcgcccgcugaggcuggcuucagggcuccuccagcuaucaaugccagacucccauuuaauuuuuuuuucccauucguauag

SEQ ID NO: 215632 - RNA, 1722 nt, Artificial Sequence
  derived and/or modified sequence
augcgacccagagggcucccaccguugcuuguaguccuauuggguuguugggcgucugucagugcacagacugacgcaaccccugcaguuacuaccgaaggccucaauucaacugaggcugcccuggcuaccuuuggaaccuuccccucuacccgaccucccgguacuccccgagcuccugggcccagcuccgggccacgacccaccccaguaaccgacguugccguucuaugcgugugugaucuuucucccgcccaaugugacaucaacuguugcugcgacccagauugcucuuccguggauuuuagcguguucucugcgugcucgguuccagucguuacaggugauagccaguuuugcucccagaaagcagugaucuacuccuugaauuuuaccgccaaccccccucagcggguguuugaauuggucgaucaaaucaaccccucuaucuucugcauucacauuacuaacuauaagccagcucuaagcuuuauuaacccugaagugccugacgaaaacaacuuugacacccugaugaaaaccucugacggauucacccuuaaugcagaaaguuaugugucuuucacuacaaaacuugacaucccuaccgcugcuaaauaugaauacggagugccccugcaaaccagugacuccuuucugcgguucccuagcucacugacaucuucucugugcaccgacaauaaccccgccggacaggccuacugguucacacccgugauacccgcccugugggaggcagaagcgaggggcucacucgaggucccggacucacgaaaaaaagugccgaucaccgugcagucuaucgucauccagucucugaauaagacccuaacaagaagagaagauaccgacguucuccaaccuacacucguuaaugccggacacuucagccuaugugugaauguuguucucgaggugaaguauagucucacauauaccgaugccggcgaggugacgaaggccgauuuaagcuucguguuggguacaguuagcagcguuguuguaccauuacagcagaaauuugagauucacuuuuugcaggagaacacacaacccguaccccugagcgggaauccuggcuacguuguugggcuaccccucgcagcagguuuccagccucauaagggaaguggaauaauacagacuacaaaccgcuaugggcaacuaacaauucugcacucaacaaccgagcaagauugccuggcucuugaaggugugagaacuccuguguuguuuggcuacaccaugcagucuggcugcaaacugcgucuuaccggggccuugccuugccaguuagucgcacagaaagucaaaagucuucuguggggucaagguuuucccgacuacguugcucccuucggaaacucccaggcucaggacaugcuggauugggugccaauucacuuuauuacacagucauucaaccgaaaggacagcugucaguugccgggggcccucgucaucgaagucaaauggacaaaguacggcucucuuuugaauccacaagcuaagauagugaaugugacagcaaaccuaaucucuucuaguuuuccggaagccaacucugggaaugaacgcacaauucuaauauccacagcaguaaccuuugucgacgucuccgcgccugccgaagccggauuccgagcucccccagcaaucaacgcccgccuuccauuuaacuucuuuuuuccauuuguauag

SEQ ID NO: 215633 - protein, 394 aa, Artificial Sequence
  derived and/or modified sequence
MLSSFNEWFWQDRFWLPPNVTWTELEDRDGRVYPHPQDLLAALPLALVLLAMRLAFERFIGLPLSRWLGVRDQTRRQVKPNATLEKHFLTEGHRPKEPQLSLLAAQCGLTLQQTQRWFRRRRNQDRPQLTKKFCEASWRFLFYLSSFVGGLSVLYHESWLWAPVMCWDRYPNQTLKPSLYWWYLLELGFYLSLLIRLPFDVKRKDFKEQVIHHFVAVILMTFSYSANLLRIGSLVLLLHDSSDYLLEACKMVNYMQYQQVCDALFLIFSFVFFYTRLVLFPTQILYTTYYESISNRGPFFGYYFFNGLLMLLQLLHVFWSCLILRMLYSFMKKGQMEKDIRSDVEESDSSEEAAAAQEPLQLKNGAAGGPRPAPTDGPRSRVAGRLTNRHTTAT

SEQ ID NO: 215634 - protein, 113 aa, Artificial Sequence
  derived and/or modified sequence
MLSSFNEWFWQDRFWLPPNVTWTELEDRDGRVYPHPQDLLAALPLALVLLAMRLAFERFIGLPLSRWLGVRDQTRRQVKPNATLEKHFLTEGHRPKEPQLSLLAAQCGLTLQQ

SEQ ID NO: 215635 - protein, 192 aa, Artificial Sequence
  derived and/or modified sequence
MLSSFNEWFWQDRFWLPPNVTWTELEDRDGRVYPHPQDLLAALPLALVLLAMRLAFERFIGLPLSRWLGVRDQTRRQVKPNATLEKHFLTEGHRPKEPQLSLLAAQCGLTLQQTQRWFRRRRNQDRPQLTKKFCEASWRFLFYLSSFVGGLSVLYHESWLWAPVMCWDRYPNQTLKPSLYWWYLLELGFYLS

SEQ ID NO: 215636 - protein, 32 aa, Artificial Sequence
  derived and/or modified sequence
MLSSFNEWFWQDRFWLPPNVTWTELEDRDGRV

SEQ ID NO: 215637 - protein, 92 aa, Artificial Sequence
  derived and/or modified sequence
MLSSFNEWFWQDRFWLPPNVTWTELEDRDGRVYPHPQDLLAALPLALVLLAMRLAFERFIGLPLSRWLGVRDQTRRQVKPNATLEKHFLTEG

SEQ ID NO: 215638 - protein, 136 aa, Artificial Sequence
  derived and/or modified sequence
MLSSFNEWFWQDRFWLPPNVTWTELEDRDGRVYPHPQDLLAALPLALVLLAMRLAFERFIGLPLSRWLGVRDQTRRQVKPNATLEKHFLTEGHRPKEPQLSLLAAQCGLTLQQTQRWFRRRRNQDRPQLTKKFCEA

SEQ ID NO: 215639 - DNA, 1185 bp, Artificial Sequence
  derived and/or modified sequence
atgctgagcagcttcaacgagtggttctggcaggacagattctggctgccccccaacgtgacctggaccgagctggaggacagagacggcagagtgtacccccacccccaggacctgctggccgccctgcccctggccctggtgctgctggccatgagactggccttcgagagattcatcggcctgcccctgagcagatggctgggcgtgagagaccagaccagaagacaggtgaagcccaacgccaccctggagaagcacttcctgaccgagggccacagacccaaggagccccagctgagcctgctggccgcccagtgcggcctgaccctgcagcagacccagagatggttcagaagaagaagaaaccaggacagaccccagctgaccaagaagttctgcgaggccagctggagattcctgttctacctgagcagcttcgtgggcggcctgagcgtgctgtaccacgagagctggctgtgggcccccgtgatgtgctgggacagataccccaaccagaccctgaagcccagcctgtactggtggtacctgctggagctgggcttctacctgagcctgctgatcagactgcccttcgacgtgaagagaaaggacttcaaggagcaggtgatccaccacttcgtggccgtgatcctgatgaccttcagctacagcgccaacctgctgagaatcggcagcctggtgctgctgctgcacgacagcagcgactacctgctggaggcctgcaagatggtgaactacatgcagtaccagcaggtgtgcgacgccctgttcctgatcttcagcttcgtgttcttctacaccagactggtgctgttccccacccagatcctgtacaccacctactacgagagcatcagcaacagaggccccttcttcggctactacttcttcaacggcctgctgatgctgctgcagctgctgcacgtgttctggagctgcctgatcctgagaatgctgtacagcttcatgaagaagggccagatggagaaggacatcagaagcgacgtggaggagagcgacagcagcgaggaggccgccgccgcccaggagcccctgcagctgaagaacggcgccgccggcggccccagacccgcccccaccgacggccccagaagcagagtggccggcagactgaccaacagacacaccaccgccacctag

SEQ ID NO: 215640 - DNA, 1185 bp, Artificial Sequence
  derived and/or modified sequence
atgctgagcagcttcaacgagtggttttggcaggacagattttggttgccacccaatgtgacatggactgaactcgaagacagggacggtagggtctatccacacccccaggatctcctcgccgctctgccgttggctctggtgctgttggcgatgcgactcgcctttgagagattcatagggctgcccttatcacggtggctgggcgtcagggatcagactcgcagacaggtgaagcccaatgccacactggagaaacatttcctcaccgagggacatagacccaaggaacctcagctgagtctcttggccgcccagtgcgggttgacactgcaacagacccagcggtggttccggaggcgcaggaaccaggatcgcccccagttgacgaaaaagttttgtgaagccagttggaggttcctgttttacctttcttcttttgtaggaggcttgtctgtgctgtaccacgagtcgtggttgtgggcgccggtcatgtgctgggatcgatacccaaatcagaccctgaagccttctctgtactggtggtatctgctggaactcgggttttacctcagtctgctgatacggctgccgtttgatgtgaaacggaaggactttaaggagcaggtcattcatcattttgttgccgttatactgatgaccttttcctattctgctaatcttctgaggatcggctctttggtgctgcttcttcatgattcgtcagactaccttctggaggcctgtaaaatggtcaattatatgcagtaccagcaagtgtgtgacgctctgttcttaatcttctcatttgtgtttttttatacccgcctggtactgttccccactcagatactgtatactacttattacgagtccataagcaacagaggaccgttcttcggctactatttctttaatggactcctcatgctgttgcagctcctgcacgtgttttggtcttgcttgatcctgagaatgctgtactcgttcatgaagaaaggacagatggagaaggatattcgctccgacgtggaggagtccgacagtagtgaggaggctgccgcagcacaagagcctctccagctgaaaaatggcgccgctggtggtcctagacctgccccaacagatggcccaagatctagagtcgctgggagattgacaaatcggcatacaaccgccacatag

SEQ ID NO: 215641 - DNA, 1185 bp, Artificial Sequence
  derived and/or modified sequence
atgctctcatcatttaatgaatggttttggcaggatagattttggcttcctccgaatgtgacctggacagaattggaggatcgcgatgggagagtatatcctcacccacaagacctgctagccgcactgcctctggccctcgtcctcctggccatgagactcgcgtttgagcgattcatcggacttccactgtcaaggtggctgggcgtccgcgaccaaactcgcaggcaggtgaaacctaacgctacgcttgaaaagcatttcctgaccgagggccatcgcccgaaggaacctcagctgtctcttttagcagctcagtgcgggctgacactccagcaaacgcagcgctggtttagaaggcggagaaaccaggaccgtccccagttgaccaaaaagttttgtgaggcgagttggagatttctattctacctctcttcatttgtaggtggcctttccgtactctaccatgaatcatggctctgggccccagtcatgtgctgggataggtatcccaaccagactctgaaaccctcattatattggtggtacctgctcgagcttggattctacttgtcattgctaatacgtctgccttttgatgtcaaacgcaaggatttcaaggagcaggtgattcaccactttgtcgccgttatcctgatgacattcagctacagcgctaatctgttgcgtattgggtcactcgtgctgctgctgcatgacagttccgactatctactggaggcctgcaagatggtgaactacatgcagtatcaacaggtgtgcgacgccttgtttttaattttttcatttgtgttcttttatacgcgcctggtcttatttccaacccagatcctgtatacgacgtattatgagtctatatccaatagagggccgttcttcggctactatttttttaacgggctgttaatgctgctgcagttactgcatgtcttttggtcctgcctaatcctgaggatgctgtacagttttatgaaaaagggtcaaatggaaaaggacatccgctccgatgtggaggagtcagacagttccgaggaggccgcagccgctcaagagccattacagctgaagaatggggctgctgggggtcccaggcctgcccccactgatggaccaaggtctcgcgtggcaggaaggctgaccaacagacatacaaccgccacatag

SEQ ID NO: 215642 - DNA, 1185 bp, Artificial Sequence
  derived and/or modified sequence
atgctgagcagcttcaatgagtggttctggcaggaccgcttctggctgcccccaaatgtgacctggacagagctggaggacagagatggccgggtgtacccccacccccaggacctgctggccgccctgcccctggccctggtgctgctggccatgaggctggcctttgagcgcttcatcggcctgcccctgagccgctggctgggcgtgcgggaccagacccggcggcaggtgaagcccaatgccaccctggagaagcacttcctgacagagggccaccggcccaaggagccccagctgagcctgctggccgcccagtgtggcctgaccctgcagcagacccagcgctggttcagaagaagaagaaaccaggaccggccccagctgaccaagaagttctgtgaggcctcctggaggttcctgttctacctgagcagctttgtgggcggcctgtctgtgctgtaccacgagagctggctgtgggcccctgtgatgtgctgggaccgctaccccaaccagaccctgaagcccagcctgtactggtggtacctgctggagctgggcttctacctgagcctgctgatccggctgccctttgatgtgaagaggaaggacttcaaggagcaggtgatccaccactttgtggccgtcatcctgatgaccttctcctacagcgccaacctgctgagaattggcagcctggtgctgctgctgcatgacagcagtgactacctgctggaggcctgcaagatggtgaactacatgcagtaccagcaggtgtgtgatgccctcttcctgatcttctcctttgtgttcttctacacccggctggtgctcttccccacccagatcctgtacaccacctactatgagagcatcagcaacagaggccccttcttcggctactacttcttcaacggcctgctgatgctgctgcagctgctgcacgtgttctggagctgcctgatcctgaggatgctgtacagcttcatgaagaagggccagatggagaaggacatccgcagtgatgtggaggagagtgacagcagcgaggaggccgctgctgcccaggagcccctgcagctgaagaatggagctgctgggggccccaggcctgcccccacagatggccccaggagccgggtggccggccgcctgaccaacagacacaccacagccacctag

SEQ ID NO: 215643 - DNA, 1185 bp, Artificial Sequence
  derived and/or modified sequence
atgctgagcagcttcaacgagtggttctggcaggaccggttctggctgccgccaaacgtgacttggacagaactggaggaccgcgacggtcgcgtctacccccacccccaggacctcctcgccgcattacccctggctctggtgttgctggctatgaggcttgctttcgagagatttatcggccttcccctgtccagatggctcggcgttagggaccagacacgacgtcaagtgaaaccaaacgctacactcgagaagcactttctaaccgaggggcaccgacccaaagagccccagctctctctgcttgcagctcaatgcggtctgacactacaacagacccaacgatggtttcgaaggcggcggaaccaggaccggcctcagctcacaaaaaaattttgtgaagcttcatggcggtttctcttctatttaagctccttcgtcgggggactgtcagtgttatatcacgagtcatggctttgggcccctgtgatgtgctgggataggtacccaaaccaaacactgaagccttctctttattggtggtatctgctggaactcgggttctacctgtccctcttaatccgcctccccttcgacgttaagagaaaagacttcaaagaacaggtcattcaccactttgtcgccgtgatccttatgaccttcagctactcagctaacttactcagaatcggctcattagtattactgctgcacgacagctccgactacctccttgaggcttgcaaaatggtgaactacatgcagtaccagcaagtgtgcgacgcactcttcctcatcttcagttttgtgttcttctatacacggctggtcctttttccaactcagatcctctacacgacctactacgaatcaatttccaaccgggggcctttttttggatactatttctttaatggcctgctgatgctgctacagctgctgcacgtcttctggagctgtctcattcttaggatgctgtattcttttatgaagaaagggcagatggagaaagacatccgcagcgacgtcgaggagtctgactccagcgaggaagccgctgctgcccaggagcctctgcagctgaagaacggggcagcgggaggacctagaccggccccaacggatggaccacgatcacgagtagcaggcagactaaccaacagacacaccaccgcaacatag

SEQ ID NO: 215644 - DNA, 1185 bp, Artificial Sequence
  derived and/or modified sequence
atgctgagcagcttcaacgagtggttctggcaggaccggttctggctcccgccgaatgtgacttggacagagctggaggacagagacggtagagtctacccccacccccaggatcttctggcagccctgcccctggccctagtgctgctggccatgaggctagcctttgagagattcattggccttcccctcagccgatggctcggagtccgggatcagacacgccgccaggtgaaacccaatgctacgctggaaaagcactttttaaccgagggtcacaggcctaaagagcctcagctgtccctcttggccgcccagtgtggccttactctccagcagactcagagatggtttcgcagaaggcgcaatcaggatagaccccagctgactaagaagttttgtgaagcctcctggcggttcctcttctacctatcctcatttgtagggggtctgagcgtcctctaccacgagtcatggctatgggcacccgtaatgtgttgggaccgataccccaatcagacgcttaagccctcactctactggtggtacctgttggagctgggattctatctgtctctgttgatccgacttccgtttgacgtcaaaagaaaggacttcaaagagcaggttatacaccatttcgtcgccgtgatattgatgaccttctcttactctgcgaacttattacgaattgggtctcttgtgctgcttctgcacgattctagcgattatctgctggaggcttgcaagatggtgaattatatgcagtatcagcaagtgtgcgatgcactcttcttgatcttttctttcgtcttcttttacacacgcctggtgttatttccgacccaaattctctatacaacgtattacgagtcgatcagtaaccgggggccttttttcgggtactacttttttaacggcctgcttatgcttctccagctgttacatgtcttttggagctgcttgattctgcgcatgctgtatagcttcatgaaaaaaggacaaatggagaaagatattcgatccgatgtcgaagagagtgattcgagcgaggaggccgccgcagcccaggaacctcttcagctgaagaacggcgctgctggtgggccgcgtccagccccgacagatggccctcgatcaagagtagccggacggttgacgaaccgacatacgacagctacatag

SEQ ID NO: 215645 - DNA, 1185 bp, Artificial Sequence
  derived and/or modified sequence
atgttgtcaagttttaatgaatggttctggcaggaccgcttctggttaccacccaatgtaacttggactgaacttgaggaccgcgacggtagggtgtacccgcatccccaggacctactcgctgcattaccacttgcgctcgttctgttggcaatgcggctggcctttgaaagatttatcgggctgcctctgtcccgttggctcggagtcagggatcaaacgcggcgacaggtaaaaccaaacgccactctggaaaagcatttcctgaccgaggggcataggccaaaggagccacaacttagccttctggcagcccagtgcggactgaccctccagcaaacacaaaggtggttcagacggcgacggaatcaggacaggcctcaactaaccaaaaaattctgtgaggccagctggcgatttcttttctatctaagtagcttcgttggcggtctgtccgtgctgtaccacgagtcttggctgtgggcacccgtcatgtgctgggatagatacccaaatcagaccctgaaacccagtctctattggtggtatcttctagaactgggcttctatctatcattgctgattagactccccttcgatgtgaagcgtaaagatttcaaggagcaggtcatccaccactttgtggcggtgattctcatgacatttagttacagtgcaaatctgcttcgcataggttctctggttctgctgctgcatgacagctccgactaccttctcgaagcatgtaaaatggtcaactacatgcagtaccagcaagtttgtgatgcgttgtttcttatcttctcttttgtattcttttatacgagactcgtcttgtttcctactcagatactttatactacttactacgaatcgatttccaatagaggaccgttcttcggatactactttttcaacgggttgttgatgcttctgcagcttctgcatgtgttttggtcttgtttgattttgcgcatgttgtattcctttatgaaaaaggggcagatggagaaagacatccgatctgacgtcgaggaatccgactcttccgaagaggctgccgcagcccaagagccactacagttgaagaacggcgcagcaggcggaccgagacccgcacccacagatggacccagatctagagtggctggtcggctgacaaatcgacacacaacagccacatag

SEQ ID NO: 215646 - DNA, 1185 bp, Artificial Sequence
  derived and/or modified sequence
atgctctcaagcttcaacgagtggttttggcaagatcggttctggcttcctcccaacgtgacatggaccgagctggaagacagggacggcagagtatatccgcatccacaggacctgttggcagcccttccactggccctggtactgctggcgatgcgcttagcatttgagcgattcattggactaccattatcgagatggctcggcgtcagagaccagacgaggcgccaggtcaaacccaacgctaccttggaaaagcactttctgacagaggggcataggcctaaagagccacagttgtccttgctggcggctcagtgcggcttgacgttgcagcagacacagcggtggtttaggagaaggcgtaaccaagaccggcctcagctgacaaaaaaattctgtgaggccagctggagattcctcttttacctgtctagtttcgttggcggactgtccgtgctgtaccacgaatcctggctgtgggcgccagtcatgtgttgggataggtaccccaatcagacccttaaaccgtctctgtactggtggtacctcctggaactggggttttatctctctctgctcattagactcccttttgacgttaagcgtaaagattttaaggagcaggtgattcaccatttcgtcgcagtcatccttatgaccttcagttacagtgcgaatctgctccggatcggcagcctcgtccttctccttcatgattctagtgattacctcctcgaggcatgcaagatggtgaattatatgcagtatcagcaggtgtgcgatgcactgtttctgatctttagtttcgtgttcttctacaccagattagtcttattcccaacccagattctctataccacatattatgagtccattagtaacaggggtccgtttttcggatattattttttcaacggtctgctgatgctgttacagctcctccacgttttctggtcatgtcttatcttacgcatgctctactcgtttatgaagaagggtcagatggagaaagatattcggtcggatgttgaagagagcgactcctccgaagaggcagcagctgcacaggaacctttgcagctgaagaatggagctgcaggaggcccacgcccagccccaacagacgggcctcgatctcgtgtagctggcaggctgacaaatcgacacacaactgcaacctag

SEQ ID NO: 215647 - protein, 368 aa, Artificial Sequence
  derived and/or modified sequence
MAYSTVQRVALASGLVLALSLLLPKAFLSRGKRQEPPPTPEGKLGRFPPMMHHHQAPSDGQTPGARFQRSHLAEAFAKAKGSGGGAGGGGSGRGLMGQIIPIYGFGIFLYILYILFKLSKGKTTAEDGKCYTAMPGNTHRKITSFELAQLQEKLKETEAAMEKLINRVGPNGERAQTVTSDQEKRLLHQLREITRVMKEGKFIDRFSPEKEAEEAPYMEDWEGYPEETYPIYDLSDCIKRRQETILVDYPDPKELSAEEIAERMGMIEEEESDHLGWESLPTDPRAQEDNSVTSCDPKPETCSCCFHEDEDPAVLAENAGFSADSYPEQEETTKEEWSQDFKDEGLGISTDKAYTGSMLRKRNPQGLE

SEQ ID NO: 215648 - DNA, 1107 bp, Artificial Sequence
  derived and/or modified sequence
atggcctacagcaccgtgcagagagtggccctggccagcggcctggtgctggccctgagcctgctgctgcccaaggccttcctgagcagaggcaagagacaggagcccccccccacccccgagggcaagctgggcagattcccccccatgatgcaccaccaccaggcccccagcgacggccagacccccggcgccagattccagagaagccacctggccgaggccttcgccaaggccaagggcagcggcggcggcgccggcggcggcggcagcggcagaggcctgatgggccagatcatccccatctacggcttcggcatcttcctgtacatcctgtacatcctgttcaagctgagcaagggcaagaccaccgccgaggacggcaagtgctacaccgccatgcccggcaacacccacagaaagatcaccagcttcgagctggcccagctgcaggagaagctgaaggagaccgaggccgccatggagaagctgatcaacagagtgggccccaacggcgagagagcccagaccgtgaccagcgaccaggagaagagactgctgcaccagctgagagagatcaccagagtgatgaaggagggcaagttcatcgacagattcagccccgagaaggaggccgaggaggccccctacatggaggactgggagggctaccccgaggagacctaccccatctacgacctgagcgactgcatcaagagaagacaggagaccatcctggtggactaccccgaccccaaggagctgagcgccgaggagatcgccgagagaatgggcatgatcgaggaggaggagagcgaccacctgggctgggagagcctgcccaccgaccccagagcccaggaggacaacagcgtgaccagctgcgaccccaagcccgagacctgcagctgctgcttccacgaggacgaggaccccgccgtgctggccgagaacgccggcttcagcgccgacagctaccccgagcaggaggagaccaccaaggaggagtggagccaggacttcaaggacgagggcctgggcatcagcaccgacaaggcctacaccggcagcatgctgagaaagagaaacccccagggcctggagtag

SEQ ID NO: 215649 - DNA, 1107 bp, Artificial Sequence
  derived and/or modified sequence
atggcttactcgactgtacagcgcgttgcactggcttcggggctggttttagcccttagccttctgcttccaaaggcattccttagcagggggaagcggcaggagcctcctcccaccccagaagggaaactcgggaggttcccgcccatgatgcatcaccaccaggcccctagtgacggccagacacctggcgctcgattccagcggagtcatctcgctgaagcatttgcaaaggcaaagggcagtgggggtggagccggaggaggaggcagtggaaggggattgatggggcagattataccgatctatgggttcggtattttcctgtacattctgtatattctgtttaagctttctaaaggaaaaactactgcagaggatggtaaatgctacacggcgatgcccggcaacacacatcggaaaattacatcattcgagctggcacagctgcaggaaaagctgaaggagacagaggctgccatggagaagttaataaaccgagttgggcctaatggggagagagcccagactgttacatccgatcaagaaaaacggctgctgcaccagctacgcgagattacccgcgtcatgaaagagggcaagtttattgaccggttctccccagaaaaggaagctgaggaagccccttacatggaagattgggaagggtatcctgaagagacttatcccatttatgacctgtcagactgcataaagaggcgacaggaaactattctggtggactaccccgaccccaaggagctcagtgccgaagaaatcgctgagcggatgggcatgatagaggaagaggagtccgaccatctggggtgggaatcactgcccaccgacccaagggcccaggaggacaacagcgtgaccagctgcgaccccaagcccgaaacttgctcttgttgcttccatgaagacgaggaccctgccgtgctcgccgaaaacgccggcttttctgctgatagctatcccgagcaagaggaaacaaccaaggaggaatggagccaggacttcaaagatgagggacttggcatttccacggacaaggcctataccggtagcatgctcagaaaacgcaatccccaaggtctggagtag

SEQ ID NO: 215650 - DNA, 1107 bp, Artificial Sequence
  derived and/or modified sequence
atggcctacagcacagtgcagagggtggccctggccagcggcctggtgctggccctgagcctgctgctgcccaaggccttcctgagccggggcaagaggcaggagcccccacccaccccagagggcaagctgggccgcttcccccccatgatgcaccaccaccaggcccccagtgatggccagacccctggggcccgcttccagaggagccacctggccgaggcctttgccaaggccaagggcagcggcggcggggccggcggcggcggcagcggccggggcctgatgggccagatcatccccatctacggcttcggcatcttcctgtacatcctgtacatcctcttcaagctgagcaagggcaagaccacagcagaagatggcaagtgctacacagccatgcctggcaacacccacaggaagatcaccagctttgagctggcccagctgcaggagaagctgaaggagacagaagctgccatggagaagctgatcaacagagtgggccccaatggagagcgggcccagacagtgaccagtgaccaggagaagaggctgctgcaccagctgcgggagatcaccagggtgatgaaggagggcaagttcatcgaccgcttcagccctgagaaggaggccgaggaggccccctacatggaggactgggagggctacccagaggagacctaccccatctatgacctgagtgactgcatcaagaggcggcaggagaccatcctggtggactacccagaccccaaggagctgtctgctgaggagattgctgagaggatgggcatgattgaggaggaggagagtgaccacctgggctgggagagcctgcccacagacccccgggcccaggaggacaacagcgtgaccagctgtgaccccaagccagagacctgcagctgctgcttccatgaagatgaggaccctgctgtgctggctgaaaatgccggcttctctgctgacagctacccagagcaggaggagaccaccaaggaggagtggagccaggacttcaaggatgagggcctgggcatcagcacagacaaggcctacacaggctccatgctgaggaagaggaacccccagggcctggagtag

SEQ ID NO: 215651 - DNA, 1107 bp, Artificial Sequence
  derived and/or modified sequence
atggcctacagcaccgtgcagcgggtggccctggccagcggcctggtgctggcactcagcttgttgctgcctaaggcattcttgtcgcggggcaaacgtcaggaacccccgcccaccccagaggggaagttagggagattcccccctatgatgcatcatcatcaggctccctcagatggtcagacacccggtgctcgttttcagcgctcacatttagccgaagctttcgctaaggccaaaggcagcggcggtggcgcggggggcggcgggagcgggcgggggctcatgggccagatcatccccatctacggattcgggatctttttgtatatcctctacatactgttcaagctgtctaaaggaaagactacagcagaggatggcaaatgctataccgccatgcctggcaatacccatcgtaagattacatcttttgaactcgcccagctgcaggagaagcttaaggagaccgaggcagcaatggaaaaactgatcaatagagtggggccaaacggagaacgcgctcagaccgtcaccagtgatcaggagaagcgcctgctgcaccagctgagggagattactagagttatgaaggaggggaagtttattgatagattcagtccagaaaaggaggcggaagaagcaccttacatggaggattgggagggatatccagaagagacctatcctatttatgacctgtcagattgtataaaaagacgccaggaaaccatcctggtcgattacccagaccctaaggagctcagcgcagaggagatcgccgagcgtatgggaatgatcgaagaggaggagtcggaccatctgggctgggagtccctgcccaccgatcccagagctcaggaggataatagcgtgacaagttgtgatcccaagccagaaacatgttcttgctgctttcacgaggacgaggatcccgctgtgctcgccgagaacgctggattttctgcagattcgtatcctgagcaggaagagacaactaaggaggagtggtcccaggatttcaaagatgaagggctcggaattagtactgataaagcttacactggtagtatgctgaggaaaaggaatccccaaggattggagtag

SEQ ID NO: 215652 - DNA, 1107 bp, Artificial Sequence
  derived and/or modified sequence
atggcctacagtaccgttcaacgcgtggctctggcgtcaggtttagtcctcgccttgagcctgcttttgcccaaggcctttttgtctcgaggcaaaagacaggaacctccccctacacccgagggcaagctcggccgttttcctcccatgatgcaccatcatcaggccccttccgatggtcagactccaggtgcaaggtttcagagaagtcatctggcggaggcattcgccaaggccaaagggagcggcggtggagctggcggaggtgggagtgggcgtgggttgatgggccagattatcccaatctatggctttggaatcttcctctacatcttatacatcctgttcaagttatcaaaagggaagaccactgccgaggatggaaaatgctacacagctatgcccggaaacactcaccgcaagattacctctttcgagttggcccagctacaggagaagctgaaagagaccgaggctgcaatggaaaagctcattaatcgcgtgggaccaaacggggaacgggctcagacggtgaccagcgatcaagagaagcgcctcctacatcaactccgggaaattactcgagtgatgaaagagggcaagttcatagaccgcttctcaccagaaaaggaagccgaagaagccccttacatggaggattgggagggctatcctgaggagacgtaccctatttacgatctgtctgactgcattaagcgacgacaggagaccatactggtcgactatccagacccaaaggagctaagcgccgaggagattgcagaacggatgggcatgatcgaggaggaggagtctgaccatctgggatgggagagcctgccgactgacccccgtgctcaggaagataactctgttaccagctgcgacccaaaacctgagacatgctcatgctgttttcacgaagatgaagacccagctgtcttggcagagaatgctgggttcagcgccgactcttatcctgagcaggaggagactacgaaggaagagtggtctcaggactttaaggatgaggggctgggtatttcaaccgataaggcatacacgggttcaatgctccggaagcgcaacccccaaggactggagtag

SEQ ID NO: 215653 - DNA, 2929 bp, Artificial Sequence
  derived and/or modified sequence
agcccgtgctccggttccggttccggttccggctggcgtctgcacctgcgaccaccgtgagcagtcatggcgtactccacagtgcagagagtcgctctggcttctgggcttgtcctggctctgtcgctgctgctgcccaaggccttcctgtcccgcgggaagcggcaggagccgccgccgacacctgaaggaaaattgggccgatttccacctatgatgcatcatcaccaggcaccctcagatggccagactcctggggctcgtttccagaggtctcaccttgccgaggcatttgcaaaggccaaaggatcaggtggaggtgctggaggaggaggtagtggaagaggtctgatggggcagattattccaatctacggttttgggatttttttatatatactgtacattctatttaagctctcaaaggggaaaacaactgcagaggatgggaaatgctatactgccatgcctggaaacacccacaggaaaattaccagttttgagcttgctcaactgcaagaaaaactgaaggagacagaagcagccatggaaaaattaatcaacagagtgggacctaatggtgagagagcacagactgtgacttctgaccaagagaaacggttgctacatcagctccgagaaatcaccagggtcatgaaagaaggaaaattcattgacagattttctccagagaaagaagctgaggaggccccttacatggaggactgggaaggttaccctgaagagacttacccaatttatgacctttcagactgtatcaagcgtaggcaagaaacaatcttggtggattaccctgacccaaaagaactttctgctgaagaaatagctgaaagaatgggaatgatagaagaggaagaatcagatcatttgggttgggaaagtctgcccactgaccccagagcccaggaagataattctgttacctcgtgtgatccaaagccagaaacatgttcctgctgttttcatgaagacgaggatcctgctgtcttggcagagaatgctggattcagtgcagatagctaccctgagcaagaggaaaccaccaaagaagagtggtcccaagactttaaagatgaagggttgggcatcagcaccgataaagcatatacaggcagcatgctgaggaagcgtaacccccagggtttagagtgaaaacagccagtctgaagtatccattactcaagtcccaaggtgacctctctctcctcagatttccttcttggccctgtgccctgcactttcttcactgtgttcaagtgtcatagctatcaggccactatcatggatatcatgtatccttcctggtgctcacacacctgtcaccttgtaaaacacggacattagtgtgaacacaggacagcttcgctctttctcttcctgcctttcctctatcagagaagttgatccattaagtaattatgtttggtctattgtaattacagatgggaccactcaggggcaaaggtctgactcttcctggtaggtgtaacagatagttcacctgtgaacgaacatcagcttacagatgatgaggacttaaggttgcaagaatgaagatttcagactccaagatcccttattctttgggccttgagcaggttagtagtcccctggtgagaagagaacattttgtttgtggggctaatgggcccagaggagggtaagactctgctgtctaagctgaagcctcttcctcgcagcgagggtcttcctaggaacattgatgctgcctcagacatcctcttttctccagagtagggaagactcccactgatctgagaatgagcccagaggcttgtttggggactgttttactctgatactacctggatatctagcttcctttacccctgttctgcttaacagaactgccaagcccagaagtacctttgcactcctggttttcagtggacagaggaagctttagatagagactttagaccctgccctgcagagtcaagacttgaggccattgaagctgcaggaagccctgcccagggatggtcctgccatgaggaggctgcaaccctataagagggctcaagattgtgaattctgctcctgccatgaggagctcagaaggccaggaagccagcaataggggagagaatctgtgtgcttatggacagtccttacctaaagctgtttctgaatgttgcaccctttgagaaatttcttctcagaaccataaattgaaacaaatgaggactgatcttgtatacaaagtgccaactcaagagggaagttggagtatgtctgttgcagagaaccaatatagcagtgcccaggggtagagaccatgtgttccatactcggatatttgggtctttttgagagagctggggaaagtagcagcaactagattaagactgggaggattttgaccaaactaaaggccttttctccttactgcatctgacgtgtgtcttcttgagacaagatagcacccatgaattacatcatgaggtatgcgtgaattcagtttacatgtaagacctgagagttcgaagagggcacattcccaaagacattcccagtcatgaaatgtagaagactggaaaattaagacattatgtaaaggtagatatggcttttagagttacattatgcttggcatgaataaggtgccaggaaaacagtttaaaattatacatcagcatacagactgctgttagaaggtatgggatcatattaagataatctgtcagctactactaggcatttattgttaattgagttacagaaagtcattcaagactgagtttatagaaagcatattgcatctatctctgtgtagaacatttgattcacattgtgaagaatgcagtttaaaatatactgaatgcaatctagatgtattgtacacgaaaggtgaaaaataacaggtgctctttactgtttagataaa

SEQ ID NO: 215654 - protein, 686 aa, Artificial Sequence
  derived and/or modified sequence
MKPSWLQCRKVTSAGGLGGPLPGSSPARGAGAALRALVVPGPRGGLGGRGCRALSSGSGSEYKTHFAASVTDPERFWGKAAEQISWYKPWTKTLENKHSPSTRWFVEGMLNICYNAVDRHIENGKGDKIAIIYDSPVTNTKATFTYKEVLEQVSKLAGVLVKHGIKKGDTVVIYMPMIPQAMYTMLACARIGAIHSLIFGGFASKELSSRIDHVKPKVVVTASFGIEPGRRVEYVPLVEEALKIGQHKPDKILIYNRPNMEAVPLAPGRDLDWDEEMAKAQSHDCVPVLSEHPLYILYTSGTTGLPKGVIRPTGGYAVMLHWSMSSIYGLQPGEVWWAASDLGWVVGHSYICYGPLLHGNTTVLYEGKPVGTPDAGAYFRVLAEHGVAALFTAPTAIRAIRQQDPGAALGKQYSLTRFKTLFVAGERCDVETLEWSKNVFRVPVLDHWWQTETGSPITASCVGLGNSKTPPPGQAGKSVPGYNVMILDDNMQKLKARCLGNIVVKLPLPPGAFSGLWKNQEAFKHLYFEKFPGYYDTMDAGYMDEEGYLYVMSRVDDVINVAGHRISAGAIEESILSHGTVADCAVVGKEDPLKGHVPLALCVLRKDINATEEQVLEEIVKHVRQNIGPVAAFRNAVFVKQLPKTRSGKIPRSALSAIVNGKPYKITSTIEDPSIFGHVEEMLKQA

SEQ ID NO: 215655 - DNA, 2061 bp, Artificial Sequence
  derived and/or modified sequence
atgaagcccagctggttacagtgtcggaaagtaacctccgccgggggcctggggggccctctgccagggagttcacccgccagaggcgccggtgccgctctgcgagcattggtggtcccaggaccccgaggaggcttagggggaagaggttgcagggccctgtcaagcgggtccggctcggaatataaaactcatttcgccgcaagcgtcactgatccagaaagattctgggggaaggcagcagagcagattagctggtacaagccatggacaaagacccttgagaataagcactcaccctcgacacgttggtttgtggagggaatgctgaacatctgctataatgcggtcgacaggcacatcgagaatgggaagggcgacaaaatcgccattatttatgactcaccggtgaccaacaccaaagcaaccttcacctacaaggaagtgctcgagcaggtgtctaaactggccggtgtactggtgaagcatggaatcaagaaaggcgatactgtcgtcatctacatgcccatgatccctcaagcaatgtacactatgttagcttgcgcgcgaattggagctatacattccctgatctttggcgggttcgcctctaaagaactatcaagtagaatcgatcacgttaagccgaaagtcgttgtcacggcctccttcggcatcgaacccggacggcgagttgagtatgtacctctcgtcgaggaagccctcaaaattggccagcacaagcctgacaaaattcttatctataaccgtcctaatatggaagccgtgccactcgcgcctgggcgcgacctggattgggacgaggagatggccaaagcacagtcacacgattgtgttccagtgctctccgagcatcccctgtatattctgtatacctcagggaccacgggcttgcccaagggagttatacggcccaccggaggctacgctgtcatgttgcactggtccatgagctccatatatggccttcagccaggtgaagtgtggtgggctgccagtgacctgggatgggttgtcggccactcatatatttgttatggccccctgctccatggcaataccactgtactgtatgaaggtaagccagttggtacacctgacgcaggcgcttattttcgtgtgctagcggaacacggcgtagccgccctcttcacagcccccaccgcaatccgcgccatcagacagcaggatcctggcgccgccctgggcaaacagtattctctgaccagattcaaaacactcttcgtggccggggagagatgtgatgttgagacactcgagtggtcaaaaaacgtttttcgggtacccgttctcgaccattggtggcagacagaaacgggaagcccaatcacggcttcatgcgtcgggctagggaatagtaaaaccccaccgcctggccaggccggcaagagcgttcccgggtacaatgtcatgatcctagatgataacatgcagaaactgaaagccaggtgcctgggcaacatcgtcgtgaagctgcctttgcctcctggtgccttttcaggactctggaagaatcaagaggctttcaagcacctctatttcgagaagtttcccggatattacgacacaatggatgcgggttatatggacgaggagggctacctgtatgtaatgagtcgcgtggacgacgtgatcaacgtggccggacaccgaatcagcgcaggcgccattgaggaatccattctgagccacggaaccgtagccgattgcgctgtggtcggcaaggaggacccgctgaagggacatgtgcccctggccctttgcgtgctccggaaggatatcaatgccaccgaggagcaggtgctggaggagatcgtgaagcacgtcagacaaaacattggacccgtggccgccttcaggaacgccgtgttcgttaagcagctgccaaagacgcgaagcggtaagatcccgaggagtgcattatcggcgatcgtcaatggaaaaccatataagatcactagtaccatcgaggacccaagcatttttggccacgtcgaagaaatgttgaaacaggcctag

SEQ ID NO: 215656 - DNA, 2061 bp, Artificial Sequence
  derived and/or modified sequence
atgaagcccagctggctgcagtgcaggaaggtgaccagcgctgggggcctgggcggccccctgcccggcagcagccctgcccggggggccggggccgccctgcgggccctggtggtgcccggcccccggggcggcctgggcggccggggctgccgggccctgagcagcggcagcggcagcgagtacaagacccactttgctgcctctgtgacagatcctgagcgcttctggggcaaggctgctgagcagatctcctggtacaagccctggaccaagaccctggagaacaagcacagccccagcacccgctggtttgtggagggcatgctgaacatctgctacaatgctgtggacagacacattgaaaatggaaaaggagacaagatcgccatcatctatgacagccctgtgaccaacaccaaggccaccttcacctacaaggaggtgctggagcaggtgtccaagctggccggcgtgctggtgaagcacggcatcaagaagggggacacagtggtgatctacatgcccatgatcccccaggccatgtacaccatgctggcctgtgccagaattggagccatccacagcctcatctttggaggctttgccagcaaggagctgagcagcagaattgaccacgtgaagcccaaggtggtggtgacagccagctttggcatcgagcccggccggcgggtggagtatgtgcccctggtggaggaggccctgaagattggccagcacaagccagacaagatcctgatctacaaccggcccaacatggaggccgtgcccctggcccctggccgggacctggactgggatgaggagatggccaaggcccagagccatgactgtgtgcctgtgctgtctgagcaccccctgtacatcctgtacaccagcggcaccaccggcctgcccaagggcgtcatccggcccactggaggctatgctgtgatgctgcactggagcatgagcagcatctacggcctgcagcccggggaggtgtggtgggccgccagtgacctgggctgggtggtgggccacagctacatctgctacggccccctgctgcacggcaacaccaccgtgctgtatgagggcaagcctgtgggcaccccagatgctggggcctacttccgggtgctggccgagcacggcgtggccgccctcttcaccgcccccacagccatccgggccatccggcagcaggaccctggagctgccctgggcaagcagtacagcctgacccgcttcaagaccctgtttgtggccggggagcgctgtgatgtggagaccctggagtggagcaagaatgtgttccgggtgcctgtgctggaccactggtggcagacagaaacaggcagccccatcacagccagctgtgtgggcctgggcaacagcaagaccccacctcctggccaggccggcaagtctgtgcccggctacaacgtgatgatcctggatgacaacatgcagaagctgaaggcccgctgcctgggcaacatcgtggtgaagctgcccctgcccccaggggccttcagcggcctgtggaagaaccaggaggccttcaagcacctgtactttgagaagtttcctggctactatgacaccatggatgctggctacatggatgaggagggctacctgtatgtgatgagccgggtggatgatgtgatcaacgtggccggccaccgcatctctgctggggccatcgaggagagcatcctgagccacggcaccgtggccgactgtgctgtggtgggcaaggaggaccccctgaagggccacgtgcccctggccctgtgtgtgctgaggaaggacatcaatgccacagaggagcaggtgctggaggagatcgtgaagcacgtgcggcagaacatcggccctgtggccgccttcagaaatgctgtgtttgtgaagcagctgcccaagaccaggtctgggaagatccccaggtctgccctgagcgccatcgtgaatggcaagccctacaagatcaccagcaccatcgaggaccccagcatcttcggccacgtggaggagatgctgaagcaggcctag

SEQ ID NO: 215657 - DNA, 2061 bp, Artificial Sequence
  derived and/or modified sequence
atgaagcccagctggctgcagtgccggaaggtgaccagcgccggcggactgggcgggccccttcccgggagcagccccgcccgaggtgctggcgcagccctacgcgccctggtggtgcctggcccccggggaggcctgggaggccgcggttgccgggctctgagtagcggatctggcagtgagtacaaaactcatttcgcagccagcgtcacggaccccgaaaggttctggggtaaggctgctgaacagatttcctggtacaaaccttggacaaagactctggaaaataagcactccccatccactaggtggtttgtagaagggatgttaaacatatgctataacgcagtggacaggcatatcgagaacggcaaaggtgataaaatcgcaattatctacgattcgcctgtgaccaacacaaaagccacgtttacttacaaggaggtgctggaacaggtgtcgaagctggccggagtccttgtcaagcatggaattaaaaagggggatacagtggtgatatatatgcctatgatcccgcaggcaatgtacacgatgcttgcctgcgcacgcataggcgctatccactccctgatattcgggggatttgcgtctaaggagttgagcagccgcattgatcacgtgaagccaaaggtggtggtgacggcatcattcggtatcgaacctgggcggcgcgtcgaatatgtgccccttgtcgaggaagccttaaaaattggccaacataagcctgataagatccttatctataaccggccaaatatggaagccgtcccattagctccgggtcgagaccttgactgggatgaagaaatggctaaagctcagtctcacgattgcgtccccgtgttgagcgaacaccccctttacatcctctacacttccgggacaaccgggctgcctaaaggcgtgatacggccaactgggggctacgccgtcatgctgcattggtctatgtctagcatctacgggctgcaacctggcgaggtttggtgggccgcatccgatttaggttgggtcgtcggccattcttatatctgctacggccccttgctgcatggtaacactaccgtgctctacgaaggcaagcctgtcgggacccccgacgctggggcgtactttcgggtccttgccgaacacggggtcgccgctctgtttaccgctccaaccgccattcgggccattcgacaacaagatcccggggccgccctgggcaagcagtatagcctaacccgcttcaagaccttattcgtagccggtgaacgctgcgacgtcgagacactcgagtggtccaaaaatgtgttcagggtaccggtgctggaccactggtggcaaacagaaacgggcagtccaatcaccgcctcctgcgtgggcttgggcaatagcaaaaccccccctccaggccaggccgggaagagtgttcccggttataatgtaatgattcttgacgataacatgcagaaactcaaggctcggtgcctcggcaacatcgtagtaaaactcccattacccccaggagcctttagtggtctttggaagaatcaggaagcttttaaacacctgtacttcgagaaattccccggatattacgacactatggacgctggctacatggacgaggaggggtacctgtatgtgatgtcacgcgtggatgatgtgatcaatgtagccggacaccggatctcagccggggccatcgaagagagcatcctgagtcacggtactgtggcggattgcgcagttgtcggcaaagaggacccacttaaaggtcatgtgcccctggcgctatgcgtcctcagaaaggacatcaatgcaactgaggagcaggtgctggaggaaattgtgaaacacgtgcgtcaaaatatcggccccgtcgccgctttccgcaatgcagtgtttgtaaagcagctgccaaaaaccagatccggaaagattcctagaagcgctctgtccgcgatcgtcaacggtaagccatacaaaattacatcaactattgaggatccttcaattttcgggcacgtggaagaaatgctcaagcaggcctag

SEQ ID NO: 215658 - DNA, 2061 bp, Artificial Sequence
  derived and/or modified sequence
atgaagccatcttggctccaatgtcggaaagtgacaagcgctggcggactgggcggacccctaccaggatcttcacctgccaggggtgccggtgctgcattacgggctttagtcgtacccggaccccgtggtggcctggggggacggggatgcagagcacttagtagcggatctgggtctgagtacaaaacccacttcgccgctagtgtcacggatcctgaaagattctggggcaaggctgctgagcagataagctggtacaaaccctggaccaagaccctggaaaataagcactccccctctaccagatggtttgtcgagggcatgctaaacatctgttataacgcggtggataggcatattgagaacggtaaaggtgacaagatcgccatcatttatgattcacccgtgactaatactaaggcaacttttacatacaaagaagttttggaacaagtaagcaaactcgcaggagtgctggtcaagcacggtatcaagaagggcgacactgtggtgatttacatgcctatgataccacaagcaatgtacaccatgcttgcatgcgcgagaatcggcgctatccattctctgattttcggcggattcgcgtcgaaagagctcagctcccgtatcgaccacgtcaaacctaaggtagtcgttacagctagcttcgggatcgagcccggaagacgggtggaatacgtccccctcgtggaggaggccctcaagatcggccagcataagcctgataaaattctgatctacaacaggccaaatatggaggccgtcccgcttgccccaggaagagatctggactgggacgaggaaatggcaaaggctcagtcccatgattgtgttcctgttctgtcagaacacccactgtacatactgtacacgagcggtacaacaggcttaccaaaaggcgtgatacgaccaaccggaggttacgccgtaatgctacattggtctatgtcatcaatatatggcttgcaaccaggggaggtgtggtgggctgcttccgatctaggctgggtggtgggccactcttacatttgctacggacccctactgcatggcaataccaccgttctgtacgagggaaaaccagtgggaacccctgatgcaggtgcctactttcgtgttcttgcagagcatggcgtggccgcattgtttacagctcccactgccataagggccatcagacaacaggacccaggagccgctctggggaagcagtacagtctaacccgcttcaagaccctttttgtagcaggtgagcgctgcgacgtggagacccttgaatggagcaagaatgtgttccgagttccagtcctcgaccattggtggcagactgaaaccggctcccccattacagcatcctgcgtcggcctgggaaattccaaaacccctccccctgggcaagcgggaaaaagtgtgcccggatacaatgtaatgatactggatgacaatatgcagaagttgaaagcacgctgccttggtaatatcgtcgtgaagctgcctctgccccctggggcattctcaggcctttggaagaatcaggaggcctttaaacatctgtatttcgagaaattcccagggtactatgacactatggacgccggatatatggatgaggaaggctacctctacgtcatgagccgagtggacgacgtgatcaacgtcgctggccacaggatttcagcaggtgcgattgaggagagcattctgtcccatgggacagtggccgattgtgctgtggtcggcaaggaggacccactgaagggacacgtccccctggccttgtgtgtgctccggaaggacatcaatgccacggaggagcaagttttagaagaaatcgtcaagcatgttagacagaatattggccctgtagctgcatttcgcaatgcagtctttgtcaagcagttgccaaagacccggagtgggaagatcccgaggagtgctctgtcggctattgtgaatggaaagccctacaaaatcacctccaccatcgaagacccttctatcttcggccacgtggaggaaatgctcaaacaagcatag

SEQ ID NO: 215659 - DNA, 2061 bp, Artificial Sequence
  derived and/or modified sequence
atgaagcccagctggctgcagtgcagaaaggtgaccagcgccggcggcctgggcggccccctgcccggcagcagccccgccagaggcgccggcgccgccctgagagccctggtggtgcccggccccagaggcggcctgggcggcagaggctgcagagccctgagcagcggcagcggcagcgagtacaagacccacttcgccgccagcgtgaccgaccccgagagattctggggcaaggccgccgagcagatcagctggtacaagccctggaccaagaccctggagaacaagcacagccccagcaccagatggttcgtggagggcatgctgaacatctgctacaacgccgtggacagacacatcgagaacggcaagggcgacaagatcgccatcatctacgacagccccgtgaccaacaccaaggccaccttcacctacaaggaggtgctggagcaggtgagcaagctggccggcgtgctggtgaagcacggcatcaagaagggcgacaccgtggtgatctacatgcccatgatcccccaggccatgtacaccatgctggcctgcgccagaatcggcgccatccacagcctgatcttcggcggcttcgccagcaaggagctgagcagcagaatcgaccacgtgaagcccaaggtggtggtgaccgccagcttcggcatcgagcccggcagaagagtggagtacgtgcccctggtggaggaggccctgaagatcggccagcacaagcccgacaagatcctgatctacaacagacccaacatggaggccgtgcccctggcccccggcagagacctggactgggacgaggagatggccaaggcccagagccacgactgcgtgcccgtgctgagcgagcaccccctgtacatcctgtacaccagcggcaccaccggcctgcccaagggcgtgatcagacccaccggcggctacgccgtgatgctgcactggagcatgagcagcatctacggcctgcagcccggcgaggtgtggtgggccgccagcgacctgggctgggtggtgggccacagctacatctgctacggccccctgctgcacggcaacaccaccgtgctgtacgagggcaagcccgtgggcacccccgacgccggcgcctacttcagagtgctggccgagcacggcgtggccgccctgttcaccgcccccaccgccatcagagccatcagacagcaggaccccggcgccgccctgggcaagcagtacagcctgaccagattcaagaccctgttcgtggccggcgagagatgcgacgtggagaccctggagtggagcaagaacgtgttcagagtgcccgtgctggaccactggtggcagaccgagaccggcagccccatcaccgccagctgcgtgggcctgggcaacagcaagacccccccccccggccaggccggcaagagcgtgcccggctacaacgtgatgatcctggacgacaacatgcagaagctgaaggccagatgcctgggcaacatcgtggtgaagctgcccctgccccccggcgccttcagcggcctgtggaagaaccaggaggccttcaagcacctgtacttcgagaagttccccggctactacgacaccatggacgccggctacatggacgaggagggctacctgtacgtgatgagcagagtggacgacgtgatcaacgtggccggccacagaatcagcgccggcgccatcgaggagagcatcctgagccacggcaccgtggccgactgcgccgtggtgggcaaggaggaccccctgaagggccacgtgcccctggccctgtgcgtgctgagaaaggacatcaacgccaccgaggagcaggtgctggaggagatcgtgaagcacgtgagacagaacatcggccccgtggccgccttcagaaacgccgtgttcgtgaagcagctgcccaagaccagaagcggcaagatccccagaagcgccctgagcgccatcgtgaacggcaagccctacaagatcaccagcaccatcgaggaccccagcatcttcggccacgtggaggagatgctgaagcaggcctag

SEQ ID NO: 215660 - DNA, 4803 bp, Artificial Sequence
  derived and/or modified sequence
ctttctttttacattttcccagtttcctcttttgattcatctttacttacttcctatttttgttttttgtttatttgtttgttttgttttctcattagaaaagccacagaaactccaagcaggcaaattagaagggaggcaatgcaacaagtcctatctgttctctgtctagatcacatgcggagtctggtcagcaggtgaatccgcatcccagtggggtcaccttccctgtgacctgtcaatcaccccaagaagcacttcccaatttgtctggcacaacctccttccactcctcctaccctctcagtggtcaggaaatcccggagcagtccttgccctggagctgcttgtgtttttagtaaccagggactgagctgattttgaaaaatcaatcaatcaataaataacaatcaaagagccttgcctcaacgcaccgagttgctggtttcctgcaggtcagaggcgatgccacctccaccaacgaccttccaaagattaaaccagccgtgtacaaactgctggattgaaaattgagagatgggccgttggcctcctcctaggagtacttgtgtgttgaaatcggaaggacgttctggagtttgagcgcgatttttcccggaaggctgcggggttggaagtgcatgttggggtttggatctcgtgcagcagcgcaactaacctgctgcaacggcgctgtgacacccctgtcccggggcccccactttagcctgttgcttctctggtcgctccaggtcggtttttcccggcgactctagtgtggcttccaaacttctgggctctgggctcacttcggaatttgcccccgccccctactcccttccctcaggccccaggaagttgcaagagtaccatttgtcgcacactcggggaccgcgggtggccggaggagatgaaaccgtcttggctgcagtgtcgtaaagtcaccagcgccggggggctcggagggcccttgcctgggtcctctccggcccggggagccggtgcggccctcagggctttagtggtcccgggcccgcggggcggtctcgggggccggggatgcagggcactgtcctccggcagtggcagcgagtacaagacccacttcgcagcctcggtgaccgaccccgagaggttctggggcaaagctgccgagcagatcagctggtacaagccctggaccaaaacgctggagaacaaacactcgccctctaccaggtggtttgtggaaggaatgcttaacatttgttacaatgccgttgatcgtcatattgaaaatggtaaaggggataagattgctatcatctatgacagtcctgttacaaacactaaagcaacctttacctataaagaagttctggagcaggtctccaagctggctggtgtcttggtcaagcatggcatcaagaaaggtgacactgtggttatctacatgcctatgatcccacaggcgatgtataccatgttggcatgtgcaaggataggtgccatccacagtctcatatttggaggatttgcttccaaagaactaagtagtcgcattgatcatgtaaagcccaaggtggttgttacagcatcatttggcattgaacctggaaggagggtagagtacgtaccacttgtagaagaagcgctaaaaataggacaacacaaaccagacaaaattctcatttataatcgtccaaatatggaggcggttcctttggctcccggtcgtgaccttgattgggatgaagagatggcaaaagcccagtcacatgactgtgttcctgttctttcagaacacccactgtatattctttacacatctggcacaacggggttacctaagggtgtgattaggcccactgggggatacgctgtcatgctacactggtcaatgtcttccatatacggacttcaacccggagaggtgtggtgggcagcttctgacttaggctgggttgttggacattcctatatctgctatggacctcttcttcatgggaacacaacagttttatatgaggggaagcctgtgggaacaccagatgctggcgcttatttccgtgtgcttgcagagcatggagtagctgccttgtttacagcaccaactgcaattagagcaatccgtcaacaggaccctggggcagctttggggaagcagtactctctgacaaggttcaaaacattatttgtggctggagaacgatgtgatgtagagaccctggaatggtccaaaaatgtcttcagagtacctgtcttagaccattggtggcaaactgagactggatctccaattactgcgtcatgtgttggattaggcaattctaaaacacctccaccagggcaagcaggaaaaagcgtcccaggatacaatgttatgattttggatgacaacatgcaaaaactgaaggctcggtgtttaggaaatattgtggtaaagttaccattgccacctggggctttttcaggactctggaagaatcaggaagcattcaagcatttatactttgaaaaatttcctggatattatgataccatggatgctggttacatggatgaagaaggctatttgtatgttatgtctcgagtggatgatgtaataaatgttgcaggtcacagaatttctgcaggcgccattgaagagtcaatcctttcccatggtaccgtggcagactgtgctgttgttggcaaggaagatcccttaaaaggtcatgtccccttagcactctgtgtattgagaaaagatataaatgcaacagaggagcaagttttggaagaaattgtgaaacacgttagacagaacattggccctgtggctgcttttcgaaatgcagtgtttgtcaaacagctacccaaaaccagatctggcaagatcccccgatcagctttatctgccattgtcaatggcaagccatacaagataacttctacaattgaagaccccagcatttttggccacgtagaagaaatgctgaagcaagcataatgagtttgtcttattcctattttgagttgatttaatttcttaattgaaattaaattatttgagttgtttctcagaaataaatatttcagtagaaattacttgcaaaatgaaatgtgaattgtaaaacttggcctaaacaaatctaatgaaaacatgtgaaagacctgtgccttttttttggtttgaccctgttagcattgttattagttatctataacatggcttattgaatgtcatctactgctttaggaaaaacgtatctagtgtattatttttaaaattgtacctcccaagaagaacactttaattgaaagcaacactaatatagagccacttcctgaaaccaagaatctgtagttttgatccaaaatctaaaacttaaagtcagaaaataattaaaatttttcttgtagaaattttagatattttctagtattctttagatgctcacattgttttaaataaaatagatgaaatgggaagtttaggtaatcatctagacagatgaaattattatctaggtaggagggcttttctatacattttctgagggaaagcagaacaccggggttatagctataccttcaggtcttttgttacttaggcaaggaaaaccacatgtctgacctggttcagcatgtaatccgagcactttgggaggctgaggcaggcggatcacttgaggtcagcagtttgagacgagcctggccaacatggtgaaaccctgtagctactgaaaatacaaaaataagccaggcgtggtggcgggaggctgaggcaaggagaatcacttgaatacaagaggcagaggttgcagtgagccaagttcccccactgtactccagcctgggtgacagagtaagactccatctcaaaacaacaaaaacaacaaaaaaaccacatgcctggcggagaacaaagagatcatttagtccaatctcttcatggagatgagggctcctgggagcccctcttcatgtctcaggttcttagttgactatgtttatccaaatgattccagattcctgtggaaacaaggaatcgatgtacaaatggggtagggtggcaaggaaaactcttaagagagaaacatcaaggttttcacattaggttaaagacaagaaggtttctaggcaggtagtgtaatgtctaggtgattttgaagtgaacttaagccactaggtttgagggacaaaggacagtagaaaatggtgaagactgcagatcacctgctatacctcaaggagcagcggacccagcagaatatggcccaaaaaggaggcaggtctcctgttgcaagagcctctgtttttttaaagagaaaacaaagaatcctggtttttatgtgaaatctctaattttaaaataataactcattaaaaatattgtaatgtccaaaagtatctttccatttaacttctaaaaatctcttaaatgttttttttaaataattgtaaagtgagtttttgttaagcttataggaatgggccagttaactaaggtagacagatgtaggaaattaaatatttgatttacttagggatctatatgacatcagttatcaaagaatacattttaacccaaaagtataccatgctcattgtatctttgatcgttcttcaagtatttctcaatcttttaatctatcaggaacattactatcaagagcagattgttgtaacataatactcaggatacatgaaatgtatgtgagagataaatagataatagaaagtttattgttataaaaatgacctacaacttatataaaaaaattctgaaaatgttgactttttttggactgaagactgcaaaataaatggcttctcaaa

SEQ ID NO: 215661 - protein, 864 aa, Artificial Sequence
  derived and/or modified sequence
MPNVLLPPKESNLFKRILKCYEQKQYKNGLKFCKMILSNPKFAEHGETLAMKGLTLNCLGKKEEAYEFVRKGLRNDVKSHVCWHVYGLLQRSDKKYDEAIKCYRNALKLDKDNLQILRDLSLLQIQMRDLEGYRETRYQLLQLRPTQRASWIGYAIAYHLLKDYDMALKLLEEFRQTQQVPPNKIDYEYSELILYQNQVMREADLLQESLEHIEMYEKQICDKLLVEEIKGEILLKLGRLKEASEVFKNLIDRNAENWCYYEGLEKALQISTLEERLQIYEEISKQHPKAITPRRLPLTLVPGERFRELMDKFLRVNFSKGCPPLFTTLKSLYYNTEKVSIIQELVTNYEASLKTCDFFSPYENGEKEPPTTLLWVQYFLAQHFDKLGQYSLALDYINAAIASTPTLIELFYMKAKIYKHIGNLKEAAKWMDEAQSLDTADRFINSKCAKYMLRANMIKEAEEMCSKFTREGTSAMENLNEMQCMWFQTECISAYQRLGRYGDALKKCHEVERHFFEITDDQFDFHTYCMRKMTLRAYVDLLRLEDILRRHAFYFKAARSAIEIYLKLYDNPLTNESKQQEINSENLSAKELKKMLSKQRRAQKKAKLEEERKHAERERQQKNQKKKRDEEEEEASGLKEELIPEKLERVENPLEEAVKFLIPLKNLVADNIDTHLLAFEIYFRKGKFLLMLQSVKRAFAINSNNPWLHECLIRFSKSVSNHSNLPDIVSKVLSQEMQKIFVKKDLESFNEDFLKRNATSLQHLLSGAKMMYFLDKSRQEKAIAIATRLDETIKDKDVKTLIKVSEALLDGSFGNCSSQYEEYRMACHNLLPFTSAFLPAVNEVDNPNVALNHTANYDVLANEI

SEQ ID NO: 215662 - DNA, 2595 bp, Artificial Sequence
  derived and/or modified sequence
atgcccaacgtgctgctgccccccaaggagagcaacctgttcaagagaatcctgaagtgctacgagcagaagcagtacaagaacggcctgaagttctgcaagatgatcctgagcaaccccaagttcgccgagcacggcgagaccctggccatgaagggcctgaccctgaactgcctgggcaagaaggaggaggcctacgagttcgtgagaaagggcctgagaaacgacgtgaagagccacgtgtgctggcacgtgtacggcctgctgcagagaagcgacaagaagtacgacgaggccatcaagtgctacagaaacgccctgaagctggacaaggacaacctgcagatcctgagagacctgagcctgctgcagatccagatgagagacctggagggctacagagagaccagataccagctgctgcagctgagacccacccagagagccagctggatcggctacgccatcgcctaccacctgctgaaggactacgacatggccctgaagctgctggaggagttcagacagacccagcaggtgccccccaacaagatcgactacgagtacagcgagctgatcctgtaccagaaccaggtgatgagagaggccgacctgctgcaggagagcctggagcacatcgagatgtacgagaagcagatctgcgacaagctgctggtggaggagatcaagggcgagatcctgctgaagctgggcagactgaaggaggccagcgaggtgttcaagaacctgatcgacagaaacgccgagaactggtgctactacgagggcctggagaaggccctgcagatcagcaccctggaggagagactgcagatctacgaggagatcagcaagcagcaccccaaggccatcacccccagaagactgcccctgaccctggtgcccggcgagagattcagagagctgatggacaagttcctgagagtgaacttcagcaagggctgcccccccctgttcaccaccctgaagagcctgtactacaacaccgagaaggtgagcatcatccaggagctggtgaccaactacgaggccagcctgaagacctgcgacttcttcagcccctacgagaacggcgagaaggagccccccaccaccctgctgtgggtgcagtacttcctggcccagcacttcgacaagctgggccagtacagcctggccctggactacatcaacgccgccatcgccagcacccccaccctgatcgagctgttctacatgaaggccaagatctacaagcacatcggcaacctgaaggaggccgccaagtggatggacgaggcccagagcctggacaccgccgacagattcatcaacagcaagtgcgccaagtacatgctgagagccaacatgatcaaggaggccgaggagatgtgcagcaagttcaccagagagggcaccagcgccatggagaacctgaacgagatgcagtgcatgtggttccagaccgagtgcatcagcgcctaccagagactgggcagatacggcgacgccctgaagaagtgccacgaggtggagagacacttcttcgagatcaccgacgaccagttcgacttccacacctactgcatgagaaagatgaccctgagagcctacgtggacctgctgagactggaggacatcctgagaagacacgccttctacttcaaggccgccagaagcgccatcgagatctacctgaagctgtacgacaaccccctgaccaacgagagcaagcagcaggagatcaacagcgagaacctgagcgccaaggagctgaagaagatgctgagcaagcagagaagagcccagaagaaggccaagctggaggaggagagaaagcacgccgagagagagagacagcagaagaaccagaagaagaagagagacgaggaggaggaggaggccagcggcctgaaggaggagctgatccccgagaagctggagagagtggagaaccccctggaggaggccgtgaagttcctgatccccctgaagaacctggtggccgacaacatcgacacccacctgctggccttcgagatctacttcagaaagggcaagttcctgctgatgctgcagagcgtgaagagagccttcgccatcaacagcaacaacccctggctgcacgagtgcctgatcagattcagcaagagcgtgagcaaccacagcaacctgcccgacatcgtgagcaaggtgctgagccaggagatgcagaagatcttcgtgaagaaggacctggagagcttcaacgaggacttcctgaagagaaacgccaccagcctgcagcacctgctgagcggcgccaagatgatgtacttcctggacaagagcagacaggagaaggccatcgccatcgccaccagactggacgagaccatcaaggacaaggacgtgaagaccctgatcaaggtgagcgaggccctgctggacggcagcttcggcaactgcagcagccagtacgaggagtacagaatggcctgccacaacctgctgcccttcaccagcgccttcctgcccgccgtgaacgaggtggacaaccccaacgtggccctgaaccacaccgccaactacgacgtgctggccaacgagatctag

SEQ ID NO: 215663 - DNA, 2595 bp, Artificial Sequence
  derived and/or modified sequence
atgcccaatgtgctgctgcccccaaaggagtcgaatttgttcaagcgcatcttaaagtgttatgaacagaaacaatataagaacgggctgaagttctgtaagatgatcttatccaatcctaaatttgcggagcatggtgagacactggcgatgaaggggctcacattaaattgtttagggaaaaaagaggaggcctacgagttcgtgagaaaagggctccgcaacgatgtgaagtcacacgtgtgctggcacgtttatgggttgctccagcgctctgacaaaaagtacgatgaagccatcaagtgctacagaaatgccctgaaactggataaagataacctgcagattcttcgcgacctctcactcctccagatccagatgagagatcttgagggatacagagaaacaaggtaccagctgctccagctgaggcccacacagcgggcctcttggattggctacgccattgcttaccacctgctgaaggactacgacatggccctcaagctgctggaggagtttcgacagactcagcaggttccaccaaataaaatcgactacgagtattcagaacttatcctgtaccagaaccaggttatgcgagaagccgacctcctccaagaaagcctggagcacatcgaaatgtatgaaaaacagatttgcgacaaactgctcgtcgaagaaatcaaaggggagatcctgctgaagctcggcagacttaaggaggccagcgaagttttcaagaatttgattgacaggaacgctgagaactggtgttattacgagggcctggaaaaagcgcttcaaattagcaccctggaggaacgcttgcagatctacgaagagataagtaagcagcatcccaaagctatcacacccaggcgtcttcccctgactctggtcccaggtgagaggttccgcgaacttatggataaattccttagggttaacttctctaaaggatgcccccctctgttcactacactaaagagcttgtattacaataccgagaaggttagtattatccaggagctggttacgaactacgaggctagtctcaagacttgcgacttcttctccccatatgaaaacggagagaaggagcctcctactactttactctgggtgcaatattttttggcccagcacttcgataagctggggcaatatagcctcgcactggattacattaatgctgccatcgctagcacgcccacgctgatcgagttgttctacatgaaggcgaaaatttataagcatatcggtaacctcaaggaggctgccaagtggatggatgaagcgcaaagcttagacaccgccgatagatttattaattctaagtgcgcaaagtacatgctgagagccaacatgatcaaggaggctgaagagatgtgctccaagttcacgcgtgaaggaacctccgcgatggaaaatctgaacgaaatgcagtgtatgtggttccaaaccgaatgtatttcagcttaccagaggctgggcaggtacggtgacgccctgaaaaaatgccacgaagtggagagacactttttcgagattaccgatgaccagtttgacttccacacatactgtatgaggaaaatgaccctccgggcctacgtcgacctgctaaggctcgaggatatccttaggagacacgctttttacttcaaggcggccagatctgccattgagatttacctgaaattatacgacaatcccctgactaacgagtccaagcaacaggaaataaactctgaaaacctcagtgcaaaggagcttaaaaagatgttatcaaaacagagaagggcgcagaagaaagccaagctagaagaagaacgcaagcacgctgaaagggaacgtcagcagaaaaaccaaaaaaaaaagcgagacgaggaggaggaagaggcctccggcctgaaggaagaactgatccccgagaagttggagcgggttgagaatcctttggaggaggccgtaaaatttctgatccccctgaaaaacctggtagccgataacatcgacacccaccttctcgctttcgaaatctatttccgcaaagggaaattccttctgatgcttcaatcggtgaagcgggcattcgccatcaatagcaacaatccatggttacatgaatgtctcatccggtttagcaagagcgtgtctaatcacagcaatctacccgacatcgtgagtaaggtgctgtcacaggagatgcagaaaatatttgtcaagaaagacctggaaagcttcaatgaggactttctgaagaggaacgccacgagtctgcaacacctgctgagcggcgccaagatgatgtacttcttggacaagagcagacaggaaaaagcgattgcgatcgcaacacgtctggatgaaacaattaaggacaaagacgtcaaaacacttatcaaggtcagcgaggctctgctcgacggctcgttcgggaactgctccagccagtatgaggaatatcgcatggcgtgtcataatctgctaccgttcacctctgcatttctgcctgccgtgaatgaggtggacaatcccaacgtcgccctgaatcataccgccaactacgacgtgctggcaaatgagatttag

SEQ ID NO: 215664 - DNA, 2595 bp, Artificial Sequence
  derived and/or modified sequence
atgcccaacgtgctgctgccccccaaggagagcaacctcttcaagaggatcctgaagtgctatgagcagaagcagtacaagaatggcctgaagttctgcaagatgatcctgagcaaccccaagtttgctgagcacggggagaccctggccatgaagggcctgaccctgaactgcctgggcaagaaggaggaggcctatgaatttgtgaggaagggcctgagaaatgatgtgaagagccacgtgtgctggcacgtgtatggcctgctgcagaggagtgacaagaagtatgatgaggccatcaagtgctacagaaatgccctgaagctggacaaggacaacctgcagatcctgcgggacctgagcctgctgcagatccagatgagggacctggagggctaccgggagacccgctaccagctgctgcagctgcggcccacccagagggcctcctggattggctacgccatcgcctaccacctgctgaaggactatgacatggccctgaagctgctggaggagttccggcagacccagcaggtgccccccaacaagattgattatgagtacagcgagctgatcctgtaccagaaccaggtgatgagggaggccgacctgctgcaggagagcctggagcacatcgagatgtatgagaagcagatctgtgacaagctgctggtggaggagatcaagggggagatcctgctgaagctgggccgcctgaaggaggccagcgaggtgttcaagaacctgattgacagaaatgctgagaactggtgctactatgagggcctggagaaggccctgcagatcagcaccctggaggagcggctgcagatctatgaggagatcagcaagcagcaccccaaggccatcaccccccggcggctgcccctgaccctggtgcctggagagcgcttccgggagctgatggacaagttcctgcgggtgaacttcagcaagggctgccccccactcttcaccaccctgaagagcctgtactacaacacagagaaggtgtccatcatccaggagctggtgaccaactatgaggccagcctgaagacctgtgacttcttcagcccctatgaaaatggagagaaggagccccccaccaccctgctgtgggtgcagtacttcctggcccagcactttgacaagctgggccagtacagcctggccctggactacatcaatgctgccatcgccagcacccccaccctcatcgagctgttctacatgaaggccaagatctacaagcacatcggcaacctgaaggaggccgccaagtggatggatgaggcccagagcctggacacagctgaccgcttcatcaacagcaaatgtgccaagtacatgctgcgggccaacatgatcaaggaggccgaggagatgtgcagcaagttcacccgggagggcaccagcgccatggagaacctgaatgagatgcagtgcatgtggttccagacagagtgcatcagcgcctaccagaggctgggccgctatggagatgccctgaagaagtgccacgaggtggagcggcacttctttgagatcacagatgaccagtttgacttccacacctactgcatgaggaagatgaccctgcgggcctacgtggacctgctgcggctggaggacatcctgcggagacatgccttctacttcaaggccgcccggagcgccatcgagatctacctgaagctgtatgacaaccccctgaccaatgaaagcaagcagcaggagatcaacagcgagaacctgagcgccaaggagctgaagaagatgctgagcaagcagaggcgggcccagaagaaggccaagctggaggaggagaggaagcatgctgagcgggagcggcagcagaagaaccagaagaagaagagagatgaggaggaggaggaggccagcggcctgaaggaggagctgatccctgagaagctggagcgggtggagaaccccctggaggaggccgtgaagttcctgatccccctgaagaacctggtggccgacaacatcgacacccacctgctggcctttgagatctacttcaggaagggcaagttcctgctgatgctgcagagcgtgaagagggcctttgccatcaacagcaacaacccctggctgcacgagtgcctgatccgcttcagcaagtctgtgagcaaccacagcaacctgcctgacatcgtgtccaaggtgctgagccaggagatgcagaagatctttgtgaagaaggacctggagagcttcaatgaagacttcctgaagagaaatgccaccagcctgcagcacctgctgagcggggccaagatgatgtacttcctggacaagagccggcaggagaaggccatcgccatcgccacccggctggatgagaccatcaaggacaaggatgtgaagaccctcatcaaggtgtctgaggccctgctggatggcagctttggaaactgcagcagccagtatgaggagtacaggatggcctgccacaacctgctgcccttcaccagcgccttcctgcctgctgtgaatgaggtggacaaccccaacgtggccctgaaccacacagccaactatgatgtgctggccaatgagatctag

SEQ ID NO: 215665 - DNA, 4347 bp, Artificial Sequence
  derived and/or modified sequence
aaagggcgctccgcgcatgcgcacaggatccggctcgggaggcggaccctggctgccatcttgcagtgcgcgggaaccgccgccgccgccgctggccaaaaagcggagcccaggggaagcgtgtcctgctcagaccgccttccttctccattgccacccgtgccgaacagccaggctgcccaattgcaactgtagaccaatgaactaatccatcgcccgcagcccgactctcagcagcggttcgtcccggtgcccacccccgcgaagcggagcgcccgggcacctagcctccctgccggccacctagcctccctgccggccacgatgccgaacgtgctgctgccgcccaaggagagcaacctcttcaaacgcatcttgaaatgttatgaacagaagcagtacaaaaatggcctcaagttttgcaagatgattctgtcgaacccaaaatttgctgaacatggagagactttggctatgaaaggattaacactgaactgtttaggaaaaaaagaagaagcttatgagtttgttcgtaaaggacttcgtaatgatgtcaagagtcatgtctgttggcatgtatatggactcttgcagcgttctgataaaaaatatgatgaagctataaaatgttaccgaaatgccctcaaattagataaagataacctgcaaattttgagggatctctcactgttgcagatccaaatgagagaccttgaaggttaccgagagacaagataccagcttcttcagttgcgccccacacagcgtgcctcctggattggatatgctattgcataccatttgctgaaagattatgatatggccctaaaactgttggaagaatttagacaaactcagcaagttcctccaaacaaaatagattatgaatatagtgaattgatattataccagaatcaagtgatgagagaggcagatctgttgcaggaatctttggaacatatagaaatgtatgagaaacaaatatgtgataaacttttggtggaagaaattaaaggggaaatactgttgaaattgggaagattaaaagaagccagtgaagtgttcaaaaacttgattgatcgaaatgcagaaaattggtgttattatgaaggcttggaaaaagctctacaaattagcactttagaagagaggcttcaaatttatgaagaaattagtaagcagcaccccaaagcaattacacccagaagattacctttgactcttgtcccaggtgaaagatttagagaactaatggataagttcctgagggttaacttcagtaaaggctgcccacccttgtttactactttgaaatctttatattacaatacagaaaaggtttctataatccaggaacttgttactaattatgaagcctctcttaaaacgtgtgacttttttagcccatatgagaatggggagaaggaacccccgacaacactactctgggttcagtatttcctggcacagcactttgataaacttggacagtattctttggctttggattatattaatgctgcaattgctagtactccaactctaatagaattattctatatgaaagcaaaaatttacaagcatataggtaatctcaaagaagctgcaaagtggatggatgaagcacagtctttggacacagctgatagattcatcaattccaaatgtgcaaaatacatgcttcgagcaaatatgataaaagaagcagaggaaatgtgctccaagttcacaagggaaggaacatctgccatggaaaatctaaatgaaatgcagtgtatgtggtttcagacagaatgcatttcagcttatcagcgtctggggagatacggggatgccttgaaaaaatgtcatgaagtagaaaggcatttttttgagataactgatgaccaattcgacttccatacatactgcatgagaaagatgacccttcgtgcctatgttgaccttttgagattagaagatatactcagaagacatgccttttatttcaaggctgctagatcagcgattgaaatatacttgaaattgtatgataatcccttaaccaatgaaagcaaacaacaagaaataaactcagaaaacttgtcagccaaagaattgaagaaaatgcttagcaagcagagaagagctcagaaaaaggctaaactagaagaagaaagaaagcatgcagaaagagaacgtcaacagaaaaatcaaaagaaaaaaagagatgaagaagaagaagaagccagtggccttaaggaagaacttatacctgaaaaattagaaagggtagaaaatccattagaggaagccgttaagttccttatacctcttaagaaccttgttgctgataacattgacactcatctgttagcatttgaaatatattttagaaaaggaaagtttctgttaatgctgcagtctgtcaaacgagcttttgccattaacagtaataacccatggttacatgaatgtttaattagattttctaaatctgtgtctaatcatagtaatcttccagacattgtgagcaaagttctatctcaagaaatgcagaaaatatttgtcaaaaaggatttggaaagttttaatgaggattttctgaaacgtaacgctacctctcttcagcatctactttcaggtgctaaaatgatgtattttctggacaagtcaaggcaggagaaagcaattgctatagccactagactagatgaaactataaaagataaagatgtaaagacattaataaaggtttctgaagcactgcttgatggcagctttgggaactgtagttcccaatatgaagaatataggatggcctgtcataacctgcttccttttacatctgccttcttgcctgctgtgaatgaagtcgacaatcctaatgtggcactgaaccatacagctaattatgatgtcttggcaaatgaaatttgaaatcttctagaaagtagactcctatagactcaaagctgaattgagatcagggtttcttttccagggtgcattttaatatacgtatgaaatgaaatatttggttaggatttttaaatggcatattctgtaagcttattttgttctttacccgacctgccaatttacataaccatctgttaaaattacctgtttattcttacacagttttgtggtagctccgatcgcttctgtataattataatttcttactaagctaagttgtatacaaccccactgtattattttctttagattctgatttcaggatctgtgctttgattccttgtctgttttatcgtatatttgcttgctttttaattaaagcacatcagttttaaagtgttaactatatgttaacaatatggaggctgggcgtggtggctcacacctgtaatcccagcactttgggaggcccagactggcggatcacctgaggtcaggagatcgagatcagcctggccaacatggtgaaaccccttctctactgaaaatacaaaaattagccagacgtgatggcacatacctgtaatccaagctgcccaggagctgaggccggagaatcgcttgaacctgggaggtggaggttgcagtgagccgagatcatgccactgcactccagcctgggcaacagagcaagactccatctcgaaaaaaaggaattcctcttggcagatattgaagtttatttgaaaatttaattcgtccttttttcattgtaatatttcatggtttactatttccttttagtattcatgaaaatggtattttctggttgaataagggtactctagttttatgtagatgatttcagaatgtgaaggctggtttgcctgtcagtcatggaaattcactggtaaaattgttgaatatttctctctcccagtcttaaaagcccacaggcaagaattaatgctttcttaactaagttactttgagtattaacaagtagcttatactgaggtgtgcttcaagggagcattatagggcagaaaacaaattaaaatgaaatgttgttgttatagccatgcattgaccattaaatgcattttaatatctcggcaaaatgagatttgaaactcattagtttaactcttaaaacatagtgttgttaaacagtattttttgggggcgggtggatagctttttgttctatcttgtacagaaaacagtaatggaatcactcatgttcagaaccttgtaaatatgtctgtaatattaatgcttccctttattaagacaaatatacattcaaaaagggagattttatttagacacacattttcttttcaccctaatctatttagattcatacttattgagacgggaaaaactcgctgtaaaataatgccaacctagataatgctataataaattattttgtacacagtt

SEQ ID NO: 215666 - DNA, 2595 bp, Artificial Sequence
  derived and/or modified sequence
atgcccaacgtgctgctgccccccaaggagagcaacctgttcaagaggatcctcaaatgttatgaacagaaacagtataagaacggcctgaaattctgtaaaatgatcctgagtaatcccaagtttgcagagcatggagaaacactggcgatgaaagggttgacactgaactgcctgggaaaaaaggaggaggcctatgaattcgtccggaaaggcctacgtaacgacgttaaaagccacgtatgttggcacgtttatggcctgctgcaaagaagcgacaagaagtatgacgaggccatcaaatgctacaggaatgctctcaagctggataaagacaatctgcagatccttcgagatctttccctgctacagatacagatgagggatttagaggggtaccgggagactcggtatcagctgcttcaactgcggccgacccaaagagccagttggattggctatgctatagcctatcatctgctgaaagactacgacatggccctcaagctccttgaagagttcagacagactcagcaggtccccccaaataagattgattacgagtacagcgagctgatcctgtatcagaaccaggtaatgcgcgaggccgacttgctgcaggagtctctcgaacatatcgagatgtacgagaaacagatttgtgacaagctgcttgtggaggaaataaaaggcgagatactgttaaagctcgggaggctcaaagaagctagcgaagtctttaaaaacctcatcgaccgcaatgccgagaactggtgttactacgaagggctggagaaggcactgcagatttcgaccctagaggagagactgcagatctatgaggagatcagcaagcaacatcccaaagccattacacctagaaggctcccactcaccctcgtgccaggggaacggttcagagagcttatggataaatttttaagagtgaatttttccaagggctgccccccattatttaccacgttgaagtctctttactataacacagagaaggtttcaattatccaggaacttgtcaccaactatgaagctagtctgaaaacctgcgatttcttcagcccttacgagaatggtgagaaagagcctcccaccaccctcctgtgggttcagtattttctggcgcaacacttcgacaaactggggcagtacagtctggccctggactacattaatgcggctatcgccagtaccccgacgctgatagaactattttacatgaaggccaaaatatataaacatattgggaatcttaaggaggcagccaaatggatggatgaggcacagagtcttgataccgccgatcggtttatcaatagcaagtgcgcaaagtacatgctgagggccaacatgataaaagaagcagaagagatgtgcagcaagtttacacgagagggcaccagtgccatggaaaacctgaatgagatgcaatgtatgtggttccagaccgagtgtatctctgcctatcagaggctagggaggtatggtgatgcactgaaaaagtgccatgaggttgaacggcacttttttgagataaccgacgatcaattcgattttcacacctactgcatgaggaaaatgacactgagagcctatgtggatctgctacgcttggaggatatccttcgacggcatgcattctacttcaaagccgcccggagcgccatagaaatctacctgaaactctatgacaatcctctgacaaatgaatctaagcagcaagaaattaacagtgaaaaccttagcgccaaggaactcaagaaaatgctgtctaaacaacggcgggcccaaaaaaaggctaagctggaggaggaacggaaacacgccgagagagaacgccagcagaagaatcaaaagaaaaagcgtgacgaggaggaagaagaggcatcaggcctcaaagaagagctgattcctgagaaattggaaagagtggagaatcctcttgaagaagcggtcaagttcctgattccactcaagaatcttgtggccgataatatcgacacccaccttctggccttcgaaatatacttcaggaaagggaagttccttctgatgctgcagtctgttaagcgggccttcgcaattaactctaataacccttggctacatgagtgtttgatcagattcagtaaatctgtatccaatcactcaaatctgcccgacattgtgtccaaagtgttgtcccaggagatgcagaagatattcgtgaaaaaagatctggaatcattcaatgaagattttcttaaaaggaatgctacgtcacttcagcacctgttatctggcgccaaaatgatgtacttcctcgataagtcccgccaggaaaaggctattgctatcgcgacgcgcctcgatgagactatcaaggataaggatgtaaaaacgcttattaaggtcagcgaagctctgctagatggcagcttcggcaattgcagcagtcagtacgaagagtaccggatggcctgccataacctgttgccttttacgagcgcgtttcttcccgccgtgaatgaagttgacaatccaaacgttgccctgaaccacaccgcaaattatgatgtgcttgccaacgaaatctag

SEQ ID NO: 215667 - DNA, 2595 bp, Artificial Sequence
  derived and/or modified sequence
atgcccaacgtgctgcttcctccgaaagagtcaaacctgttcaagaggattctaaaatgctatgaacagaaacagtataagaatggcctgaagttctgtaagatgatcctgagtaaccctaaattcgcagagcacggggaaacattggccatgaagggactaacactcaattgtctgggaaaaaaagaagaagcctatgaatttgtgcgcaagggacttcggaatgatgtgaaatcgcacgtctgttggcacgtgtacgggctactgcagcgttccgacaagaaatacgacgaggccataaaatgctataggaatgctctcaaactcgataaagataacctgcagattcttcgcgacttatcgttgctacagattcagatgcgggacttggaggggtacagagagaccaggtaccagctactgcagttgcggccaacgcaaagagcaagttggattggatacgccattgcataccacctgttgaaggattacgacatggcccttaagctgcttgaagagttccgtcagacccagcaagtccctcctaataagattgactacgaatatagcgagttgatcctgtaccagaaccaggttatgcgggaggccgatctgctgcaggaaagcctcgagcacattgagatgtatgagaaacaaatctgtgacaagctgctagtggaggagatcaaaggggaaatcctcctgaagctgggacggctgaaggaggccagtgaggttttcaagaatctgattgatcgcaatgcggagaactggtgttattacgaaggccttgagaaggcattgcagatatcgacacttgaggaacgcctgcagatatatgaggaaatttccaaacagcaccctaaggccataacacccagaagactgccgctgacactggtcccaggcgaacgcttcagagagttgatggataagttcctccgagtcaacttctccaagggatgtcctcccctctttacaaccctgaagtccttgtactataatacagagaaagtatctatcattcaggaactggtcaccaattatgaagcttccctcaagacctgcgatttcttttccccatacgagaacggagagaaggaaccaccgactactttattgtgggttcaatactttctggcacagcatttcgacaaactggggcagtactctctggcactggactacatcaacgccgctatagcatccacaccgacactcatcgagcttttttatatgaaagcgaaaatctacaaacacatcggcaacttgaaagaggccgcaaaatggatggacgaggcacagtcccttgatacagccgacaggtttattaatagcaaatgcgccaagtacatgctccgggctaatatgataaaagaggccgaggaaatgtgctcaaagttcactcgggaaggcacgtcagccatggagaacttaaacgaaatgcagtgcatgtggtttcagaccgaatgtatcagtgcctatcaacgactgggaaggtatggtgatgctttaaaaaaatgccatgaggtggagagacactttttcgaaatcactgacgaccagtttgattttcacacctattgtatgagaaaaatgacccttcgggcttatgtagatctgctgagactcgaggacattctccgtcgccatgcattctatttcaaagccgctaggagcgcaatcgaaatctacctgaaactttacgacaacccacttacaaacgagagtaagcaacaggaaattaacagcgaaaacttgagcgcaaaggagctaaaaaaaatgctgtccaagcaaagacgtgcacagaagaaggctaagctggaggaggagagaaagcatgccgagcgcgagaggcagcagaagaaccagaagaagaagagggacgaggaagaggaagaagcatctggactgaaagaagaactcatccccgagaagctggaaagagtagagaatccgctggaggaggcagttaaatttctgattccacttaagaaccttgttgcggacaacatcgacacacacctcctcgcctttgaaatctatttccgcaagggcaaattcttgctgatgttgcaatccgtcaagagggcatttgccataaattccaacaacccctggttgcacgagtgcctaatcaggttcagcaaaagtgtctccaaccattcgaacctgcccgacatcgtaagtaaggtcttatcccaggaaatgcagaaaatatttgtgaagaaagacctggagagctttaacgaggattttttaaagcgcaacgccacttctttacaacatctgctgtccggcgctaaaatgatgtactttctggacaagtcgagacaagaaaaggctatcgccattgcgaccaggctcgatgaaactatcaaagataaggatgtgaagactcttatcaaggttagcgaggcacttctggacggaagctttggtaattgttctagccagtatgaggagtatagaatggcctgtcacaatctgctgccttttactagtgcatttctacctgcggtcaatgaggtggataaccccaacgtggctctgaaccataccgctaattacgacgtgctggctaacgaaatttag

SEQ ID NO: 215668 - protein, 435 aa, Artificial Sequence
  derived and/or modified sequence
MMDEPWWEGRVASDVHCTLREKELKLPTFRAHSPLLKSRRFFVDILTLLSSHCQLCPAARHLAVYLLDHFMDRYNVTTSKQLYTVAVSCLLLANGVSLLSPRLKCSGMISAHCNLHLPGSSNSPASAPHPPPTPPQVAETTGKFEDREDHVPKLEQINSTRILSSQNFTLTKKELLSTELLLLEAFSWNLCLPTPAHFLDYYLLASVSQKDHHCHTWPTTCPRKTKECLKEYAHYFLEVTLQDHIFYKFQPSVVAAACVGASRICLQLSPYWTRDLQRISSYSLEHLSTCIEILLVVYDNVLKDAVAVKSQALAMVPGTPPTPTQVLFQPPAYPALGQPATTLAQFQTPVQDLCLAYRDSLQAHRSGSLLSGSTGSSLHTPYQPLQPLDMCPVPVPASLSMHMAIAAEPRHCLATTYGSSYFSGSHMFPTGCFDR

SEQ ID NO: 215669 - DNA, 3320 bp, Artificial Sequence
  derived and/or modified sequence
aattcccccagcgagggagggaggcccccggcggccgggagcctgcgagccgcggcgggacccgagcgcacgcaggggcgcggcgacggcgggggctagtcgggctgcggaggcggccgtcgggagtgcggagcgcctcggacgagggtccaaccgccggcaggcaccagagggcacggctggctcggcactgggaggggcccggcgctcgcagccccccacgcccagagaggatgcggtgcgccctgagagccgggtagcctcggatagcggcgctgcgtacgcgatgatggatgagccgtggtgggaagggcgcgtcgcctcggacgtccactgcaccctgcgcgagaaggaactgaagctgcccaccttccgagcccactccccactcctgaagagccgccggttcttcgtggacatcctgaccctgctgagcagccactgccagctctgccctgcagcccggcacctggccgtctacctgctggaccacttcatggatcgctacaacgtcaccacctccaagcagctctacaccgtggccgtctcctgcctcctgcttgcaaacggagtttcgctcttatcgcccaggctgaagtgcagtggcatgatctcagctcattgcaacctccacctcccaggttcaagcaattctcctgcttcagcgccccaccccccacccacaccgccccaagtagctgagactacaggtaagttcgaggatcgggaagaccacgtccccaagttggagcaaataaacagcacgaggatcctgagcagccagaacttcaccctcaccaagaaggagctgctgagcacagagctgctgctcctggaggccttcagctggaacctctgcctgcccacgcctgcccacttcctggactactacctcttggcctccgtcagccagaaggaccaccactgccacacctggcccaccacctgcccccgcaagaccaaagagtgcctcaaggagtatgcccattacttcctagaggtcaccctgcaagatcacatattctacaaattccagccttctgtggtcgctgcggcctgtgttggggcctccaggatttgcctgcagctttctccctactggaccagagacctgcagaggatctcaagctattccctggagcacctcagcacgtgtattgaaatcctgctggtagtgtatgacaacgtcctcaaggatgccgtagccgtcaagagccaggccttggcaatggtgcccggcacaccccccacccccactcaagtgctgttccagccaccagcctacccggccctcggccagccagcgaccaccctggcacagttccagacccccgtgcaggacctatgcttggcctatcgggactccttgcaggcccaccgttcagggagcctgctctcggggagtacaggctcatccctccacaccccgtaccaaccgctgcagcccttggatatgtgtcccgtgcccgtccctgcatcccttagcatgcatatggccattgcagctgagcccaggcactgcctcgccaccacctatggaagcagctacttcagtgggagccacatgttccccaccggctgctttgacagataggccacctccagacctcacgaggaagccttggagatgtgggcagaggaagaggacactgaagaggagagctcagccaagtgaggcagcaggaggccatccctgaagagccttggaacgtggagggtctgtgctccttttaaataaaactgacccagagcaaaacattcaataacatacctcacccgagagcattcctctgagaaacgtctgccacgtgtggctagggtacaaaaggatggcttggtggccgtccccccacacaggggcccagtgaatcgagaaagacttgataagaggccaggagagtgggaactggacacagaccactgatctcaagcatgtccagtttttagcattaaagacttttctattctttgctgatggcagctacaccgctgaaaaaggaggggcagcctggcgtgttctcaggacccccggaggatcccatattgggtgcttttctttccctggctctatgcagaggggcctgagttggtgtgtatgcctgagtgtttgccttgcgaggcacagtgggtggctgtcttgcctttgttttcgaacctaaaaccattttcagccttttagatatgtcatgtgctgctgcttcccgaagtggtcttgctttctgtttcgtaagatgtcttgtttacacactgtatcagggatttggtgatacttgaaaattcctttggagaaaaaaacaaatttaattgccacactgcctgtcccacatgagggctgttaatttggaacccaagtttgaacccaacttgtgatggacccgcaggtaaccacagagcttcctttttgaaggcatatggttggagagaaccattttcccagctctcggttccggaagattccacgtcttggaggctgtgttcaccactagaactttaataactacccagggagggagaagctcgttgaaaggaagacaaagatttaaacagttcccacctctctccaccacatacttacagggcatgagtttaacccagtctaggctttgagtgtggctgatagcgaaggatagcaatgtggaaaatttgcttagtcccacctgtatttggggagtgggatgtacatgggcgtttgataccaccattgataggcaagcgactggttggatcaaaagccagtatttagggatctgcagcgagagggccctcaggaagactcttgtaaccatgtgcaatatgtttttattctgactcgcagcttgtgctcagcatgttctttggtttagtttggggttgggggacacattgttcacccagcagaactgggaggtgcaaaggaccgtggaagcaatttttgttttgtttgaggaatacctgtcttggattccttagccccttgccagtcctggagactgtggcaggggccgccaggaaggcagctgtctgctgctgagtcagatcggaaggtggtgaatctttccagagcagctgaaaatctcagcatggagacagtaagaaaagagacggggtgtggataagactctgccaccgtgtcacactagcataggaggctgcacgttcatttgttgttgtttttttttcctttgccaacctccgttctatttatgtgcaagcagtttggattcaagttcttgtatctgtctgttctgggacctggggattgtgagggttccctcacagccagcacgacccccagaaagaggcgtcccacaataaacacgtcacctgctcttgatctctca

SEQ ID NO: 215670 - DNA, 1308 bp, Artificial Sequence
  derived and/or modified sequence
atgatggacgagccctggtgggagggcagagtggccagcgacgtgcactgcaccctgagagagaaggagctgaagctgcccaccttcagagcccacagccccctgctgaagagcagaagattcttcgtggacatcctgaccctgctgagcagccactgccagctgtgccccgccgccagacacctggccgtgtacctgctggaccacttcatggacagatacaacgtgaccaccagcaagcagctgtacaccgtggccgtgagctgcctgctgctggccaacggcgtgagcctgctgagccccagactgaagtgcagcggcatgatcagcgcccactgcaacctgcacctgcccggcagcagcaacagccccgccagcgccccccaccccccccccacccccccccaggtggccgagaccaccggcaagttcgaggacagagaggaccacgtgcccaagctggagcagatcaacagcaccagaatcctgagcagccagaacttcaccctgaccaagaaggagctgctgagcaccgagctgctgctgctggaggccttcagctggaacctgtgcctgcccacccccgcccacttcctggactactacctgctggccagcgtgagccagaaggaccaccactgccacacctggcccaccacctgccccagaaagaccaaggagtgcctgaaggagtacgcccactacttcctggaggtgaccctgcaggaccacatcttctacaagttccagcccagcgtggtggccgccgcctgcgtgggcgccagcagaatctgcctgcagctgagcccctactggaccagagacctgcagagaatcagcagctacagcctggagcacctgagcacctgcatcgagatcctgctggtggtgtacgacaacgtgctgaaggacgccgtggccgtgaagagccaggccctggccatggtgcccggcaccccccccacccccacccaggtgctgttccagccccccgcctaccccgccctgggccagcccgccaccaccctggcccagttccagacccccgtgcaggacctgtgcctggcctacagagacagcctgcaggcccacagaagcggcagcctgctgagcggcagcaccggcagcagcctgcacaccccctaccagcccctgcagcccctggacatgtgccccgtgcccgtgcccgccagcctgagcatgcacatggccatcgccgccgagcccagacactgcctggccaccacctacggcagcagctacttcagcggcagccacatgttccccaccggctgcttcgacagatag

SEQ ID NO: 215671 - DNA, 1308 bp, Artificial Sequence
  derived and/or modified sequence
atgatggatgagccatggtgggaggggcgcgttgcatccgacgttcactgtacccttcgggaaaaagagctgaaattgccaacattccgcgcccattcccccttgttgaaatctcgtaggtttttcgtggatatcctaactctcctgtcctctcattgccagctgtgtcccgcagcaagacacctcgccgtttacctactagaccatttcatggatcggtacaacgttaccacttccaaacagctgtacactgtcgctgtctcctgcctattattggccaatggagtaagtctgctgtctcctcgcctgaaatgcagcgggatgatctccgctcattgcaacctgcatctcccaggcagttctaactcaccggcgtctgccccacacccaccgccgactccaccccaagttgccgagacgaccggcaaattcgaagatcgcgaagatcacgttcctaaactcgagcagatcaacagcacccgcatccttagcagtcaaaactttacccttaccaagaaagaactgctgtcgactgaactgctactgttagaagcatttagctggaatttgtgcttgcccacccctgcacactttttggactattaccttctggcctccgtctcacagaaggatcatcactgccatacctggccaacgacctgccctagaaagaccaaagagtgcctcaaagaatacgctcattattttctcgaagtgactttgcaggaccatattttctataaattccagccctcggtcgtagctgccgcctgtgtcggcgcaagccggatctgtttgcagttgagtccttactggacacgtgatttgcagaggattagcagctactccctcgagcacctgagtacttgcatagagatcctgctggtggtctacgataatgtactgaaggatgccgtggcagtgaaaagccaggctctggccatggttcctggaacacctcctacaccaacacaggtgctattccaacctccagcatatcctgctctgggtcagcctgccaccaccctggctcagttccagacccctgtgcaggatctttgcctggcctatcgcgactctctgcaggctcatcggtcaggaagtttactgagcgggtcaactgggtcatcattgcacacaccatatcagccactccagcctctcgacatgtgcccggtcccagtgcccgcgtctctctctatgcacatggccatcgccgcagagcccagacactgcctggccaccacgtacggctctagttacttctccggctcacatatgtttccaaccgggtgcttcgaccgctag

SEQ ID NO: 215672 - DNA, 1308 bp, Artificial Sequence
  derived and/or modified sequence
atgatggatgagccctggtgggagggccgggtggccagtgatgtgcactgcaccctgcgggagaaggagctgaagctgcccaccttccgggcccacagccccctgctgaagagccgccgcttctttgtggacatcctgaccctgctgagcagccactgccagctgtgcccagctgcccggcacctggccgtgtacctgctggaccacttcatggaccgctacaacgtgaccaccagcaagcagctgtacacagtggccgtgtcctgcctgctgctggccaacggggtgtccctgctgagcccccggctgaagtgcagcggcatgatcagcgcccactgcaacctgcacctgcccggcagcagcaacagccctgccagcgccccccaccccccacccaccccaccccaggtggccgagaccaccgggaagtttgaagatcgggaggaccacgtgcccaagctggagcagatcaacagcacccgcatcctgagcagccagaacttcaccctgaccaagaaggagctgctgagcacagagctgctgctgctggaggccttctcctggaacctgtgcctgcccaccccagcccacttcctggactactacctgctggcctctgtgtcccagaaggaccaccactgccacacctggcccaccacctgccccaggaagaccaaggaatgtctgaaggagtatgcccactacttcctggaggtgaccctgcaggaccacatcttctacaagttccagcccagcgtggtggccgccgcctgtgtgggcgccagccgcatctgcctgcagctgagcccctactggacccgggacctgcagaggatcagcagctacagcctggagcacctgagcacctgcatcgagatcctgctggtggtgtatgacaacgtgctgaaggatgctgtggccgtgaagagccaggccctggccatggtgcccggcaccccacccacccccacccaggtgctcttccagcccccagcctacccagccctgggccagcctgccaccaccctggcccagttccagacccctgtgcaggacctgtgcctggcctacagagacagcctgcaggcccacaggagcggcagcctgctgagcggcagcacaggcagcagcctgcacaccccctaccagcccctgcagcccctggacatgtgccctgtgcctgtgcctgccagcctgtccatgcacatggccatcgctgctgagcccaggcactgcctggccaccacctacggcagcagctacttcagcggcagccacatgttccccaccggctgctttgacagatag

SEQ ID NO: 215673 - DNA, 1308 bp, Artificial Sequence
  derived and/or modified sequence
atgatggacgagccctggtgggagggccgggtggccagcgacgtgcactgtacactgagagagaaggaacttaagctccccactttcagagcgcacagccctctcttaaaaagccggcgcttttttgtggacatcctaaccctcctgagcagccactgccagttgtgtcctgccgctagacacctagccgtttatctcttggatcacttcatggaccgctataatgtgactacatctaagcagctctataccgtagcagtctcctgccttttactggccaacggagtgtcactgctatcacctaggctcaaatgttccgggatgattagcgcccactgcaacctacatcttcccggcagcagcaacagcccagcctcagcaccacatcctccgcctacccccccacaggtcgccgaaaccacaggaaagttcgaggatcgagaagaccacgtgccaaaactggagcagatcaattccacaagaattctgtcttcccagaatttcactcttacgaaaaaggagcttctgtccactgaactactgttattggaagctttcagctggaatctgtgtttgcccacccccgcacactttctggactactatcttctggcttccgtcagtcagaaggaccaccattgccatacatggcctacaacctgtcctaggaagactaaggagtgtctcaaagagtacgctcactacttcctggaggttactctacaggatcacatcttctataagtttcagccgtctgtggtggcagccgcttgcgttggcgcatcacgtatctgcctgcaactctcaccatactggacccgggatctgcagagaatttcaagttacagccttgagcacttatccacatgcatcgagatcctcctggtcgtatatgacaacgtgctgaaagacgccgtggccgtcaagagtcaggctctcgcaatggtccctggcaccccacccacacctacccaagttctgttccagcctcccgcctacccagcactggggcagcccgccaccaccctggcacaatttcagacacccgtgcaggacctgtgcctggcttatcgggactcccttcaggcccatcggagcggttctctactatcaggaagtaccggctcctccctccacactccgtaccagcctctgcagccactcgacatgtgccccgtgccggttccggccagcctgtcaatgcatatggctatcgcggccgagcctagacattgcctggcaactacatatggtagtagttacttcagcggtagtcacatgtttcccaccggctgtttcgacagatag

SEQ ID NO: 215674 - DNA, 1308 bp, Artificial Sequence
  derived and/or modified sequence
atgatggacgagccttggtgggaggggagagtggcctccgatgttcattgtacattgcgcgaaaaggaactgaaattgccaacttttcgggcacattcacctttactaaaatcgcggcgttttttcgtggatattctgacactgctaagttcacactgtcagttgtgccccgcagctagacatttggccgtgtatctattggatcacttcatggatagatataatgtcactacatctaagcagctgtacactgtggctgtgtcctgtctgctcctggcaaatggagtatctttactcagcccccgtctgaagtgctccggcatgatatccgcacattgtaatcttcacctgcccggttcctccaattcacccgcttccgcaccacatccccctcctacccctccacaagtcgcagagacaaccgggaaattcgaggaccgcgaagatcacgtgccaaaactcgagcagattaacagcacccgaatattgagtagtcagaatttcacgcttactaagaaggaacttctttccaccgagctcttgttgctggaggcattctcctggaatctctgcttacccacaccagcccacttccttgactattatctgctggcctcggtgtcacagaaagatcatcattgtcatacatggcccacaacttgcccacggaagacaaaagagtgtctgaaggagtatgcacattactttttagaggtaactcttcaagatcatatcttctacaagtttcagccgagtgtggtagctgctgcatgcgtgggggcttcaagaatctgcttgcaactcagcccttattggaccagggaccttcagcggattagcagttactccctggagcatctttcaacatgcattgagatcctcctggtcgtctacgacaacgtcctgaaggacgctgttgcggttaagtctcaggcgcttgccatggtacccggtacaccacctacgccaactcaagtactgtttcagcccccagcctacccagctcttgggcaacccgcaacaaccctcgcgcagttccaaaccccagtgcaagacctgtgcctcgcatatagagattcccttcaggcacatagaagcggaagtttgctcagtgggtccacgggtagctcactccataccccttatcaacccctgcagcctctggatatgtgtcccgtgcctgtaccagcgagcctctctatgcacatggccattgctgccgagccaagacactgcttggccactacatacgggagttcttattttagcgggtcacatatgtttcctactggatgtttcgacagatag

SEQ ID NO: 215675 - protein, 209 aa, Artificial Sequence
  derived and/or modified sequence
MAASAGAGAVIAAPDSRRWLWSVLAAALGLLTAGVSALEVYTPKEIFVANGTQGKLTCKFKSTSTTGGLTSVSWSFQPEGADTTVSFFHYSQGQVYLGNYPPFKDRISWAGDLDKKDASINIENMQFIHNGTYICDVKNPPDIVVQPGHIRLYVVEKENLPVFPVWVVVGIVTAVVLGLTLLISMILAVLYRRKNSKRDYTGAQSYMHS

SEQ ID NO: 215676 - DNA, 630 bp, Artificial Sequence
  derived and/or modified sequence
atggccgccagcgccggcgccggcgccgtgatcgccgcccccgacagcagaagatggctgtggagcgtgctggccgccgccctgggcctgctgaccgccggcgtgagcgccctggaggtgtacacccccaaggagatcttcgtggccaacggcacccagggcaagctgacctgcaagttcaagagcaccagcaccaccggcggcctgaccagcgtgagctggagcttccagcccgagggcgccgacaccaccgtgagcttcttccactacagccagggccaggtgtacctgggcaactacccccccttcaaggacagaatcagctgggccggcgacctggacaagaaggacgccagcatcaacatcgagaacatgcagttcatccacaacggcacctacatctgcgacgtgaagaacccccccgacatcgtggtgcagcccggccacatcagactgtacgtggtggagaaggagaacctgcccgtgttccccgtgtgggtggtggtgggcatcgtgaccgccgtggtgctgggcctgaccctgctgatcagcatgatcctggccgtgctgtacagaagaaagaacagcaagagagactacaccggcgcccagagctacatgcacagctag

SEQ ID NO: 215677 - DNA, 630 bp, Artificial Sequence
  derived and/or modified sequence
atggcggcaagcgccggggcaggtgccgtaattgctgccccggacagtcggcggtggctatggtccgtacttgccgctgccctgggactcttaacagccggtgtgtctgctctggaagtgtatacgcctaaagagatctttgtggcaaatggcacacagggcaagcttacctgcaagtttaagtcaacctctactaccggcggccttacatctgtctcctggagttttcaacctgagggcgccgatacaactgtttcattttttcactacagccaaggacaggtgtatttagggaattatcctccgtttaaagaccgcatcagttgggctggcgatctcgacaagaaagacgcttctattaacatagaaaacatgcagttcatccataacggaacatacatttgtgatgtaaagaacccgcctgacatcgtcgtccagcccgggcacattcgactctatgtggtggaaaaagagaaccttcctgttttcccggtatgggttgtagtcgggatcgtcacggctgtggttctgggcctaactctgttgatttccatgatcctggcggtcctgtatcgacggaaaaattccaagagagattacaccggtgctcaatcatacatgcactcctag

SEQ ID NO: 215678 - DNA, 630 bp, Artificial Sequence
  derived and/or modified sequence
atggccgccagcgctggagctggagctgtgattgctgccccagacagccgccgctggctgtggagcgtgctggccgccgccctgggcctgctgacagctggggtgtctgccctggaggtgtacacccccaaggagatctttgtggccaacggcacccagggcaagctgacctgcaagttcaagagcaccagcaccaccggcggcctgacctctgtgtcctggagcttccagcctgagggcgctgacaccaccgtgtccttcttccactacagccagggccaggtgtacctgggcaactacccacccttcaaggaccgcatctcctgggccggggacctggacaagaaggatgccagcatcaacatcgagaacatgcagttcatccacaacggcacctacatctgtgatgtgaagaaccccccagacatcgtggtgcagcccggccacatccggctgtatgtggtggagaaggagaacctgcctgtgtttcctgtgtgggtggtggtgggcatcgtgacagctgtggtgctgggcctgaccctgctgatctccatgatcctggccgtgctgtacagaaggaagaacagcaagagggactacacaggagcccagagctacatgcacagctag

SEQ ID NO: 215679 - DNA, 630 bp, Artificial Sequence
  derived and/or modified sequence
atggcagcgtccgccggagccggggcggtgattgcagccccagacagccggcgctggctgtggtcggtgctggcggcggcgcttgggctcttgacagctggagtatcagccttggaagtatatacgccaaaagaaatcttcgtggcaaatggtacacaagggaagctgacctgcaagttcaagtctactagtacgactggcgggttgacctcagtctcctggagcttccagccagagggggccgacactactgtgtcgtttttccactactcccaagggcaagtgtaccttgggaattatccaccatttaaagacagaatcagctgggctggagaccttgacaagaaagatgcatcaatcaacatagaaaatatgcagtttatacacaatggcacctatatctgtgatgtcaaaaaccctcctgacatcgttgtccagcctggacacattaggctctatgtcgtagaaaaagagaatttgcctgtgtttccagtttgggtagtggtgggcatagttactgctgtggtcctaggtctcactctgctcatcagcatgattctggctgtcctctatagaaggaaaaactctaaacgggattacactggggcccagtcatatatgcacagttag

SEQ ID NO: 215680 - DNA, 630 bp, Artificial Sequence
  derived and/or modified sequence
atggccgccagcgccggcgccggcgccgtgatcgccgcccccgactccaggaggtggctctggtccgttcttgccgcagccttggggctgctgacagctggcgtctccgccctggaggtttacacgcccaaggaaatcttcgtggccaatggaactcaggggaaactcacctgcaagttcaagagcacatcaaccactggtggccttactagcgtgtcgtggagtttccaacccgagggcgccgacactactgtgtccttcttccactattcccagggccaggtttacctgggcaattaccctccattcaaagatagaatttcatgggctggggatttagacaaaaaggatgcctccatcaatattgagaatatgcaattcatccacaacggcacctacatctgcgacgtcaagaacccccctgatatcgtagttcaacctggccacattcgcctctacgtcgtggaaaaggaaaatctgcccgtattccccgtttgggtggtagtggggatcgtcacagcggtagtgcttggcctcacacttctgatttccatgattctggccgttttgtacagaagaaagaactccaagagggattacaccggcgcccagtcctacatgcactcctag

SEQ ID NO: 215681 - DNA, 630 bp, Artificial Sequence
  derived and/or modified sequence
atggcagcctcggccggtgccggtgctgtcatcgctgctcctgatagcaggagatggctctggtctgtgctggctgccgcactgggccttttgaccgcgggagtatctgcactagaagtgtacactcctaaggagatctttgtcgctaatggaactcagggtaaacttacttgcaagtttaagagtacctcgacaacaggtggtttaaccagcgtgtcttggtcatttcaacccgagggcgctgacacaacagtttctttctttcattattcacaggggcaagtttatcttgggaattacccaccgtttaaagaccgtatctcctgggcaggtgacctggataagaaagacgcctctattaacatcgagaacatgcagttcatccacaacggaacctatatctgtgatgtgaaaaacccacccgatatcgtggtccagccaggccacattcgcctgtatgtggttgaaaaagagaatctaccggtgttcccagtgtgggttgtggtgggtatcgttacggcagttgttttaggtctgactctgctgatttccatgatcctggccgtgttgtatcggaggaaaaatagtaagagagattataccggcgctcaaagttacatgcacagttag

SEQ ID NO: 215682 - protein, 312 aa, Artificial Sequence
  derived and/or modified sequence
MAAGVDCGDGVGARQHVFLVSEYLKDASKKMKNGLMFVKLVNPCSGEGAIYLFNMCLQQLFEVKVFKEKHHSWFINQSVQSGGLLHFATPVDPLFLLLHYLIKADKEGKFQPLDQVVVDNVFPNCILLLKLPGLEKLLHHVTEEKGNPEIDNKKYYKYSKEKTLKWLEKKVNQTVAALKTNNVNVSSRVQSTAFFSGDQASTDKEEDYIRYAHGLISDYIPKELSDDLSKYLKLPEPSASLPNPPSKKIKLSDEPVEAKEDYTKFNTKDLKTEKKNSKMTAAQKALAKVDKSGMKSIDTFFGVKNKKKIGKV

SEQ ID NO: 215683 - protein, 331 aa, Artificial Sequence
  derived and/or modified sequence
MAAGVDCGDGVGARQHVFLVSEYLKDASKKMKNGLMFVKLVNPCSGEGAIYLFNMCLQQLFEVKVFKEKHHSWFINQSVQSGGLLHFATPVDPLFLLLHYLIKADKEGKFQPLDQVVVDNVFPNCILLLKLPGLEKLLHHVTEEKGNPEIDNKKYYKYSKEKTLKWLEKKVNQTVAALKTNNVNVSSRVQSTAFFSGDQASTDKEEDYIRYAHGLISDYIPKELSDDLSKYLKLPEPSASLPNPPSKKIKLSDEPVEAKEDYTKFNTKDLKTEKKNSKMTAAQKALAKVDKSGMKSIDTFFGVKKKLERFETLKIKSSKNICFLHVSVCPS

SEQ ID NO: 215684 - DNA, 939 bp, Artificial Sequence
  derived and/or modified sequence
atggctgcgggcgtcgattgcggagatggagtgggcgctaggcagcatgtgtttctggtgtcagaatatctcaaagacgcctcaaagaaaatgaaaaatgggctaatgttcgtaaagctcgtcaacccatgctcaggggaaggagcaatatacttgttcaatatgtgcctgcagcagctgttcgaagtgaaggtattcaaggaaaagcatcactcctggtttattaatcagagcgtgcagagcggagggctcctacactttgcgacacctgttgaccccctgttcttgttactgcactacctgattaaagcggacaaagaaggaaaatttcagccacttgaccaggtcgtggtagataatgtttttcctaactgcatcttactgctcaagttaccgggcctggaaaagctgctccaccacgtgaccgaggagaagggaaaccctgaaatagacaataagaaatactacaaatactcaaaagagaaaacactgaagtggctcgagaaaaaagtgaatcagaccgttgccgcactgaagactaataatgtgaacgtgagctcaagggtgcagtccacggccttttttagcggtgaccaagcgtcgactgacaaggaggaagactatataagatatgcccacgggctcatatctgattacatacctaaggaactctcagatgatctgtccaaatacttgaaactcccagaaccttccgccagcctgcctaaccctccgtccaaaaagattaagttgagcgatgagccagttgaagctaaggaggactataccaagttcaacacgaaagatttgaagaccgaaaagaaaaacagcaagatgacagcggcacaaaaagctcttgcaaaggtggataagagcggtatgaaatcaatagacacatttttcggggtgaaaaacaagaagaaaattggaaaagtgtag

SEQ ID NO: 215685 - DNA, 996 bp, Artificial Sequence
  derived and/or modified sequence
atggcagccggcgtggattgtggggacggcgtcggtgcccgccagcatgtgtttctcgtgtccgagtatcttaaagatgccagtaagaagatgaagaatggtttaatgttcgtcaaactggtcaacccgtgtagcggggaaggagctatctatttatttaatatgtgcctacagcagctgttcgaagtgaaggtgtttaaggagaagcaccactcctggtttattaaccaatctgtacagtccggcggcctgctccattttgccacgcctgtggatcctctctttctcctgctccattacttgatcaaggctgacaaggagggtaagttccagccgctggatcaagtcgtcgtcgacaatgtgtttcccaattgcatcttgctgctaaagcttccaggtttggagaagctgcttcaccatgttaccgaggaaaaaggcaatccggagatagacaacaagaagtactataagtactcgaaagaaaagactttgaaatggctggagaagaaagtgaatcagaccgtggcagcactgaagaccaataacgttaacgttagctcccgagtgcaatcaaccgccttttttagcggagatcaggccagtactgacaaagaagaggactacatcaggtatgcacacggcctcatcagtgactacatcccaaaggagcttagtgatgatttatcgaaatatctgaagttgcccgagccaagtgctagtctacccaaccctccctccaaaaaaataaagttgagtgacgagccagtggaggcaaaggaggattacacaaaatttaacacgaaggacctcaagaccgagaaaaaaaacagtaaaatgactgcggctcaaaaagccctggccaaagtcgacaagagtggcatgaaatctattgatacttttttcggcgtgaagaaaaagctggaacgcttcgagaccttgaaaatcaagtccagcaagaatatttgttttctccacgtgtctgtctgccctagctag

SEQ ID NO: 215686 - DNA, 939 bp, Artificial Sequence
  derived and/or modified sequence
atggctgctggggtggactgtggagatggagtgggcgcccggcagcacgtgttcctggtgtctgagtacctgaaggatgccagcaagaagatgaagaatggcctgatgtttgtgaagctggtgaacccctgcagcggggagggcgccatctacctgttcaacatgtgcctgcagcagctgtttgaggtgaaggtgttcaaggagaagcaccacagctggttcatcaaccagagcgtgcagagcggcggcctgctgcactttgccacccctgtggaccccctcttcctgctgctgcactacctgatcaaggctgacaaggagggcaagttccagcccctggaccaggtggtggtggacaacgtgttccccaactgcatcctgctgctgaagctgcccggcctggagaagctgctgcaccacgtgacagaggagaagggcaaccctgagattgacaacaagaagtactacaagtacagcaaggagaagaccctgaagtggctggagaagaaggtgaaccagacagtggccgccctgaagaccaacaacgtgaatgtgagcagccgggtgcagagcacagccttcttcagcggggaccaggccagcacagacaaggaggaggactacatccgctatgcccacggcctcatcagtgactacatccccaaggagctgagtgatgacctgagcaagtacctgaagctgcctgagcccagcgccagcctgcccaacccccccagcaagaagatcaagctgagtgatgagcctgtggaggccaaggaggactacaccaagttcaacaccaaggacctgaagacagagaagaagaacagcaagatgacagctgcccagaaggccctggccaaggtggacaagagcggcatgaagagcattgacaccttctttggagtgaagaacaagaagaagattggcaaggtgtag

SEQ ID NO: 215687 - DNA, 996 bp, Artificial Sequence
  derived and/or modified sequence
atggctgctggggtggactgtggagatggagtgggcgcccggcagcacgtgttcctggtgtctgagtacctgaaggatgccagcaagaagatgaagaatggcctgatgtttgtgaagctggtgaacccctgcagcggggagggcgccatctacctgttcaacatgtgcctgcagcagctgtttgaggtgaaggtgttcaaggagaagcaccacagctggttcatcaaccagagcgtgcagagcggcggcctgctgcactttgccacccctgtggaccccctcttcctgctgctgcactacctgatcaaggctgacaaggagggcaagttccagcccctggaccaggtggtggtggacaacgtgttccccaactgcatcctgctgctgaagctgcccggcctggagaagctgctgcaccacgtgacagaggagaagggcaaccctgagattgacaacaagaagtactacaagtacagcaaggagaagaccctgaagtggctggagaagaaggtgaaccagacagtggccgccctgaagaccaacaacgtgaatgtgagcagccgggtgcagagcacagccttcttcagcggggaccaggccagcacagacaaggaggaggactacatccgctatgcccacggcctcatcagtgactacatccccaaggagctgagtgatgacctgagcaagtacctgaagctgcctgagcccagcgccagcctgcccaacccccccagcaagaagatcaagctgagtgatgagcctgtggaggccaaggaggactacaccaagttcaacaccaaggacctgaagacagagaagaagaacagcaagatgacagctgcccagaaggccctggccaaggtggacaagagcggcatgaagagcattgacaccttctttggagtgaagaagaagctggagagatttgagaccctgaagatcaagagcagcaagaacatctgcttcctgcacgtgtctgtgtgccccagctag

SEQ ID NO: 215688 - DNA, 939 bp, Artificial Sequence
  derived and/or modified sequence
atggccgccggcgtggactgcggcgacggcgtgggcgcccggcagcatgtgttcctggtctccgagtacttgaaggacgctagcaagaagatgaagaacggactcatgtttgtaaaattagtaaatccttgctcgggtgaaggagcaatttacttgttcaatatgtgcctccagcagctcttcgaggtaaaggtgttcaaggaaaaacatcactcctggtttatcaatcagtcggtacaaagcggcgggctccttcactttgctacccccgtcgatccacttttcttgctcttacactacctcatcaaagccgacaaagaggggaagttccaaccactggatcaggtggtggttgataatgtgtttccgaattgcatcctgctcttgaaactacctgggctggagaaactcttacaccacgtgacagaagagaaaggaaaccctgagattgacaacaaaaaatattacaaatatagcaaggaaaagacacttaagtggctcgagaagaaagtgaatcaaaccgttgctgctctcaaaacgaacaacgtaaacgtttcttctcgggtccagtcaaccgctttttttagcggtgaccaggcaagtactgataaggaggaagactatatccggtatgcacacggtttgatttccgattacattcccaaagaattatccgacgacctgtcgaaatatttgaaactgccagagccctccgcatccctgcccaaccctccttccaagaagatcaaattaagcgatgaaccagtcgaagcgaaagaggattataccaagtttaatacaaaagatcttaagaccgagaaaaaaaactcaaagatgacagctgctcagaaggcactcgcaaaggtggacaagagcggaatgaaaagtattgacaccttctttggagtgaagaataagaagaaaatcggtaaggtgtag

SEQ ID NO: 215689 - DNA, 996 bp, Artificial Sequence
  derived and/or modified sequence
atggccgccggcgtggactgcggcgacggcgtgggcgcccggcagcatgtatttcttgtgagcgagtatctgaaagacgctagcaaaaagatgaaaaacggcttaatgtttgtcaaactcgtgaatccttgctcaggggagggggcaatctatctgttcaacatgtgtctccaacagctgttcgaggtgaaggttttcaaagaaaagcaccatagctggtttattaaccagagcgtgcagagtgggggcctattgcacttcgctacaccggtggatccactgtttctgctcttgcattacctgatcaaagccgataaagagggcaagttccagccgctggatcaggttgtagtcgacaacgtattcccaaactgcatattactgctgaaattgcccgggctggaaaaactgttacatcatgtgaccgaggaaaagggtaacccagagatcgacaataagaagtactataaatactcaaaggaaaaaactttgaaatggctcgaaaagaaggtgaatcaaaccgtggccgctcttaaaactaataacgtgaacgtgtcgagcagggtacaatctacggcgtttttcagcggggaccaggccagcacagataaggaggaagactacattcggtatgcacatggcctcatctccgattatataccaaaagagttatccgatgatctcagcaagtacctgaagctacccgaaccgagcgcttctctccctaatcctcccagtaagaagataaagttgagcgatgagcctgtggaggccaaggaagactacactaaatttaacaccaaagacctgaaaactgagaagaaaaatagtaagatgaccgccgcccaaaaagccctagccaaggtggataaatccggtatgaagagtatcgacacattttttggcgtgaagaagaagctggagagattcgaaacccttaaaatcaagagctccaagaacatctgcttcctgcatgtatcagtatgcccaagttag

SEQ ID NO: 215690 - DNA, 939 bp, Artificial Sequence
  derived and/or modified sequence
atggcggctggcgttgattgcggcgacggtgttggcgctcgccaacacgtgtttctggtttcagagtacctgaaagacgcttccaaaaaaatgaagaacgggctaatgtttgtaaaactggtgaatccttgttctggcgagggggcaatctacctctttaacatgtgtctgcagcagttgtttgaggtcaaagttttcaaagaaaagcaccacagttggttcatcaatcagagcgtccagtcaggcggactcctgcattttgctactccagtcgatccactgtttcttcttctgcattacctcatcaaagccgacaaggaaggaaaattccagccacttgatcaagtggttgttgacaatgtgtttcctaattgtatcctgcttctcaagctgccgggtttggagaaactgctacaccatgtgaccgaagagaaggggaatccggaaatcgacaataagaaatattacaagtacagcaaagagaagacgttgaagtggttagaaaaaaaagtcaatcaaacagtggcggctcttaagactaacaatgtcaatgtgagtagccgtgtgcagtccaccgccttttttagtggcgaccaggccagcaccgacaaagaagaagactatatccgctacgcccacgggctgatctccgactacatccccaaagagctatccgacgatctatccaagtatctgaaattacctgagcccagcgcctctttacctaaccccccttccaagaaaatcaagctgagtgatgagccggttgaggccaaagaggattacaccaagttcaatactaaggacttgaagactgagaaaaaaaactctaaaatgactgccgcacagaaagccttggcaaaagtggataagagtggaatgaagtctatcgatacattcttcggggtgaagaataagaaaaaaattggtaaggtgtag

SEQ ID NO: 215691 - DNA, 996 bp, Artificial Sequence
  derived and/or modified sequence
atggcagcaggcgtggattgcggggatggggtgggcgctcggcagcatgtatttttggtcagcgagtacctgaaagacgcatctaaaaagatgaagaacggtttgatgtttgtcaagctggtgaacccctgctccggcgagggcgctatctatcttttcaatatgtgcctgcaacagctgttcgaagttaaggtgttcaaggaaaaacatcatagctggtttatcaatcaaagtgtacaatctggcggtctgctgcactttgccaccccagtagatcccctctttcttctgttacattacctaataaaggcagacaaagagggcaaatttcagcctcttgaccaggtggtggtggacaacgtgttccctaactgtatcctattgctgaaactgcctggcttagagaagctactgcaccatgtgacagaagaaaaggggaatcccgagatcgacaacaagaaatattacaaatattcaaaggagaaaacattgaagtggctggaaaaaaaagtgaatcagactgtggccgctttgaaaacaaataatgtaaatgtctcatctcgggtgcagagcaccgcatttttctcaggggatcaggcctctactgataaggaggaagattacatccggtatgcacatgggttaatcagtgactacattccgaaggagttatccgacgacttgtctaagtacctaaagttgcctgaacccagcgcatctctgcctaaccctccgagcaaaaaaattaagctgtccgacgagcccgtcgaagcaaaagaagactatacgaaatttaacacaaaggacctaaagacagagaagaagaactccaagatgactgctgctcagaaggctctcgctaaagtggataagagcggcatgaaaagcatcgacacatttttcggcgtcaaaaagaagctggagagatttgagactctgaaaatcaagtctagtaaaaacatatgctttctgcacgttagtgtgtgcccttcctag

SEQ ID NO: 215692 - DNA, 1594 bp, Artificial Sequence
  derived and/or modified sequence
ccgctggctagaccatggagggccgctgggtgcagccacagagcgcggggccccggcgaccccgccccgctccgcgtcactcggcgccctgcggcgcgcgatgagcacctaccactagcggagccgcgagggagaggccgcggccccttcccgttgcctgcggccaccggccggcattcagagcccctcgcctggcgctaaatttaaaaacgtaacacgagcagcaggctggtctcggaaacgaaacgaaattcggtccctgggcctcctcccgggcgctgccggtccctcagcgcgccgcgccacccggaacagacccttctcccgccattttcggcggggctgggagactgaggcccgcggcgctgagcctgcggcgccccggaagaggcgggcggcatggccgctggcgtggactgcggggacggggttggcgcccggcagcacgtgttcctggtttcagaatatttaaaagatgcttcaaagaagatgaaaaatgggctaatgtttgtaaaactggttaacccctgttcaggagaaggagccatttacttgttcaatatgtgtctacagcagctgtttgaagtaaaagttttcaaggaaaaacaccattcttggtttataaatcaatcagttcaatcaggaggtcttctccattttgccacacctgtggatcctctatttctgcttctccactacctcataaaggctgataaggaggggaagtttcagccccttgatcaagttgtggtggataacgtgtttccaaattgcatcttgttgctgaaacttcctggacttgagaagttacttcatcatgtgacagaggaaaaaggtaatccagaaatagacaacaagaaatattacaagtacagcaaagagaagacattaaagtggctggaaaaaaaggttaatcaaactgtggcagcattaaaaaccaataatgtgaatgtcagttcccgggtacagtcaactgcatttttctctggtgaccaagcttccactgacaaggaagaggattatattcgttatgcccatggtctgatatctgactacatccctaaagaattaagtgatgacttatctaaatacttaaagcttccagaaccttcagcctcattgccaaatcctccatcaaagaaaataaagttatcagatgagcctgtagaagcaaaagaagattacactaagtttaatactaaagatttgaagactgaaaagaaaaatagcaaaatgactgcagctcagaaggctttggctaaagttgacaagagtggaatgaaaagtattgataccttttttggggtaaaaaataaaaaaaaaattggaaaggtttgaaactttgaaaataaaatctagcaaaaatatttgctttttacatgtttcagtttgtccttcctgactgttaatgactacctttggttgggggaaggaagaggccaatttcatgttctcttaaacatttctttgcatttggtttttgtgttcctgaacaaaatatgggaaagtgtctaacttcatggctatggccttttggagtctcatctgacataatgaaaagtaatcacttgaagagaattaacatatagcatca

SEQ ID NO: 215693 - DNA, 1587 bp, Artificial Sequence
  derived and/or modified sequence
ccgctggctagaccatggagggccgctgggtgcagccacagagcgcggggccccggcgaccccgccccgctccgcgtcactcggcgccctgcggcgcgcgatgagcacctaccactagcggagccgcgagggagaggccgcggccccttcccgttgcctgcggccaccggccggcattcagagcccctcgcctggcgctaaatttaaaaacgtaacacgagcagcaggctggtctcggaaacgaaacgaaattcggtccctgggcctcctcccgggcgctgccggtccctcagcgcgccgcgccacccggaacagacccttctcccgccattttcggcggggctgggagactgaggcccgcggcgctgagcctgcggcgccccggaagaggcgggcggcatggccgctggcgtggactgcggggacggggttggcgcccggcagcacgtgttcctggtttcagaatatttaaaagatgcttcaaagaagatgaaaaatgggctaatgtttgtaaaactggttaacccctgttcaggagaaggagccatttacttgttcaatatgtgtctacagcagctgtttgaagtaaaagttttcaaggaaaaacaccattcttggtttataaatcaatcagttcaatcaggaggtcttctccattttgccacacctgtggatcctctatttctgcttctccactacctcataaaggctgataaggaggggaagtttcagccccttgatcaagttgtggtggataacgtgtttccaaattgcatcttgttgctgaaacttcctggacttgagaagttacttcatcatgtgacagaggaaaaaggtaatccagaaatagacaacaagaaatattacaagtacagcaaagagaagacattaaagtggctggaaaaaaaggttaatcaaactgtggcagcattaaaaaccaataatgtgaatgtcagttcccgggtacagtcaactgcatttttctctggtgaccaagcttccactgacaaggaagaggattatattcgttatgcccatggtctgatatctgactacatccctaaagaattaagtgatgacttatctaaatacttaaagcttccagaaccttcagcctcattgccaaatcctccatcaaagaaaataaagttatcagatgagcctgtagaagcaaaagaagattacactaagtttaatactaaagatttgaagactgaaaagaaaaatagcaaaatgactgcagctcagaaggctttggctaaagttgacaagagtggaatgaaaagtattgataccttttttggggtaaaaaaaaaattggaaaggtttgaaactttgaaaataaaatctagcaaaaatatttgctttttacatgtttcagtttgtccttcctgactgttaatgactacctttggttgggggaaggaagaggccaatttcatgttctcttaaacatttctttgcatttggtttttgtgttcctgaacaaaatatgggaaagtgtctaacttcatggctatggccttttggagtctcatctgacataatgaaaagtaatcacttgaagagaattaacatatagcatca

SEQ ID NO: 215694 - DNA, 939 bp, Artificial Sequence
  derived and/or modified sequence
atggccgccggcgtggactgcggcgacggcgtgggcgccagacagcacgtgttcctggtgagcgagtacctgaaggacgccagcaagaagatgaagaacggcctgatgttcgtgaagctggtgaacccctgcagcggcgagggcgccatctacctgttcaacatgtgcctgcagcagctgttcgaggtgaaggtgttcaaggagaagcaccacagctggttcatcaaccagagcgtgcagagcggcggcctgctgcacttcgccacccccgtggaccccctgttcctgctgctgcactacctgatcaaggccgacaaggagggcaagttccagcccctggaccaggtggtggtggacaacgtgttccccaactgcatcctgctgctgaagctgcccggcctggagaagctgctgcaccacgtgaccgaggagaagggcaaccccgagatcgacaacaagaagtactacaagtacagcaaggagaagaccctgaagtggctggagaagaaggtgaaccagaccgtggccgccctgaagaccaacaacgtgaacgtgagcagcagagtgcagagcaccgccttcttcagcggcgaccaggccagcaccgacaaggaggaggactacatcagatacgcccacggcctgatcagcgactacatccccaaggagctgagcgacgacctgagcaagtacctgaagctgcccgagcccagcgccagcctgcccaacccccccagcaagaagatcaagctgagcgacgagcccgtggaggccaaggaggactacaccaagttcaacaccaaggacctgaagaccgagaagaagaacagcaagatgaccgccgcccagaaggccctggccaaggtggacaagagcggcatgaagagcatcgacaccttcttcggcgtgaagaacaagaagaagatcggcaaggtgtag

SEQ ID NO: 215695 - DNA, 996 bp, Artificial Sequence
  derived and/or modified sequence
atggccgccggcgtggactgcggcgacggcgtgggcgccagacagcacgtgttcctggtgagcgagtacctgaaggacgccagcaagaagatgaagaacggcctgatgttcgtgaagctggtgaacccctgcagcggcgagggcgccatctacctgttcaacatgtgcctgcagcagctgttcgaggtgaaggtgttcaaggagaagcaccacagctggttcatcaaccagagcgtgcagagcggcggcctgctgcacttcgccacccccgtggaccccctgttcctgctgctgcactacctgatcaaggccgacaaggagggcaagttccagcccctggaccaggtggtggtggacaacgtgttccccaactgcatcctgctgctgaagctgcccggcctggagaagctgctgcaccacgtgaccgaggagaagggcaaccccgagatcgacaacaagaagtactacaagtacagcaaggagaagaccctgaagtggctggagaagaaggtgaaccagaccgtggccgccctgaagaccaacaacgtgaacgtgagcagcagagtgcagagcaccgccttcttcagcggcgaccaggccagcaccgacaaggaggaggactacatcagatacgcccacggcctgatcagcgactacatccccaaggagctgagcgacgacctgagcaagtacctgaagctgcccgagcccagcgccagcctgcccaacccccccagcaagaagatcaagctgagcgacgagcccgtggaggccaaggaggactacaccaagttcaacaccaaggacctgaagaccgagaagaagaacagcaagatgaccgccgcccagaaggccctggccaaggtggacaagagcggcatgaagagcatcgacaccttcttcggcgtgaagaagaagctggagagattcgagaccctgaagatcaagagcagcaagaacatctgcttcctgcacgtgagcgtgtgccccagctag

SEQ ID NO: 215696 - protein, 552 aa, Artificial Sequence
  derived and/or modified sequence
MRRLTRRLVLPVFGVLWITVLLFFWVTKRKLEVPTGPEVQTPKPSDADWDDLWDQFDERRYLNAKKWRVGDDPYKLYAFNQRESERISSNRAIPDTRHLRCTLLVYCTDLPPTSIIITFHNEARSTLLRTIRSVLNRTPTHLIREIILVDDFSNDPDDCKQLIKLPKVKCLRNNERQGLVRSRIRGADIAQGTTLTFLDSHCEVNRDWLQPLLHRVKEDYTRVVCPVIDIINLDTFTYIESASELRGGFDWSLHFQWEQLSPEQKARRLDPTEPIRTPIIAGGLFVIDKAWFDYLGKYDMDMDIWGGENFEISFRVWMCGGSLEIVPCSRVGHVFRKKHPYVFPDGNANTYIKNTKRTAEVWMDEYKQYYYAARPFALERPFGNVESRLDLRKNLRCQSFKWYLENIYPELSIPKESSIQKGNIRQRQKCLESQRQNNQETPNLKLSPCAKVKGEDAKSQVWAFTYTQQILQEELCLSVITLFPGAPVVLVLCKNGDDRQQWTKTGSHIEHIASHLCLDTDMFGDGTENGKEIVVNPCESSLMSQHWDMVSS

SEQ ID NO: 215697 - protein, 519 aa, Artificial Sequence
  derived and/or modified sequence
MRRLTRRLVLPVFGVLWITVLLFFWVTKRKLEVPTGPEVQTPKPSDADWDDLWDQFDERRYLNAKKWRVGDDPYKLYAFNQRESERISSNRAIPDTRHLSVLNRTPTHLIREIILVDDFSNDPDDCKQLIKLPKVKCLRNNERQGLVRSRIRGADIAQGTTLTFLDSHCEVNRDWLQPLLHRVKEDYTRVVCPVIDIINLDTFTYIESASELRGGFDWSLHFQWEQLSPEQKARRLDPTEPIRTPIIAGGLFVIDKAWFDYLGKYDMDMDIWGGENFEISFRVWMCGGSLEIVPCSRVGHVFRKKHPYVFPDGNANTYIKNTKRTAEVWMDEYKQYYYAARPFALERPFGNVESRLDLRKNLRCQSFKWYLENIYPELSIPKESSIQKGNIRQRQKCLESQRQNNQETPNLKLSPCAKVKGEDAKSQVWAFTYTQQILQEELCLSVITLFPGAPVVLVLCKNGDDRQQWTKTGSHIEHIASHLCLDTDMFGDGTENGKEIVVNPCESSLMSQHWDMVSS

SEQ ID NO: 215698 - DNA, 1659 bp, Artificial Sequence
  derived and/or modified sequence
atgagaagactgaccagaagactggtgctgcccgtgttcggcgtgctgtggatcaccgtgctgctgttcttctgggtgaccaagagaaagctggaggtgcccaccggccccgaggtgcagacccccaagcccagcgacgccgactgggacgacctgtgggaccagttcgacgagagaagatacctgaacgccaagaagtggagagtgggcgacgacccctacaagctgtacgccttcaaccagagagagagcgagagaatcagcagcaacagagccatccccgacaccagacacctgagatgcaccctgctggtgtactgcaccgacctgccccccaccagcatcatcatcaccttccacaacgaggccagaagcaccctgctgagaaccatcagaagcgtgctgaacagaacccccacccacctgatcagagagatcatcctggtggacgacttcagcaacgaccccgacgactgcaagcagctgatcaagctgcccaaggtgaagtgcctgagaaacaacgagagacagggcctggtgagaagcagaatcagaggcgccgacatcgcccagggcaccaccctgaccttcctggacagccactgcgaggtgaacagagactggctgcagcccctgctgcacagagtgaaggaggactacaccagagtggtgtgccccgtgatcgacatcatcaacctggacaccttcacctacatcgagagcgccagcgagctgagaggcggcttcgactggagcctgcacttccagtgggagcagctgagccccgagcagaaggccagaagactggaccccaccgagcccatcagaacccccatcatcgccggcggcctgttcgtgatcgacaaggcctggttcgactacctgggcaagtacgacatggacatggacatctggggcggcgagaacttcgagatcagcttcagagtgtggatgtgcggcggcagcctggagatcgtgccctgcagcagagtgggccacgtgttcagaaagaagcacccctacgtgttccccgacggcaacgccaacacctacatcaagaacaccaagagaaccgccgaggtgtggatggacgagtacaagcagtactactacgccgccagacccttcgccctggagagacccttcggcaacgtggagagcagactggacctgagaaagaacctgagatgccagagcttcaagtggtacctggagaacatctaccccgagctgagcatccccaaggagagcagcatccagaagggcaacatcagacagagacagaagtgcctggagagccagagacagaacaaccaggagacccccaacctgaagctgagcccctgcgccaaggtgaagggcgaggacgccaagagccaggtgtgggccttcacctacacccagcagatcctgcaggaggagctgtgcctgagcgtgatcaccctgttccccggcgcccccgtggtgctggtgctgtgcaagaacggcgacgacagacagcagtggaccaagaccggcagccacatcgagcacatcgccagccacctgtgcctggacaccgacatgttcggcgacggcaccgagaacggcaaggagatcgtggtgaacccctgcgagagcagcctgatgagccagcactgggacatggtgagcagctag

SEQ ID NO: 215699 - DNA, 1560 bp, Artificial Sequence
  derived and/or modified sequence
atgagaagactgaccagaagactggtgctgcccgtgttcggcgtgctgtggatcaccgtgctgctgttcttctgggtgaccaagagaaagctggaggtgcccaccggccccgaggtgcagacccccaagcccagcgacgccgactgggacgacctgtgggaccagttcgacgagagaagatacctgaacgccaagaagtggagagtgggcgacgacccctacaagctgtacgccttcaaccagagagagagcgagagaatcagcagcaacagagccatccccgacaccagacacctgagcgtgctgaacagaacccccacccacctgatcagagagatcatcctggtggacgacttcagcaacgaccccgacgactgcaagcagctgatcaagctgcccaaggtgaagtgcctgagaaacaacgagagacagggcctggtgagaagcagaatcagaggcgccgacatcgcccagggcaccaccctgaccttcctggacagccactgcgaggtgaacagagactggctgcagcccctgctgcacagagtgaaggaggactacaccagagtggtgtgccccgtgatcgacatcatcaacctggacaccttcacctacatcgagagcgccagcgagctgagaggcggcttcgactggagcctgcacttccagtgggagcagctgagccccgagcagaaggccagaagactggaccccaccgagcccatcagaacccccatcatcgccggcggcctgttcgtgatcgacaaggcctggttcgactacctgggcaagtacgacatggacatggacatctggggcggcgagaacttcgagatcagcttcagagtgtggatgtgcggcggcagcctggagatcgtgccctgcagcagagtgggccacgtgttcagaaagaagcacccctacgtgttccccgacggcaacgccaacacctacatcaagaacaccaagagaaccgccgaggtgtggatggacgagtacaagcagtactactacgccgccagacccttcgccctggagagacccttcggcaacgtggagagcagactggacctgagaaagaacctgagatgccagagcttcaagtggtacctggagaacatctaccccgagctgagcatccccaaggagagcagcatccagaagggcaacatcagacagagacagaagtgcctggagagccagagacagaacaaccaggagacccccaacctgaagctgagcccctgcgccaaggtgaagggcgaggacgccaagagccaggtgtgggccttcacctacacccagcagatcctgcaggaggagctgtgcctgagcgtgatcaccctgttccccggcgcccccgtggtgctggtgctgtgcaagaacggcgacgacagacagcagtggaccaagaccggcagccacatcgagcacatcgccagccacctgtgcctggacaccgacatgttcggcgacggcaccgagaacggcaaggagatcgtggtgaacccctgcgagagcagcctgatgagccagcactgggacatggtgagcagctag

SEQ ID NO: 215700 - DNA, 1659 bp, Artificial Sequence
  derived and/or modified sequence
atgcgcagacttacccgccggctggtcctgcccgtctttggagttctgtggattacggtcctgttattcttttgggttacaaagagaaaactggaggtgcctacaggtccggaagtgcaaactcccaagcctagtgatgccgactgggatgatctctgggaccagttcgacgaacgacggtacctgaatgcaaagaagtggcgcgtcggcgatgacccctacaagctgtacgcctttaatcagcgggaatctgagaggatctccagcaatagagccatcccagataccagacacttaagatgcaccctcctcgtgtactgcaccgatctgcccccaacatctattattatcactttccataatgaggccaggtccacccttctccgcaccatcaggtcagtgctcaaccgcaccccaactcacctcataagagagattatcctcgtagacgactttagtaacgaccccgatgattgtaagcagctgatcaagctgccaaaggttaagtgcttgcgcaacaatgagcggcagggcctagtgagaagccggattaggggcgccgacatcgcacagggcacaaccttgactttcctggacagccactgtgaagtcaacagggattggctgcagcccctcctgcatcgggtcaaagaagattataccagggtcgtgtgtccggtgattgatatcataaatcttgacacctttacgtatatcgagtccgccagtgagctgcgaggcggctttgattggagcctgcatttccagtgggaacaattgtccccagaacagaaggccagacgcctggatcctactgaacctatcaggactcctattattgccgggggcttgtttgtgatcgataaggcgtggttcgactacctcggcaaatatgacatggatatggatatctggggcggcgagaatttcgaaatatcttttcgcgtgtggatgtgtggaggatccctcgagatcgtgccttgctcaagagttgggcatgtctttcggaaaaagcacccatacgttttcccagacggcaatgctaacacttacatcaaaaatactaaacgcaccgccgaagtatggatggacgaatataagcagtactactacgctgcaaggccatttgctttggaacgtccatttggtaacgtagagtcccggttagacctgcgcaaaaacctccgatgtcaatctttcaagtggtaccttgaaaatatttatcctgagctctcaattcctaaggagagtagcatacagaaggggaacatccgacagagacagaagtgcctggagtctcagagacaaaataaccaggagactcccaatctcaaattgtctccttgtgcgaaggtgaagggggaagacgctaaatcacaggtgtgggccttcacttacacacagcagattctacaggaggaactgtgcctttctgtgatcacgctctttccaggggcacctgtcgtactggttctctgtaagaacggggacgaccgacagcagtggactaagacggggtcccatatagaacatattgcctcccatctgtgtctggatacggacatgtttggcgatggaaccgagaacgggaaggaaattgttgtgaatccctgcgagagtagcctcatgtcccaacactgggacatggtgtccagttag

SEQ ID NO: 215701 - DNA, 1560 bp, Artificial Sequence
  derived and/or modified sequence
atgcggcggctgacaagacggctggtgctgcccgtcttcggcgtgctttggatcacagtgctcctttttttctgggtcacaaagcgcaagttggaggtgcccacaggccccgaggtccagacacccaagcccagcgacgccgactgggacgacttatgggatcagtttgacgaacgacgctacctcaatgctaaaaagtggagggtgggtgatgatccatataagttgtatgcgttcaatcagcgggaaagcgaaagaatcagctcaaacagagcgatacctgacactcgccaccttagcgtgttgaacaggactccgacacatctgatcagggagatcatcctcgtggatgatttcagcaatgaccccgatgattgtaagcaacttattaagcttcctaaagttaagtgcctgcggaataatgagagacaaggactggtcaggtcccgtatacggggagccgacattgcccagggcacaactctcacttttctggactctcactgtgaggtgaatagggattggttacaacccctcctgcacagagtaaaagaagactacacacgagtggtctgtcccgtcattgatattataaacctcgatacctttacttatatcgagtctgcatcagaactccgcggaggattcgactggtctctccactttcaatgggagcaattgtctcccgaacagaaagcgcggagactggaccccacggagcctattcggactcccattattgcaggcggcttattcgtcatagacaaggcctggttcgactacctcggaaagtatgatatggacatggacatctggggcggcgagaattttgagataagctttagagtgtggatgtgcggcggaagcctggagatcgtaccctgttcccgggtgggacacgtgtttcggaagaagcatccctacgtattccctgatggcaacgcgaacacgtacatcaaaaatactaagcgcactgccgaggtatggatggacgagtacaagcagtactactacgcagcaagacccttcgctcttgaacgacctttcgggaatgtcgaatcacgactggaccttaggaaaaaccttcgatgccagtcattcaaatggtacctggagaatatctatccggaactttcaatccctaaggaaagtagtattcagaaaggaaacatccgacaacgtcagaagtgcttagagagtcagaggcagaataaccaggagactccaaatctcaagctgtcgccttgcgctaaagtcaagggagaagatgcaaagagccaggtgtgggccttcacatacacacagcagatcctacaagaggagctctgtctgtccgttatcacactcttcccaggggctcccgtggtcctcgtgttgtgtaagaatggcgacgatcggcagcagtggacaaagaccggctctcacatcgagcacatagcgtcacatctgtgtctggacaccgacatgtttggcgatggcactgagaacggaaaagagatcgtcgtgaatccatgtgagtcctccttgatgagtcaacattgggacatggtcagttcatag

SEQ ID NO: 215702 - DNA, 1659 bp, Artificial Sequence
  derived and/or modified sequence
atgaggcggctgacccggcggctggtgctgcctgtgtttggagtgctgtggatcaccgtgctgctcttcttctgggtgaccaagaggaagctggaggtgcccactggacctgaggtgcagacccccaagcccagtgatgctgactgggatgacctgtgggaccagtttgatgaaagacgctacctgaatgccaagaagtggagggtgggagatgacccctacaagctgtatgccttcaaccagcgggagagcgagcgcatcagcagcaacagagccatcccagacaccaggcacctgcgctgcaccctgctggtgtactgcacagacctgccccccaccagcatcatcatcaccttccacaatgaggcccggagcaccctgctgcggaccatccgctctgtgctgaacagaacacccacccacctgatccgggagatcatcctggtggatgacttcagcaatgaccctgatgactgcaagcagctgatcaagctgcccaaggtgaagtgcctgaggaacaatgaaaggcagggcctggtgcgcagccgcatcagaggagctgacatcgcccagggcaccaccctgaccttcctggacagccactgtgaggtgaacagagactggctgcagcccctgctgcaccgggtgaaggaggactacaccagggtggtgtgccctgtgattgacatcatcaacctggacaccttcacctacattgaaagtgccagcgagctgcggggcggctttgactggagcctgcacttccagtgggagcagctgagccctgagcagaaggcccggcggctggaccccacagagcccatccgcacccccatcatcgccggcggcctgtttgtgattgacaaggcctggtttgactacctgggcaagtatgacatggacatggacatctggggcggggagaactttgagatctccttccgggtgtggatgtgtggcggcagcctggagatcgtgccctgcagccgggtgggccacgtgttcaggaagaagcacccctacgtgtttcctgatggaaatgccaacacctacatcaagaacaccaagaggacagctgaggtgtggatggatgagtacaagcagtactactatgctgcccggccctttgccctggagcggccctttggaaatgtggagagccggctggacctgaggaagaacctgcgctgccagagcttcaagtggtacctggagaacatctacccagagctgagcatccccaaggagagcagcatccagaagggcaacatccggcagaggcagaagtgcctggagagccagaggcagaacaaccaggagacccccaacctgaagctgagcccctgtgccaaggtgaagggagaagatgccaagagccaggtgtgggccttcacctacacccagcagatcctgcaggaggagctgtgcctgagcgtcatcaccctcttccctggggcccctgtggtgctggtgctgtgcaagaatggagatgaccggcagcagtggaccaagacaggcagccacatcgagcacatcgccagccacctgtgcctggacacagacatgtttggagatggaacagaaaatggcaaggagatcgtggtgaacccctgtgagagcagcctgatgagccagcactgggacatggtgagcagctag

SEQ ID NO: 215703 - DNA, 1560 bp, Artificial Sequence
  derived and/or modified sequence
atgaggcggctgacccggcggctggtgctgcctgtgtttggagtgctgtggatcaccgtgctgctcttcttctgggtgaccaagaggaagctggaggtgcccactggacctgaggtgcagacccccaagcccagtgatgctgactgggatgacctgtgggaccagtttgatgaaagacgctacctgaatgccaagaagtggagggtgggagatgacccctacaagctgtatgccttcaaccagcgggagagcgagcgcatcagcagcaacagagccatcccagacaccaggcacctgtctgtgctgaacagaacacccacccacctgatccgggagatcatcctggtggatgacttcagcaatgaccctgatgactgcaagcagctgatcaagctgcccaaggtgaagtgcctgagaaataatgaaaggcagggcctggtgcgcagccgcatcagaggagctgacatcgcccagggcaccaccctgaccttcctggacagccactgtgaggtgaacagagactggctgcagcccctgctgcaccgggtgaaggaggactacaccagggtggtgtgccctgtgattgacatcatcaacctggacaccttcacctacatcgagagcgccagcgagctgcggggcggctttgactggagcctgcacttccagtgggagcagctgagccctgagcagaaggcccggcggctggaccccacagagcccatccgcacccccatcatcgccggcggcctcttcgtcatcgacaaggcctggtttgactacctgggcaagtatgacatggacatggacatctggggcggagaaaattttgagatctccttccgggtgtggatgtgtggcggcagcctggagatcgtgccctgcagccgggtgggccacgtgttcaggaagaagcacccctacgtgtttcctgatggaaatgccaacacctacatcaagaacaccaagaggacagctgaggtgtggatggatgagtacaagcagtactactatgctgcccggccctttgccctggagcggccctttggaaatgtggagagccggctggacctgaggaagaacctgcgctgccagagcttcaagtggtacctggagaacatctacccagagctgagcatccccaaggagagcagcatccagaagggcaacatccggcagaggcagaagtgcctggagagccagaggcagaacaaccaggagacccccaacctgaagctgagcccctgtgccaaggtgaagggggaggatgccaagagccaggtgtgggccttcacctacacccagcagatcctgcaggaggagctgtgcctgagcgtcatcaccctcttccctggggcccctgtggtgctggtgctgtgcaagaatggagatgaccggcagcagtggaccaagacaggcagccacatcgagcacatcgccagccacctgtgcctggacacagacatgtttggagatggaacagaaaatggcaaggagatcgtggtgaacccctgtgagagcagcctgatgagccagcactgggacatggtgagcagctag

SEQ ID NO: 215704 - DNA, 1659 bp, Artificial Sequence
  derived and/or modified sequence
atgcggcggctgacccggcggctggtgctgcccgtgttcggcgtgctgtggattacagtgctattgtttttttgggtaacaaaaagaaagctggaggtgcccacagggcccgaggtccagaccccaaaaccatctgacgccgattgggatgacttgtgggatcagtttgacgagcgtagatacctcaacgccaagaaatggcgcgtgggggacgacccttataaactttatgccttcaatcagcgcgagtctgaacgcattagcagcaatcgggccatccccgataccagacatctgagatgcacactgctcgtttactgcacggatcttcccccaactagcatcatcataacgtttcataatgaagcacgttctacactcctccggacgatcaggtcagtgctgaatcgaacgcccacacacttaatccgtgagattatactggttgacgacttctccaatgacccagacgactgtaagcagctgatcaaactgcccaaagtgaaatgcctaaggaataatgagcgccaggggcttgtccgcagcaggatccgcggggctgatattgctcaggggacaaccctcacctttctggatagtcactgcgaggttaatcgcgactggctgcagcccctgctgcatcgggttaaagaggactacacaagggttgtgtgcccagtgatcgatattatcaacctggacacatttacgtacattgagagtgccagtgagctgcgcggtggattcgattggtcgctccacttccagtgggagcaactttcaccagaacagaaagcacgccgactggaccccactgagcccatacggactccaatcatcgccgggggcctttttgttatagacaaggcatggttcgattacctgggtaaatacgacatggatatggacatctggggaggtgaaaacttcgaaatctcttttcgcgtctggatgtgcggaggcagcctcgagattgttccttgctcccgtgtaggacatgttttccgcaaaaagcacccatacgtgttcccggacggcaacgctaatacttacatcaaaaacactaagcgtaccgcggaagtgtggatggatgaatacaaacaatattactacgcagctcgtcccttcgccttagaacggccctttggtaatgtcgagtcacgcctcgacctacgcaaaaatctccggtgtcagtcctttaaatggtatctggaaaacatctatccggaactgagcataccaaaagagtctagcattcagaaggggaatatccggcaacggcagaagtgtctcgagtcacaacgtcagaataatcaggagacccccaacctgaagttaagcccttgcgccaaggtaaaaggggaggacgctaagagccaagtatgggcatttacttatacgcagcaaatcttacaggaagagctatgtctgtccgtaattaccctgttccctggggctccagtggtgctcgtactctgcaaaaatggcgacgacaggcagcagtggaccaagaccggcagccacatcgagcacatagctagccacctgtgccttgacaccgatatgttcggcgatgggactgaaaatggcaaggagatcgtcgtcaacccatgtgaaagctctctgatgagccagcattgggacatggtgagtagttag

SEQ ID NO: 215705 - DNA, 1560 bp, Artificial Sequence
  derived and/or modified sequence
atgcggcggctgacccggcggctggtgctgcccgtgttcggcgtgctatggatcactgtcctattattcttttgggtgactaaacggaaactggaggttcctacaggcccggaagtgcagacgcctaagccaagcgatgccgactgggacgatctgtgggatcagttcgacgaacgcagatacttaaatgccaagaaatggcgcgttggcgacgatccatacaagctgtatgcctttaaccagagagaatctgagcggatcagttcaaatcgggccatcccagacacacgtcatctcagtgtgcttaatcgaacccctacgcacctgataagagagatcatcttggtagatgacttttcaaacgaccctgatgattgcaaacagcttataaaactcccaaaggtcaaatgcctgcgcaataacgaacggcagggtttagtacgatcccgaatccggggagccgatattgcccagggaactactcttacattcttagatagccattgtgaagtgaatcgtgattggttacagcccttgctacatagagtgaaagaagattacactagggttgtgtgtcccgtgattgacattataaacctggatacttttacttacatcgaatcagcctccgaactgcggggcgggttcgattggtctctgcactttcagtgggagcagctctctcctgagcagaaggccagacgactggaccccacagaacccataaggacccctatcatcgccgggggtctcttcgtgatcgataaggcctggtttgactatttagggaaatatgacatggatatggatatatggggcggagaaaacttcgagatcagctttcgcgtatggatgtgcggtgggagcctagagattgtgccctgctcgcgagttgggcatgtatttcgaaagaagcatccatacgttttcccagacgggaacgctaacacgtatattaagaacaccaaaaggactgccgaagtctggatggatgagtacaagcagtactattacgctgcgaggccctttgcccttgaacgtcctttcggtaacgtcgagagccgccttgatctaaggaagaacctgagatgccagtccttcaaatggtaccttgaaaacatatacccggagctatctattcccaaagagagctccatccagaaaggaaatatacggcagagacagaagtgcctggagtctcagcgccagaacaatcaggagacacctaatctgaagttgtctccatgtgcaaaggttaaaggcgaggacgcaaagtcacaggtttgggcatttacatatacacagcagatcttgcaggaggagctgtgtctgtcggtaataaccctgtttccgggggccccagtggtgttagtgctatgcaagaatggtgatgatcggcagcaatggacgaaaacaggaagccacattgagcatattgctagtcatttatgcttagataccgatatgtttggagacggaaccgaaaacgggaaggagatcgtcgtaaacccatgtgagtcaagtttgatgagccagcattgggatatggttagtagctag

SEQ ID NO: 215706 - DNA, 1659 bp, Artificial Sequence
  derived and/or modified sequence
atgaggaggctgaccagaagactggttcttcctgtgttcggagtactgtggatcacagtgctgctgttcttctgggtaactaaacgaaaattagaggtcccgacaggtccagaagttcagacccccaagccaagcgatgcagactgggacgacctttgggatcaattcgatgagagacggtatctgaacgccaaaaaatggcgtgtcggagacgatccctataagctttatgccttcaaccagcgcgaaagtgaacgcatatcctctaaccgggctatccccgacacccgccatctcagatgtacgttgttagtctattgtaccgatctccctccgactagtatcatcatcactttccacaacgaagctagatcaactctcctcagaactataaggagtgtgttgaatcggactccaacacacctcatcagagaaatcattctggttgacgatttttctaacgacccggacgattgcaagcagcttatcaaactgcctaaggtgaagtgtttacgaaacaacgagcgccagggcttggtgcgctcgcgcatccgcggtgccgatattgcccagggcacaaccctcacattcctcgacagccattgcgaggtgaatagggattggcttcaaccgctgctgcaccgggtgaaagaggactacactcgcgtcgtttgtccagtgattgatatcataaacctcgatacttttacatacatcgagtcggcctccgagttgagagggggatttgactggtctctacacttccagtgggagcagctgtctccagagcagaaagcccgtaggctcgaccctactgaaccaatcaggacacctatcatcgccggaggtttatttgtcatagacaaggcgtggtttgactacctcgggaaatacgatatggacatggacatctggggaggtgagaactttgaaatttcgttccgcgtgtggatgtgtggcggatctctggaaattgtcccctgtagcagggtgggacacgtcttccgcaagaaacatccatacgtgttccctgatgggaacgcaaatacttatatcaagaatacaaagcgaaccgctgaagtttggatggatgagtacaaacagtactactatgcagccagacccttcgcactggagaggcctttcggcaacgtggaatcgcgacttgacttaagaaagaatctcaggtgtcagagttttaagtggtatctggagaatatatatccggaactcagcataccaaaagagagcagcattcagaagggtaacattcgccaaagacagaagtgtctggaatcccagcggcagaataaccaagagactccaaatctgaagctgtccccatgcgctaaggtgaaaggtgaagacgccaagagtcaggtatgggctttcacctatactcagcaaatactgcaggaagagttatgcctgagtgtgatcactctctttcccggtgcccctgtggtactagttttgtgcaagaatggcgacgacaggcagcagtggaccaagacaggatcccacatcgagcacattgcctctcatttgtgtctcgacacagacatgtttggggacgggacagaaaatggaaaggagattgtggttaatccctgcgagtcttccctcatgagccagcattgggacatggtgtcttcttag

SEQ ID NO: 215707 - DNA, 1560 bp, Artificial Sequence
  derived and/or modified sequence
atgagaaggctgacacgtcggctcgtgctccctgtttttggcgtcttgtggataacagttctgcttttcttctgggtcaccaagcgaaagctcgaggtacctacgggcccagaagtacaaacgccaaaaccaagtgacgctgattgggacgacctttgggatcagtttgacgagcggagatatctgaacgctaagaagtggagggtgggggacgacccgtacaagctttacgcctttaaccaacgggagtcagagcgcatttcctcaaaccgggcaattcccgacacccggcacctgtcagtgctgaaccgaactccaacccatctcattcgtgagattatccttgtggacgattttagcaatgaccccgacgattgcaagcagctgatcaagctcccaaaagtgaaatgtctaaggaataatgagagacagggactggttcgttcgagaatcagaggggcagatattgcacagggcaccacactgacgttcctggattcccactgcgaagtgaatcgtgactggttgcaacccctgctccaccgagtaaaggaggactacaccagggtggtttgtcccgtcatagacattattaatctcgacacctttacgtatatcgagtctgcctccgagcttcgcggaggatttgactggtctctgcacttccagtgggagcagctttcgcccgaacagaaggcgaggcgtctcgatccaaccgagcctatacggaccccgatcatcgccggaggattgttcgtgattgacaaagcatggttcgactatttaggcaagtatgacatggatatggacatctgggggggtgagaactttgaaatcagttttagggtctggatgtgcggcggaagcctggaaattgtaccctgctccagggtggggcacgtgtttagaaagaagcatccctacgtcttcccagatggcaatgctaacacatacattaagaatactaagcgtaccgcagaagtgtggatggacgagtataaacagtattattacgccgctcggccatttgcgcttgagcggccatttggaaacgttgaatctcgattggatttgcgcaaaaacctccgatgccagtccttcaagtggtatctcgagaatatctaccctgagcttagtattcccaaagagagttcaatccagaagggtaacattaggcaaagacagaaatgtctggagtcccagcggcagaataatcaagaaacacctaacttaaagctgtccccctgtgctaaagttaaaggagaggacgcaaaatcccaggtatgggctttcacctacacccagcaaatactccaagaggaactgtgtctgtctgtcattactttgtttccgggagcacccgtagtcctggtgttatgcaagaacggggatgatcgtcagcagtggaccaaaacagggagccacatcgaacacattgcctctcacttgtgtctggacaccgacatgttcggagacggcaccgagaatggaaaagagatcgtagtgaatccatgcgagtcttccctgatgtcccagcattgggacatggtgtcttcctag

SEQ ID NO: 215708 - DNA, 2733 bp, Artificial Sequence
  derived and/or modified sequence
ggcatcccgagtgcaccgctcccgccccgccccgccttgccccaacccacgatggtctgggagctgcgcccagggcttggcgctggcggccccgcaacagcaccgagcgtttcggtcggcgggcggcggtagcgccccctctcagagccccgctcactcccacctgggctcgctccgagtcggcctgtctgtcgggcccgccctccccgctcactccctccgccctcgtgctcctcccggggtgcttggcacagcctcggattcctccctctcgctgctcgagtcagtttccctatcggcggcagcgggcaaggcggcggcggcggcggcggcagccgcggtggcggcgtggggaacatctcggcagccaccgcgcttctcccgctggagcgggcgtccagcttggctgccctcggtccttccctgccacgtttcgggtcgccctgcaccccccacccaggctcgcttctcttcgaagcgggaagggcgccttgcaggatcctgccgcccctccaaccggatcctgggtctagagctccccagagcgaggcgctcgccaggactcctgccccgccaaccctgaccgccggggggtgcccccgggacgtagcgccgcggagaggaagcggcaaaggggaccatgcggcgcctgactcgtcggctggttctgccagtcttcggggtgctctggatcacggtgctgctgttcttctgggtaaccaagaggaagttggaggtgccgacgggacctgaagtgcagacccctaagccttcggacgctgactgggacgacctgtgggaccagtttgatgagcggcggtatctgaatgccaaaaagtggcgcgttggtgacgacccctataagctgtatgctttcaaccagcgggagagtgagcggatctccagcaatcgggccatcccggacactcgccatctgagatgcacactgctggtgtattgcacggaccttccacccactagcatcatcatcaccttccacaacgaggcccgctccacgctgctcaggaccatccgcagtgtattaaaccgcacccctacgcatctgatccgggaaatcatattagtggatgacttcagcaatgaccctgatgactgtaaacagctcatcaagttgcccaaggtgaaatgcttgcgcaataatgaacggcaaggtctggtccggtcccggattcggggcgctgacatcgcccagggcaccactctgactttcctcgacagccactgtgaggtgaacagggactggctccagcctctgttgcacagggtcaaagaggactacacgcgggtggtgtgccctgtgatcgatatcattaacctggacaccttcacctacatcgagtctgcctcggagctcagaggggggtttgactggagcctccacttccagtgggagcagctctccccagagcagaaggctcggcgcctggaccccacggagcccatcaggactcctatcatagctggagggctcttcgtgatcgacaaagcttggtttgattacctggggaaatatgatatggacatggacatctggggtggggagaactttgaaatctccttccgagtgtggatgtgcgggggcagcctagagatcgtcccctgcagccgagtggggcacgtcttccggaagaagcacccctacgttttccctgatggaaatgccaacacgtatataaagaacaccaagcggacagctgaagtgtggatggatgaatacaagcaatactattacgctgcccggccattcgccctggagaggcccttcgggaatgttgagagcagattggacctgaggaagaatctgcgctgccagagcttcaagtggtacctggagaatatctaccctgaactcagcatccccaaggagtcctccatccagaagggcaatatccgacagagacagaagtgcctggaatctcaaaggcagaacaaccaagaaaccccaaacctaaagttgagcccctgtgccaaggtcaaaggcgaagatgcaaagtcccaggtatgggccttcacatacacccagcagatcctccaggaggagctgtgcctgtcagtcatcaccttgttccctggcgccccagtggttcttgtcctttgcaagaatggagatgaccgacagcaatggaccaaaactggttcccacatcgagcacatagcatcccacctctgcctcgatacagatatgttcggtgatggcaccgagaacggcaaggaaatcgtcgtcaacccatgtgagtcctcactcatgagccagcactgggacatggtgagctcttgaggacccctgccagaagcagcaagggccatggggtggtgcttccctggaccagaacagactggaaactgggcagcaagcagcctgcaaccacctcagacatcctggactgggaggtggaggcagagccccccaggacaggagcaactgtctcagggaggacagaggaaaacatcacaagccaatggggctcaaagacaaatcccacatgttctcaaggccgttaagttccagtcctggccagtcattccctgattggtatctggagacagaaacctaatgggaagtgtttattgttccttttcctacaaaggaagcagtctctggaggccagaaagaaaagccttctttttcactaggccaggactacattgagagatgaagaatggaggttgtttccaaaagaaataaagagaaacttagaagttgtctctgga

SEQ ID NO: 215709 - DNA, 1996 bp, Artificial Sequence
  derived and/or modified sequence
aaaggggaccatgcggcgcctgactcgtcggctggttctgccagtcttcggggtgctctggatcacggtgctgctgttcttctgggtaaccaagaggaagttggaggtgccgacgggacctgaagtgcagacccctaagccttcggacgctgactgggacgacctgtgggaccagtttgatgagcggcggtatctgaatgccaaaaagtggcgcgttggtgacgacccctataagctgtatgctttcaaccagcgggagagtgagcggatctccagcaatcgggccatcccggacactcgccatctgagtgtattaaaccgcacccctacgcatctgatccgggaaatcatattagtggatgacttcagcaatgaccctgatgactgtaaacagctcatcaagttgcccaaggtgaaatgcttgcgcaataatgaacggcaaggtctggtccggtcccggattcggggcgctgacatcgcccagggcaccactctgactttcctcgacagccactgtgaggtgaacagggactggctccagcctctgttgcacagggtcaaagaggactacacgcgggtggtgtgccctgtgatcgatatcattaacctggacaccttcacctacatcgagtctgcctcggagctcagaggggggtttgactggagcctccacttccagtgggagcagctctccccagagcagaaggctcggcgcctggaccccacggagcccatcaggactcctatcatagctggagggctcttcgtgatcgacaaagcttggtttgattacctggggaaatatgatatggacatggacatctggggtggggagaactttgaaatctccttccgagtgtggatgtgcgggggcagcctagagatcgtcccctgcagccgagtggggcacgtcttccggaagaagcacccctacgttttccctgatggaaatgccaacacgtatataaagaacaccaagcggacagctgaagtgtggatggatgaatacaagcaatactattacgctgcccggccattcgccctggagaggcccttcgggaatgttgagagcagattggacctgaggaagaatctgcgctgccagagcttcaagtggtacctggagaatatctaccctgaactcagcatccccaaggagtcctccatccagaagggcaatatccgacagagacagaagtgcctggaatctcaaaggcagaacaaccaagaaaccccaaacctaaagttgagcccctgtgccaaggtcaaaggcgaagatgcaaagtcccaggtatgggccttcacatacacccagcagatcctccaggaggagctgtgcctgtcagtcatcaccttgttccctggcgccccagtggttcttgtcctttgcaagaatggagatgaccgacagcaatggaccaaaactggttcccacatcgagcacatagcatcccacctctgcctcgatacagatatgttcggtgatggcaccgagaacggcaaggaaatcgtcgtcaacccatgtgagtcctcactcatgagccagcactgggacatggtgagctcttgaggacccctgccagaagcagcaagggccatggggtggtgcttccctggaccagaacagactggaaactgggcagcaagcagcctgcaaccacctcagacatcctggactgggaggtggaggcagagccccccaggacaggagcaactgtctcagggaggacagaggaaaacatcacaagccaatggggctcaaagacaaatcccacatgttctcaaggccgttaagttccagtcctggccagtcattccctgattggtatctggagacagaaacctaatgggaagtgtttattgttccttttcctacaaaggaagcagtctctggaggccagaaagaaaagccttctttttcactaggccaggactacattgagagatgaagaatggaggttgtttccaaaagaaataaagagaaacttagaagttg

SEQ ID NO: 215710 - protein, 441 aa, Artificial Sequence
  derived and/or modified sequence
MAVVPASLSGQDVGSFAYLTIKDRIPQILTKVIDTLHRHKSEFFEKHGEEGVEAEKKAISLLSKLRNELQTDKPFIPLVEKFVDTDIWNQYLEYQQSLLNESDGKSRWFYSPWLLVECYMYRRIHEAIIQSPPIDYFDVFKESKEQNFYGSQESIIALCTHLQQLIRTIEDLDENQLKDEFFKLLQISLWGNKCDLSLSGGESSSQNTNVLNSLEDLKPFILLNDMEHLWSLLSNCKKTREKASATRVYIVLDNSGFELVTDLILADFLLSSELATEVHFYGKTIPWFVSDTTIHDFNWLIEQVKHSNHKWMSKCGADWEEYIKMGKWVYHNHIFWTLPHEYCAMPQVAPDLYAELQKAHLILFKGDLNYRKLTGDRKWEFSVPFHQALNGFHPAPLCTIRTLKAEIQVGLQPGQGEQLLASEPSWWTTGKYGIFQYDGPL

SEQ ID NO: 215711 - protein, 322 aa, Artificial Sequence
  derived and/or modified sequence
MYRRIHEAIIQSPPIDYFDVFKESKEQNFYGSQESIIALCTHLQQLIRTIEDLDENQLKDEFFKLLQISLWGNKCDLSLSGGESSSQNTNVLNSLEDLKPFILLNDMEHLWSLLSNCKKTREKASATRVYIVLDNSGFELVTDLILADFLLSSELATEVHFYGKTIPWFVSDTTIHDFNWLIEQVKHSNHKWMSKCGADWEEYIKMGKWVYHNHIFWTLPHEYCAMPQVAPDLYAELQKAHLILFKGDLNYRKLTGDRKWEFSVPFHQALNGFHPAPLCTIRTLKAEIQVGLQPGQGEQLLASEPSWWTTGKYGIFQYDGPL

SEQ ID NO: 215712 - DNA, 2576 bp, Artificial Sequence
  derived and/or modified sequence
gcttccggctttcgctcgcttccatatccgctcctctagtcgccctccgctggccccgccttcgtccccggaagattgggtcttctggcgagccactgtttgccgtttgatcgggcaccaaataaagtttctttattcaaaagcactttttttttaaagccacaccacccccattctcagctcctccttcgcggcggtaccgcctctgtttctgcggcgattgaacagccgagctttgcggccgggatcgcggaaagtgatggctgtcgtcccggcgtctctctcaggacaggacgtgggatcatttgcatatcttacaattaaagacagaataccacagatcttaactaaggttattgatacattgcatcgacataaaagtgaattttttgagaaacacggagaggaaggcgtggaagctgaaaagaaagctatctctctcctttctaaattacggaatgaattgcaaacagataaaccatttatccccttggttgagaaatttgttgatactgatatatggaatcagtacctagaatatcaacagagtcttttaaatgaaagtgatggaaaatcaagatggttctactcaccgtggttgttggtagaatgttacatgtatcgaagaattcatgaagcaattatccagagtccaccaatcgattactttgatgtatttaaagaatcaaaagagcaaaatttctatgggtcacaggaatccatcattgctttatgtactcacctgcaacaattgataagaactattgaagacctagatgaaaatcagctgaaagatgagttttttaaacttctgcagatttcactgtggggaaataagtgtgatctgtctctctcaggtggagaaagtagttctcagaataccaatgtactaaattcattggaagacctaaaacctttcattttattgaatgatatggaacatctttggtcattgcttagcaattgcaagaaaacaagagaaaaagcttctgctactagagtgtatattgttctcgataattctggatttgagcttgttacagatttaatattagccgacttcttgttgtcctctgaactggctactgaggttcatttttatggaaaaacaattccatggtttgtttctgatactactatacatgattttaattggttaattgaacaggtaaaacacagtaatcataagtggatgtccaagtgtggggctgactgggaagagtatattaaaatgggtaaatgggtttaccacaatcatatattttggactctgcctcatgagtactgtgcaatgcctcaggttgcacctgacttatatgctgaactacagaaggcacatttaattttattcaagggtgatttgaattacaggaagttgacaggtgacagaaaatgggagttttctgttccatttcatcaggctctgaatggcttccatcctgcaccactctgtaccataagaacattaaaagctgaaattcaggttggtctgcagcctgggcaaggggaacagctcctggcctctgagcccagctggtggaccactggaaaatatggaatatttcagtacgatggtcccctttgacttgatttaggagctctcagttgcatagaaagatctggtgagcaccttttcatccccagaaaaggagcacgtgaattgagtcgcctggcggctctgtacgcgctcagggaagcttagcttcttggtgcccatctacgtgcactggatgatttttcttttgaacattttgccccactacactgttttggggatagctgggttaagcaagttaaagatatttacatttatattggaattttagcaactttttttcaggttaaatatataatttcaagtgcttttaatgaacttatttttaattggctagggagcaaaaaataagtgagttctgcttttagttagttaaccttgttcttttcttaaatagtacactgcatggtatttaatattccaggaagcatgggattttattttgcttgattttgggcacatgaaataatagctctaggaaaatgcgcatcttaatgactctttgtaaagagaggcatttcttacaactgtgatgtttgcttacataaaagttacctcataagttaattctaacttttattcttgaattttatttcatttcaatagcttgtttcatttgcacgcctttgtattttgattgacctgtagaatggatgttaggaaactcaaaattgaacacagtgaaacaaatggtatttgaagaaatgtaatatcttttatattctatttatgatatccataatcaaatgagattattttaccacataaatgttttaaatatcagatttttagtttgcagttttaggaaaatgctttagatagaaaaggttcttatgcattgaatttggagtactaccaacaatgaatgaatttattttttatattcttacacattttattggtcattgtcacagatagtaaatactaaaaatttcaggtcagtttgttttgaaactgaaattggaaataaatctggaaatgttttgttgcactaaaataataaaatgaattgtactgaaaa

SEQ ID NO: 215713 - DNA, 1439 bp, Artificial Sequence
  derived and/or modified sequence
tccttcgcggcggtaccgcctctgtttctgcggcgattgaacagccgagctttgcggccgggatcgcggaaagtgatggctgtcgtcccggcgtctctctcaggacaggacgtggggaaggcgtggaagctgaaaagaaagctatctctctcctttctaaattacggaatgaattgcaaacagataaaccatttatccccttggttgagaaatttgttgatactgatatatggaatcagtacctagaatatcaacagagtcttttaaatgaaagtgatggaaaatcaagatggttctactcaccgtggttgttggtagaatgttacatgtatcgaagaattcatgaagcaattatccagagtccaccaatcgattactttgatgtatttaaagaatcaaaagagcaaaatttctatgggtcacaggaatccatcattgctttatgtactcacctgcaacaattgataagaactattgaagacctagatgaaaatcagctgaaagatgagttttttaaacttctgcagatttcactgtggggaaataagtgtgatctgtctctctcaggtggagaaagtagttctcagaataccaatgtactaaattcattggaagacctaaaacctttcattttattgaatgatatggaacatctttggtcattgcttagcaattgcaagaaaacaagagaaaaagcttctgctactagagtgtatattgttctcgataattctggatttgagcttgttacagatttaatattagccgacttcttgttgtcctctgaactggctactgaggttcatttttatggaaaaacaattccatggtttgtttctgatactactatacatgattttaattggttaattgaacaggtaaaacacagtaatcataagtggatgtccaagtgtggggctgactgggaagagtatattaaaatgggtaaatgggtttaccacaatcatatattttggactctgcctcatgagtactgtgcaatgcctcaggttgcacctgacttatatgctgaactacagaaggcacatttaattttattcaagggtgatttgaattacaggaagttgacaggtgacagaaaatgggagttttctgttccatttcatcaggctctgaatggcttccatcctgcaccactctgtaccataagaacattaaaagctgaaattcaggttggtctgcagcctgggcaaggggaacagctcctggcctctgagcccagctggtggaccactggaaaatatggaatatttcagtacgatggtcccctttgacttgatttaggagctctcagttgcatagaaagatctggtgagcaccttttcatccccagaaaaggagcacgtgaattgagtcgcctggcggctctgtacgcgctcagggaagcttagcttcttggtgcccatctacgtgcactg

SEQ ID NO: 215714 - DNA, 1326 bp, Artificial Sequence
  derived and/or modified sequence
atggccgtggtgcccgccagcctgagcggccaggacgtgggcagcttcgcctacctgaccatcaaggacagaatcccccagatcctgaccaaggtgatcgacaccctgcacagacacaagagcgagttcttcgagaagcacggcgaggagggcgtggaggccgagaagaaggccatcagcctgctgagcaagctgagaaacgagctgcagaccgacaagcccttcatccccctggtggagaagttcgtggacaccgacatctggaaccagtacctggagtaccagcagagcctgctgaacgagagcgacggcaagagcagatggttctacagcccctggctgctggtggagtgctacatgtacagaagaatccacgaggccatcatccagagcccccccatcgactacttcgacgtgttcaaggagagcaaggagcagaacttctacggcagccaggagagcatcatcgccctgtgcacccacctgcagcagctgatcagaaccatcgaggacctggacgagaaccagctgaaggacgagttcttcaagctgctgcagatcagcctgtggggcaacaagtgcgacctgagcctgagcggcggcgagagcagcagccagaacaccaacgtgctgaacagcctggaggacctgaagcccttcatcctgctgaacgacatggagcacctgtggagcctgctgagcaactgcaagaagaccagagagaaggccagcgccaccagagtgtacatcgtgctggacaacagcggcttcgagctggtgaccgacctgatcctggccgacttcctgctgagcagcgagctggccaccgaggtgcacttctacggcaagaccatcccctggttcgtgagcgacaccaccatccacgacttcaactggctgatcgagcaggtgaagcacagcaaccacaagtggatgagcaagtgcggcgccgactgggaggagtacatcaagatgggcaagtgggtgtaccacaaccacatcttctggaccctgccccacgagtactgcgccatgccccaggtggcccccgacctgtacgccgagctgcagaaggcccacctgatcctgttcaagggcgacctgaactacagaaagctgaccggcgacagaaagtgggagttcagcgtgcccttccaccaggccctgaacggcttccaccccgcccccctgtgcaccatcagaaccctgaaggccgagatccaggtgggcctgcagcccggccagggcgagcagctgctggccagcgagcccagctggtggaccaccggcaagtacggcatcttccagtacgacggccccctgtag

SEQ ID NO: 215715 - DNA, 1326 bp, Artificial Sequence
  derived and/or modified sequence
atggccgtggtgcccgcaagtctgagcggccaggatgttggaagcttcgcttacctgaccattaaagacagaatcccacagatcttgacaaaagttatcgataccctccaccgtcataaaagcgagtttttcgagaaacacggtgaagagggcgtagaagctgaaaaaaaagcaatctcattgctttctaagcttcgaaatgagttgcagactgacaaaccctttatcccgctggtcgaaaagttcgtggatacagacatatggaaccagtacctcgagtatcaacagtcacttctgaacgaaagcgatggaaagtccaggtggttctactctccttggctcctggttgaatgttacatgtaccgcagaatccatgaagcgattattcagagcccgccgatagattactttgacgtgtttaaagagagcaaagagcaaaacttctacggaagtcaggagtccataatagctctttgcacacacttgcagcagctcattaggaccatagaggaccttgatgagaaccagctcaaggatgagttcttcaagctactgcaaatttccctatggggcaacaagtgtgacttgagccttagtgggggggaatcttctagccagaatacaaacgtgctcaattcactggaagacctgaagcccttcattctgttgaatgacatggaacatttgtggtctctgctgagcaattgcaaaaagactcgagagaaagcaagcgccacccgtgtttacattgtcctggataattctggcttcgaactggttaccgacctgatcttagccgactttctgctatctagtgagctggcaacggaagttcacttctacgggaaaactatcccatggttcgtgtcagataccacaatacacgattttaattggctaatcgaacaggttaaacattccaatcacaaatggatgagcaaatgcggcgcagattgggaggagtacatcaaaatgggaaagtgggtataccataaccacatcttttggacccttccacatgaatactgcgctatgccacaagttgctcccgatctatacgccgaactccaaaaggctcatctcattctgtttaaaggcgacttgaattatcggaaactgacaggagacaggaagtgggaattctcggttcctttccaccaggccttgaatggcttccatcctgcgcctttatgtacgatccggaccctgaaagcggagatccaggtaggacttcaacccggccagggcgagcagttgctggcctccgagccatcctggtggaccacagggaagtacgggattttccagtatgacggtccactatag

SEQ ID NO: 215716 - DNA, 1326 bp, Artificial Sequence
  derived and/or modified sequence
atggctgtggtgcctgccagcctgagcggccaggatgtgggcagctttgcctacctgaccatcaaggaccgcatcccccagatcctgaccaaggtgattgacaccctgcaccgccacaagtctgagttctttgagaagcatggagaggagggcgtggaggccgagaagaaggccatcagcctgctgagcaagctgagaaatgagctgcagacagacaagcccttcatccccctggtggagaagtttgtggacacagacatctggaaccagtacctggagtaccagcagagcctgctgaatgaaagtgatggcaagagccgctggttctacagcccctggctgctggtggagtgctacatgtaccgccgcatccacgaggccatcatccagagcccccccatcgactactttgatgtgttcaaggagagcaaggagcagaacttctacggcagccaggagagcatcatcgccctgtgcacccacctgcagcagctgatccgcaccatcgaggacctggatgagaaccagctgaaggatgagttcttcaagctgctgcagatcagcctgtggggcaacaagtgtgacctgagcctgtctggaggagagagcagcagccagaacaccaacgtgctgaacagcctggaggacctgaagcccttcatcctgctgaatgacatggagcacctgtggagcctgctgagcaactgcaagaagacccgggagaaggccagcgccaccagggtgtacatcgtgctggacaacagcggctttgagctggtgacagacctgatcctggccgacttcctgctgagcagcgagctggccacagaggtgcacttctacggcaagaccatcccctggtttgtgtctgacaccaccatccatgacttcaactggctgattgagcaggtgaagcacagcaaccacaagtggatgagcaaatgtggggctgactgggaggagtacatcaagatgggcaagtgggtgtaccacaaccacatcttctggaccctgccccatgagtactgtgccatgccccaggtggccccagacctgtatgcagagctgcagaaggcccacctgatcctcttcaagggggacctgaactacaggaagctgaccggggacaggaagtgggagttctctgtgcccttccaccaggccctgaatggcttccacccagcccccctgtgcaccatccgcaccctgaaggccgagatccaggtgggcctgcagcccggccagggcgagcagctgctggccagcgagcccagctggtggaccaccgggaagtatggcatcttccagtatgatggccccctgtag

SEQ ID NO: 215717 - DNA, 1326 bp, Artificial Sequence
  derived and/or modified sequence
atggccgtggtgcccgccagcctgagcggccaggacgtgggcagctttgcctacttgactattaaggaccgcatcccccagattttgaccaaggtgattgatacgctgcaccgacataagtccgaattctttgagaaacacggtgaggagggcgttgaagccgaaaagaaagctatttcactgctttccaaattgcgcaatgagctccagaccgacaagcctttcatacctttggtcgaaaagttcgtggacacagacatttggaaccagtaccttgagtatcaacagtccctcctgaacgaaagcgatgggaagtcacggtggttttacagcccatggttattagtagagtgctacatgtacaggcgtattcatgaggctatcatacagtcaccgccaatcgactacttcgacgtatttaaggagtccaaagaacaaaatttctacggatcccaggaaagcatcatcgcattgtgcactcatctacagcagctgatccgaaccattgaagatctggatgagaatcagttaaaagacgagtttttcaagctcttgcagatcagtctctggggtaataagtgcgatctgagcctgagcggaggagaatccagtagtcagaacaccaatgttcttaacagcctggaggacctaaaaccattcatcttattaaacgatatggagcacctgtggtctctgctgtctaactgcaagaagactcgggagaaggcctcagccacacgtgtgtatatagttctggataactccggttttgaactggtaactgatctaatattagcagacttcctcttaagctcagagttagcgaccgaagtgcatttctacggcaaaacaattccatggtttgtgtccgacaccacgatacacgacttcaattggctcatcgaacaggtaaaacatagtaatcacaagtggatgagtaagtgcggagccgactgggaggagtatatcaagatggggaaatgggtctaccataaccatatcttctggacacttccacatgagtattgtgccatgccccaggtggcccccgatctctacgccgagctgcagaaagcacacctcatccttttcaaaggagacctaaattaccgtaagctgaccggtgatagaaaatgggagttttcagtccccttccatcaggctctaaacgggtttcatccagcccctttgtgcaccatcagaactctcaaggccgaaattcaagtggggctgcagccaggccaaggggaacagcttctcgctagcgaacctagttggtggacgactggcaagtatgggatcttccagtatgacggccctctgtag

SEQ ID NO: 215718 - DNA, 1326 bp, Artificial Sequence
  derived and/or modified sequence
atggctgttgtccccgctagcctgtccggacaggacgtgggcagctttgcctacctgaccatcaaagacaggatcccccagatcctgactaaggtgatcgacacactgcatcgtcataaatccgaatttttcgaaaagcatggggaggaaggcgttgaggccgagaagaaagccatctccctgctgtccaaactgaggaacgagcttcaaaccgataagcctttcataccactggtagagaaatttgtggatacagacatctggaatcagtatctggagtaccagcagtcacttctgaatgagtcagatggcaagtcacgatggttttacagcccttggcttctcgttgagtgttatatgtatagacgtatacatgaagcgattatccagtctcccccaatagactattttgatgtcttcaaagaaagcaaggagcagaacttctacggctcgcaggaaagcattatcgcactgtgcacccacttgcagcagctaattaggacaattgaggacttagacgagaatcaattgaaggatgagttcttcaagctgctgcagatcagcttatggggaaataagtgtgaccttagtctctctggcggagagtcctcatcccagaataccaacgtgctaaactccctggaagacctgaagcccttcatcttgttaaatgacatggagcacctttggtcactgctaagcaactgtaaaaagactcgggagaaggcgtccgcgactagggtgtatatcgtgctggacaattccggatttgagctggtcactgatctgatcctggccgatttcctgctttcttcggaacttgccacagaagttcacttttacggcaagactatcccttggtttgtctctgacaccacaatacacgacttcaactggctcatcgagcaggtcaaacattccaatcacaagtggatgtctaaatgcggcgcagactgggaagagtacatcaagatgggtaagtgggtgtaccacaatcatatcttttggaccctgccacacgagtattgcgccatgcctcaagttgccccagacctgtatgccgaactgcagaaggctcacctgatcctattcaaaggagaccttaattacaggaaactcacgggagaccgaaagtgggaattcagtgtgccttttcaccaggcactgaacggctttcaccctgcccctctatgtacaatacgaactctgaaggctgaaatccaggtggggttacagccgggacagggggagcagctgcttgcttcagagcctagctggtggacaaccggaaaatacggtatattccaatacgatggacccctatag

SEQ ID NO: 215719 - protein, 568 aa, Artificial Sequence
  derived and/or modified sequence
MVLLHWCLLWLLFPLSSRTQKLPTRDEELFQMQIRDKAFFHDSSVIPDGAEISSYLFRDTPKRYFFVVEEDNTPLSVTVTPCDAPLEWKLSLQELPEDRSGEGSGDLEPLEQQKQQIINEEGTELFSYKGNDVEYFISSSSPSGLYQLDLLSTEKDTHFKVYATTTPESDQPYPELPYDPRVDVTSLGRTTVTLAWKPSPTASLLKQPIQYCVVINKEHNFKSLCAVEAKLSADDAFMMAPKPGLDFSPFDFAHFGFPSDNSGKERSFQAKPSPKLGRHVYSRPKVDIQKICIGNKNIFTVSDLKPDTQYYFDVFVVNINSNMSTAYVGTFARTKEEAKQKTVELKDGKITDVFVKRKGAKFLRFAPVSSHQKVTFFIHSCLDAVQIQVRRDGKLLLSQNVEGIQQFQLRGKPKAKYLVRLKGNKKGASMLKILATTRPTKQSFPSLPEDTRIKAFDKLRTCSSATVAWLGTQERNKFCIYKKEVDDNYNEDQKKREQNQCLGPDIRKKSEKVLCKYFHSQNLQKAVTTETIKGLQPGKSYLLDVYVIGHGGHSVKYQSKVVKTRKFC

SEQ ID NO: 215720 - protein, 116 aa, Artificial Sequence
  derived and/or modified sequence
MVLLHWCLLWLLFPLSSRTQKLPTRDEELFQMQIRDKAFFHDSSVIPDGAEISSYLFRDTPKRYFFVVEEDNTPLSVTVTPCDAPLEWKLSLQELPEDRSGEGSGDLEPLEQQKQQ

SEQ ID NO: 215721 - protein, 145 aa, Artificial Sequence
  derived and/or modified sequence
MVLLHWCLLWLLFPLSSRTQKLPTRDEELFQMQIRDKAFFHDSSVIPDGAEISSYLFRDTPKRYFFVVEEDNTPLSVTVTPCDAPLEWKLSLQELPEDRSGEGSGDLEPLEQQKQQIINEEGTELFSYKGNDVEYFISSSSPSGL

SEQ ID NO: 215722 - DNA, 1707 bp, Artificial Sequence
  derived and/or modified sequence
atggtgttgcttcactggtgtctgctgtggctgctcttccccttgagctcaaggactcagaaattacccacaagagacgaggagctgtttcaaatgcaaatccgggacaaggctttcttccacgattctagtgtcattccagacggagccgagattagcagctaccttttccgggatactcctaaaagatacttcttcgtcgtagaagaagataacaccccactctccgtgacggtgactccttgcgatgctccgctggagtggaagctttccctgcaggagctgcccgaagataggtccggcgagggatcaggcgatctggagccgctagagcagcaaaaacagcagatcattaacgaagagggcacagagttattttcctacaaagggaatgacgttgaatatttcataagttcatcgagccctagtgggctgtaccagttggacctcctgtctacagaaaaagatactcacttcaaggtgtacgccacaacaactccagaatccgaccagccataccccgagctcccatatgacccgcgtgtcgacgttacctccctcggcagaacgaccgttacactggcctggaaaccttccccaaccgcctcgctgttgaaacagcctatccagtactgtgttgtgattaacaaggaacacaactttaagagcctctgtgcagtagaggctaaactgtccgcggacgatgcattcatgatggccccaaagcctgggctcgactttagcccttttgacttcgcccatttcggtttcccatccgacaatagcggtaaagagagatcgttccaggccaaaccatcccctaaactcggcaggcacgtatatagccggccaaaagtcgacatacaaaaaatttgtatcggcaataagaacatcttcactgttagtgatctgaagcctgatacacagtactactttgatgtattcgtagtcaacataaacagtaacatgtcaacagcctacgtgggcaccttcgctcgtactaaagaggaggccaaacagaaaactgtggaactgaaagatgggaagattacagacgttttcgtgaaacgaaagggcgcaaagttcttacggttcgccccagtgagcagtcatcagaaggtaaccttcttcatccattcatgcctcgacgccgtccagatccaggtcagaagagacggcaaactgctgttgtctcaaaacgtggaaggcatccaacagttccaactgcgtggtaaacctaaagcgaaatacttagtgagattgaagggcaacaaaaagggagcttcaatgctgaaaatcctggcgactacaagaccaacaaagcagtcattcccgtcactgcccgaggacaccagaataaaagccttcgataagctacgcacttgctccagcgccacggtggcctggctgggtacgcaggagcgaaataagttttgcatctataaaaaagaggttgatgataattacaatgaggaccagaaaaaacgcgagcagaaccagtgccttggacctgatataaggaagaagagcgagaaagtgctctgcaaatatttccattcacagaatcttcagaaggccgtgaccaccgaaaccatcaaaggcctgcagcctggtaagagttacttgctcgacgtatacgtcataggccacggcggacacagcgtgaagtaccagtcgaaggtggtgaagacacgtaagttttgctag

SEQ ID NO: 215723 - DNA, 351 bp, Artificial Sequence
  derived and/or modified sequence
atggtacttctgcattggtgtcttctctggctactgtttccgttgtcgtcccggacccaaaaactccccactagggacgaagagttatttcagatgcagatccgggacaaggccttctttcatgatagctcagtgatccctgacggcgctgagattagcagctatctcttccgagatacaccaaaacgctatttctttgttgtcgaggaagacaataccccacttagcgtgactgttaccccgtgtgatgcacctcttgagtggaaactgagcttgcaggagttaccggaagaccggtccggcgagggcagcggtgacttggagcccctggaacagcagaagcagcaatag

SEQ ID NO: 215724 - DNA, 438 bp, Artificial Sequence
  derived and/or modified sequence
atggtgctgctgcactggtgtttgctgtggctgctgtttcccctcagtagtcggacgcagaagctccctactcgggatgaggaactgtttcagatgcagatccgagacaaggctttcttccacgatagcagtgtgattccagatggtgctgaaatctcatcatacttattccgtgacaccccgaaacgatactttttcgttgttgaggaggataatacccctttgtcagttactgtaaccccttgcgatgccccactggagtggaaactctcccttcaagagttgcctgaggacagatctggggagggttctggtgatctcgaaccccttgaacaacagaaacagcagattataaacgaggagggtacagagctgttcagttacaaggggaacgatgttgaatacttcatttccagttcatccccatcaggcttgtag

SEQ ID NO: 215725 - DNA, 1707 bp, Artificial Sequence
  derived and/or modified sequence
atggtcctgctgcattggtgtctcttgtggctgctgtttcccctctcttcccggacacagaaacttcctactagggacgaagagttgtttcagatgcagattagagacaaggcatttttccacgattctagcgtgattcccgatggggccgaaatctcaagttacctgtttagggacaccccgaagaggtatttcttcgtggtcgaggaggacaacactcccctatctgtaactgtgactccctgtgacgccccacttgaatggaaactatcactccaagagctgcctgaagatagatccggtgagggcagtggcgatctggaaccccttgaacagcagaagcagcagattattaatgaggagggtacagaactatttagttacaagggcaatgacgtggaatacttcatctcctcctcatcccccagtgggctctaccagctggacttactgtctaccgaaaaagatacgcacttcaaggtgtacgccaccaccacaccagagagcgaccaaccatacccagaactgccatacgatccaagagtagacgttactagtctgggaagaacaacggttacactcgcctggaaaccttcacccaccgcctctctgctgaaacagccaatccagtattgcgttgtcatcaataaggagcataattttaaaagcttgtgcgcagttgaagccaagttgagtgccgatgatgctttcatgatggctccaaagcccggactggatttttcccccttcgacttcgcccacttcggcttcccctctgataattctggtaaagagcgttcgttccaagcaaagccaagccccaagctaggtagacacgtgtattcaaggccaaaagtggatatccagaagatctgcataggcaacaagaatattttcaccgtatctgatcttaagcccgatactcaatattacttcgacgtcttcgttgtgaatatcaactctaacatgtcgacagcttatgtgggaactttcgcccgaactaaagaggaggccaaacagaagacagtcgagctgaaggatggaaaaataacggatgtatttgttaagcgcaagggtgctaaattcctgcggttcgcacctgtctcctcacaccagaaggtcaccttttttattcattcttgtttggatgcagtgcaaatccaggtgaggagggatggcaagctgttactcagccagaacgtggaaggcatacagcaattccaactgagaggcaaacccaaggccaaatacttagtgagactaaaggggaataagaagggcgcctcaatgcttaagattctggctaccaccaggcctacaaaacaaagtttcccttcactgcccgaggataccagaatcaaagcattcgacaagctccgcacttgcagttcagccacggttgcatggcttggcactcaggaaagaaacaagttctgcatctacaaaaaagaggtggacgacaattacaacgaggatcagaaaaagagagaacagaatcagtgcctcggccccgacatccgcaaaaaaagcgaaaaggtgttatgcaagtacttccatagccagaacctgcaaaaggcggtcactaccgaaactataaaaggcctacagccaggcaaaagttacctgctggatgtgtacgtcattggccacgggggacattccgtgaagtaccagagtaaggtggtaaagaccagaaagttttgttag

SEQ ID NO: 215726 - DNA, 351 bp, Artificial Sequence
  derived and/or modified sequence
atggttctgctgcattggtgcctactctggctgctgttcccactttcatcacgtacgcagaagcttccaacacgagacgaagaactgtttcaaatgcagatcagagataaggccttctttcacgactctagcgtcatccccgacggcgccgaaatctcctcttacctgtttagggacacacctaaaagatacttcttcgtagtggaagaggacaatacacctttgtcagttaccgtgacaccctgcgatgcccccttggaatggaaattatctctgcaggagctgccagaggatcgttcgggagaaggctcaggagatcttgaacctctggaacaacagaagcaacagtag

SEQ ID NO: 215727 - DNA, 438 bp, Artificial Sequence
  derived and/or modified sequence
atggtactattgcactggtgcctcctgtggttactgttccctttgtcgagccgcacacagaagttacctactagagatgaagaactgttccagatgcagatcagagataaggcgtttttccacgactcaagcgttatcccggacggagctgagatcagctcttatctgttccgagatacacccaagcggtacttcttcgtcgttgaagaggataacacaccactatcggtgactgtcaccccctgcgatgcccccctggaatggaaactgagtctgcaagaacttcccgaggacagatctggcgaaggaagcggtgacttagaacccctggaacaacagaaacagcagatcattaacgaagaaggaactgaacttttcagctataaaggtaatgacgtcgagtatttcatttccagttcatctccttctggtttgtag

SEQ ID NO: 215728 - DNA, 1707 bp, Artificial Sequence
  derived and/or modified sequence
atggttctgctgcactggtgcctcctgtggttactgtttccactctcctctcgaacccagaaactgccaacccgtgatgaggaattatttcagatgcagatcagagacaaggccttttttcatgatagttcagtcattcctgacggcgcggaaattagttcatacctctttagagacacacccaagagatatttttttgttgtggaggaagataacactccactgagcgtgacagtaacaccctgcgatgcccccctggagtggaaactctctctccaagaactccccgaggacagaagcggcgaggggtcgggcgacctggaacctctcgaacagcaaaagcagcagataattaatgaggaaggtactgaactgttttcttataaagggaacgacgtggaatatttcatctcctccagctcccctagtgggctgtaccaattggacctgctgagcactgaaaaggatacccacttcaaagtatatgctacaaccacgcctgagagcgaccaaccctaccccgaactgccctatgaccctcgtgtggacgtgacctctctaggacgaacaactgtgacactggcatggaaaccctctcccaccgcctccctgctgaagcagcccatacagtactgtgtcgtcatcaataaagaacacaatttcaaatcattatgtgctgttgaagcaaagttgagcgccgatgatgcctttatgatggcaccaaagcccggactggatttttctccatttgatttcgcccacttcgggttcccgagcgacaactccggcaaagagaggtcctttcaagccaagcccagccccaaattaggccgccacgtgtactcccgtcctaaggtagatattcagaagatttgtattggaaacaaaaatatattcaccgtgagtgaccttaagcctgacactcagtattatttcgatgtcttcgttgtcaacattaattctaatatgagcaccgcctacgtagggactttcgcacgaacaaaagaagaagctaaacagaaaactgtcgaacttaaggacggaaaaatcaccgacgtgttcgtgaagcggaaaggggcaaaattcttaaggttcgcacctgtatcatcccaccagaaagttactttttttatccattcctgcctcgatgcagtgcaaatacaagttagaagggatggaaagctactgctgagtcagaatgtggaaggcatacagcaattccaactgagaggcaaacccaaggccaaatacttagtgagactaaaggggaataagaagggcgcctcaatgcttaagattctggctaccaccaggcctacaaaacaaagtttcccttcactgcccgaggataccagaatcaaagcattcgacaagctccgcacttgcagttcagccacggttgcatggcttggcactcaggaaagaaacaagttctgcatctacaaaaaagaggtggacgacaattacaacgaggatcagaaaaagagagaacagaatcagtgtctcgggcctgatattcgtaaaaaaagtgagaaagttctctgcaagtacttccattctcaaaatcttcaaaaagcagttactacagagaccatcaagggacttcaaccaggcaagtcatatcttctggacgtgtatgtcatcgggcacggggggcacagcgtgaagtatcagtcaaaggtcgtgaagacacgcaagttttgctag

SEQ ID NO: 215729 - DNA, 351 bp, Artificial Sequence
  derived and/or modified sequence
atggtgctactacactggtgtctcctttggttgttgtttcctctgtctagcagaacacagaaactcccaacgagggatgaggaattgtttcaaatgcagatcagagataaggccttcttccacgatagttccgtgatccctgacggcgccgagatttcctcctacctgttccgggacactccaaaaagatattttttcgtcgtagaggaggacaatacacccctgagcgtgaccgttaccccctgcgatgcccctctggaatggaaacttagcctgcaagagctacctgaagacagatccggtgaaggcagtggagatctggaacccttggagcagcagaaacagcaatag

SEQ ID NO: 215730 - DNA, 438 bp, Artificial Sequence
  derived and/or modified sequence
atggtactactgcattggtgtctgttatggctactctttccactatcgagtcgaacccagaaattgcctactcgagatgaggaactctttcaaatgcagatacgagacaaagcctttttccacgactctagcgtcatccctgacggggccgagatctcgagctatctcttcagagacacaccgaagcgctatttctttgtggtcgaagaggataatacccccctgagcgtgacggtcacaccatgcgatgccccgcttgaatggaagctgagcctgcaggagctgccagaggatagatctggcgagggaagtggggacctagagcctctagagcagcagaagcaacaaataatcaacgaagaaggaaccgagctcttctcctataaaggtaatgatgtcgaatactttattagttcatccagtccaagcggcctgtag

SEQ ID NO: 215731 - DNA, 560 bp, Artificial Sequence
  derived and/or modified sequence
ctttttaaggtaagtggggagaggaaagcaatgccccagagacccgacgccttagcccgccaccctgagacctagcacaaggagcgttcacgcccgaagggtcatccgagatgggggctcgaggcacgcgcccccaaatcttcaaggcccaagaagcttctcaagggcgccctatccgtaggagctgagggcatgaggggcaggagcaggatggtgctgctccactggtgcctgctgtggctcctgtttccactcagctcaaggacccagaagttacccacccgggatgaggaactttttcagatgcagatccgggacaaggcattttttcatgattcgtcagtaattccagatggagctgaaattagcagttatctctttagagatacacctaagaggtatttctttgtggttgaagaagacaatactccattatcagtcacagtgacgccctgtgatgcgcctttggagtggaagctgagcctccaggagctgccagaggacaggagcggggaaggctcaggtgatctggaacctcttgagcagcagaagcagcagat

SEQ ID NO: 215732 - DNA, 564 bp, Artificial Sequence
  derived and/or modified sequence
agagtttccctctattgtgcaccccggtctgcttgacagtgtgatggtcccgcgtgcgcgtctcctgggttttgcagctttgtcgggggctcggtgggcctccttcattctccccgagtggcgctaaggatggtgctgctccactggtgcctgctgtggctcctgtttccactcagctcaaggacccagaagttacccacccgggatgaggaactttttcagatgcagatccgggacaaggcattttttcatgattcgtcagtaattccagatggagctgaaattagcagttatctctttagagatacacctaagaggtatttctttgtggttgaagaagacaatactccattatcagtcacagtgacgccctgtgatgcgcctttggagtggaagctgagcctccaggagctgccagaggacaggagcggggaaggctcaggtgatctggaacctcttgagcagcagaagcagcagatcattaatgaggaaggcactgagttattctcctacaaaggcaatgatgttgagtattttatatcgtctagttccccatccggttta

SEQ ID NO: 215733 - DNA, 1707 bp, Artificial Sequence
  derived and/or modified sequence
atggtgctgctgcactggtgcctgctgtggctgctgttccccctgagcagcagaacccagaagctgcccaccagagacgaggagctgttccagatgcagatcagagacaaggccttcttccacgacagcagcgtgatccccgacggcgccgagatcagcagctacctgttcagagacacccccaagagatacttcttcgtggtggaggaggacaacacccccctgagcgtgaccgtgaccccctgcgacgcccccctggagtggaagctgagcctgcaggagctgcccgaggacagaagcggcgagggcagcggcgacctggagcccctggagcagcagaagcagcagatcatcaacgaggagggcaccgagctgttcagctacaagggcaacgacgtggagtacttcatcagcagcagcagccccagcggcctgtaccagctggacctgctgagcaccgagaaggacacccacttcaaggtgtacgccaccaccacccccgagagcgaccagccctaccccgagctgccctacgaccccagagtggacgtgaccagcctgggcagaaccaccgtgaccctggcctggaagcccagccccaccgccagcctgctgaagcagcccatccagtactgcgtggtgatcaacaaggagcacaacttcaagagcctgtgcgccgtggaggccaagctgagcgccgacgacgccttcatgatggcccccaagcccggcctggacttcagccccttcgacttcgcccacttcggcttccccagcgacaacagcggcaaggagagaagcttccaggccaagcccagccccaagctgggcagacacgtgtacagcagacccaaggtggacatccagaagatctgcatcggcaacaagaacatcttcaccgtgagcgacctgaagcccgacacccagtactacttcgacgtgttcgtggtgaacatcaacagcaacatgagcaccgcctacgtgggcaccttcgccagaaccaaggaggaggccaagcagaagaccgtggagctgaaggacggcaagatcaccgacgtgttcgtgaagagaaagggcgccaagttcctgagattcgcccccgtgagcagccaccagaaggtgaccttcttcatccacagctgcctggacgccgtgcagatccaggtgagaagagacggcaagctgctgctgagccagaacgtggagggcatccagcagttccagctgagaggcaagcccaaggccaagtacctggtgagactgaagggcaacaagaagggcgccagcatgctgaagatcctggccaccaccagacccaccaagcagagcttccccagcctgcccgaggacaccagaatcaaggccttcgacaagctgagaacctgcagcagcgccaccgtggcctggctgggcacccaggagagaaacaagttctgcatctacaagaaggaggtggacgacaactacaacgaggaccagaagaagagagagcagaaccagtgcctgggccccgacatcagaaagaagagcgagaaggtgctgtgcaagtacttccacagccagaacctgcagaaggccgtgaccaccgagaccatcaagggcctgcagcccggcaagagctacctgctggacgtgtacgtgatcggccacggcggccacagcgtgaagtaccagagcaaggtggtgaagaccagaaagttctgctag

SEQ ID NO: 215734 - DNA, 351 bp, Artificial Sequence
  derived and/or modified sequence
atggtgctgctgcactggtgcctgctgtggctgctgttccccctgagcagcagaacccagaagctgcccaccagagacgaggagctgttccagatgcagatcagagacaaggccttcttccacgacagcagcgtgatccccgacggcgccgagatcagcagctacctgttcagagacacccccaagagatacttcttcgtggtggaggaggacaacacccccctgagcgtgaccgtgaccccctgcgacgcccccctggagtggaagctgagcctgcaggagctgcccgaggacagaagcggcgagggcagcggcgacctggagcccctggagcagcagaagcagcagtag

SEQ ID NO: 215735 - DNA, 438 bp, Artificial Sequence
  derived and/or modified sequence
atggtgctgctgcactggtgcctgctgtggctgctgttccccctgagcagcagaacccagaagctgcccaccagagacgaggagctgttccagatgcagatcagagacaaggccttcttccacgacagcagcgtgatccccgacggcgccgagatcagcagctacctgttcagagacacccccaagagatacttcttcgtggtggaggaggacaacacccccctgagcgtgaccgtgaccccctgcgacgcccccctggagtggaagctgagcctgcaggagctgcccgaggacagaagcggcgagggcagcggcgacctggagcccctggagcagcagaagcagcagatcatcaacgaggagggcaccgagctgttcagctacaagggcaacgacgtggagtacttcatcagcagcagcagccccagcggcctgtag

SEQ ID NO: 215736 - DNA, 1707 bp, Artificial Sequence
  derived and/or modified sequence
atggtgcttttgcattggtgtctgctgtggttgctctttccattatccagccggacccagaaacttcctaccagggacgaagagttgtttcagatgcagatacgcgacaaggcatttttccacgactcatccgtgatccctgacggggctgagatctcttcctacctttttagggatactcccaagcgttacttcttcgtggtggaagaagataatacacccctgagtgtgacagtgacaccatgcgacgcccccctggagtggaagctctccctgcaagaattgcctgaggaccgatccggtgagggatctggggacctggagccactcgagcaacagaaacagcagatcataaatgaagagggcacagaacttttctcttataagggcaacgacgtcgagtattttatttcttcttcttcacctagtggcctatatcaactggacctgttaagcacagaaaaagatactcatttcaaagtatacgctaccacgactcctgagagcgaccagccttatccggaattgccatacgacccgcgcgtggacgttacttccctcggtagaactacagtgacacttgcctggaagccgtcgcccacagcctctctactgaaacagcccatccagtattgcgtggtgatcaacaaagaacacaatttcaaaagtctatgtgcagtggaagctaagctatcagccgatgacgccttcatgatggctcctaagcccgggttggactttagcccatttgatttcgcacacttcggctttccctccgataattcaggcaaagaacggagcttccaggctaagccctcccccaagctgggcaggcacgtctactctagacctaaagttgacatacagaaaatctgtatcggtaataaaaacatcttcactgtgagcgatctgaaaccggacacccagtactacttcgatgtgttcgtggtgaatatcaattccaacatgtccactgcttacgttgggacatttgccagaacaaaagaagaggccaagcagaaaactgtggagctcaaggacgggaagatcaccgatgtttttgtcaagcgcaagggagcaaaatttcttcgtttcgctccggtcagttcacatcagaaggtgaccttttttatccacagttgtctggatgccgtgcaaatacaggtgcgaagagatgggaaattgctgttgtcccagaacgtagaggggatccaacagttccaattaaggggcaagcccaaggctaagtacctcgtgcggctcaagggaaataagaagggggcctccatgcttaagatcctagccacgacgaggccaactaaacagtccttccccagcctccccgaagacacccgaattaaagcctttgacaagctacggacttgtagttcagctacagtggcctggctagggacccaagagcgaaacaagttctgcatttataaaaaggaggtggatgacaactacaatgaagaccagaagaaaagagaacagaatcaatgcctgggccccgatattcgcaaaaagtctgagaaggtgctctgtaaatattttcactcgcagaatctgcagaaggccgtgacaacggagacaataaaaggactgcagccaggtaagtcatatctcctggatgtctacgtgattggacacgggggccattctgtcaagtatcagtctaaggttgtgaaaacacggaaattctgttag

SEQ ID NO: 215737 - DNA, 351 bp, Artificial Sequence
  derived and/or modified sequence
atggtcctgctccactggtgcctcctgtggctcctctttcccctaagctcccgtacccaaaagctgcccacccgcgatgaggaattgttccagatgcaaatccgtgacaaagcttttttccatgattcctccgtgatccctgatggggccgagatcagcagctatctgttcagagatacaccgaagaggtacttcttcgtcgtcgaggaggacaatacccccctaagcgtcacggtgactccttgtgacgcccctctggagtggaaactgtcactccaagagctgccagaggaccggtcgggggagggctccggggatctagaacctctggaacaacagaagcaacagtag

SEQ ID NO: 215738 - DNA, 438 bp, Artificial Sequence
  derived and/or modified sequence
atggttcttctgcattggtgcctgctgtggctgctgttccctctcagctcacggacgcaaaagctccccaccagggatgaggagctgttccagatgcaaattcgggacaaagcttttttccatgactcttcagtgataccagatggcgccgagatctcgtcctacctcttcagggacacgccaaagcggtacttctttgtggttgaggaggacaacacgcctctgtctgtgactgtcactccttgcgatgcaccgttggaatggaagctctcgctgcaggaacttccagaggaccggtctggcgaaggatccggggatctggagcctttagaacagcagaagcagcaaattatcaatgaagaaggtacagaactgttctcttataaaggcaacgacgttgaatattttattagctcatcttccccctctgggctctag

SEQ ID NO: 215739 - DNA, 1707 bp, Artificial Sequence
  derived and/or modified sequence
atggtgctgctgcactggtgcctgctgtggctgctcttccccctgagcagcaggacccagaagctgcccaccagagatgaggagctgttccagatgcagatccgggacaaggccttcttccatgacagcagcgtcatcccagatggagctgagatcagcagctacctgttccgggacacccccaagcgctacttctttgtggtggaggaggacaacacccccctgtctgtgacagtgaccccctgtgatgcccccctggagtggaagctgagcctgcaggagctgcctgaagatagaagtggagagggcagcggggacctggagcccctggagcagcagaagcagcagatcatcaatgaggagggcacagagctgttctcctacaagggaaatgatgtggagtacttcatcagcagcagcagccccagcggcctgtaccagctggacctgctgagcacagagaaggacacccacttcaaggtgtatgccaccaccaccccagagagtgaccagccctacccagagctgccctatgacccccgggtggatgtgaccagcctgggccgcaccaccgtgaccctggcctggaagcccagccccacagccagcctgctgaagcagcccatccagtactgtgtggtgatcaacaaggagcacaacttcaagagcctgtgtgctgtggaggccaagctgtctgcagatgatgccttcatgatggcccccaagccaggcctggacttcagcccctttgattttgcccacttcggcttccccagcgacaacagcggcaaggagaggagcttccaggccaagcccagccccaagctgggcagacatgtgtacagccggcccaaggtggacatccagaagatctgcatcggcaacaagaacatcttcaccgtgtctgacctgaagccagacacccagtactactttgatgtgtttgtggtgaacatcaacagcaacatgagcacagcctacgtgggcacctttgcccggaccaaggaggaggccaagcagaagacagtggagctgaaggatggcaagatcacagatgtgtttgtgaagaggaagggggccaagttcctgcgctttgcccctgtgagcagccaccagaaggtgaccttcttcatccacagctgcctggatgctgtgcagatccaggtgagaagagatggcaagctgctgctgagccagaatgtggagggcatccagcagttccagctgcggggcaagcccaaggccaagtacctggtgcggctgaagggcaacaagaagggggcctccatgctgaagatcctggccaccacccggcccaccaagcagagcttccccagcctgcctgaggacacccgcatcaaggcctttgacaagctgcggacctgcagcagcgccaccgtggcctggctgggcacccaggagaggaacaagttctgcatctacaagaaggaggtggatgacaactacaatgaagaccagaagaagcgggagcagaaccagtgcctgggccctgacatcaggaagaagtctgagaaggtgctgtgcaagtacttccacagccagaacctgcagaaggctgtgaccacagagaccatcaagggcctgcagcccgggaagagctacctgctggatgtgtatgtgattggccacggcggccacagcgtgaagtaccagagcaaggtggtgaagaccaggaagttctgctag

SEQ ID NO: 215740 - DNA, 351 bp, Artificial Sequence
  derived and/or modified sequence
atggtgctgctgcactggtgcctgctgtggctgctcttccccctgagcagcaggacccagaagctgcccaccagagatgaggagctgttccagatgcagatccgggacaaggccttcttccatgacagcagcgtcatcccagatggagctgagatcagcagctacctgttccgggacacccccaagcgctacttctttgtggtggaggaggacaacacccccctgtctgtgacagtgaccccctgtgatgcccccctggagtggaagctgagcctgcaggagctgcctgaagatagaagtggagagggcagcggggacctggagcccctggagcagcagaagcagcagtag

SEQ ID NO: 215741 - DNA, 438 bp, Artificial Sequence
  derived and/or modified sequence
atggtgctgctgcactggtgcctgctgtggctgctcttccccctgagcagcaggacccagaagctgcccaccagagatgaggagctgttccagatgcagatccgggacaaggccttcttccatgacagcagcgtcatcccagatggagctgagatcagcagctacctgttccgggacacccccaagcgctacttctttgtggtggaggaggacaacacccccctgtctgtgacagtgaccccctgtgatgcccccctggagtggaagctgagcctgcaggagctgcctgaagatagaagtggagagggcagcggggacctggagcccctggagcagcagaagcagcagatcatcaatgaggagggcacagagctgttctcctacaagggaaatgatgtggagtacttcatcagcagcagcagccccagcggcctgtag

SEQ ID NO: 215742 - DNA, 2885 bp, Artificial Sequence
  derived and/or modified sequence
ccgcgagagagtggagctaactgagcagcgcacccgccacggccgctgccgccccgtgcgcccggctctcccagcaccccgcgcggcgctccagccaggcgcctgtgcgactagcggcggccggcgaagcccgcgccagccccgcgggtcgctgcggcatcctcccgccgcccagcccccgcacgctccctgcagtttaaaaggacctcccgccgcttctcggcgctgccccgggattccccagccccgcgcggctccctactccacttcgcagcaacttcggcgaccgcgcgccgcccgccctcgcccgcctttgaagtttgctgtgccgaccgcaaagttgggacacttcagcggattgaatttttctcttttatctgcctccgtccccgccctccaggcttctcgttcctggatattggtgcttagcatcttggcagggtccggggacgtggactatttcgcacaccacaccacggggagggatttttttctattttccctacgaaaaacagatctttttaaggatggtgctgctccactggtgcctgctgtggctcctgtttccactcagctcaaggacccagaagttacccacccgggatgaggaactttttcagatgcagatccgggacaaggcattttttcatgattcgtcagtaattccagatggagctgaaattagcagttatctctttagagatacacctaagaggtatttctttgtggttgaagaagacaatactccattatcagtcacagtgacgccctgtgatgcgcctttggagtggaagctgagcctccaggagctgccagaggacaggagcggggaaggctcaggtgatctggaacctcttgagcagcagaagcagcagatcattaatgaggaaggcactgagttattctcctacaaaggcaatgatgttgagtattttatatcgtctagttccccatccggtttatatcagttggatcttctttcaacagagaaagacacacatttcaaagtatatgccaccacaactccagaatctgatcagccataccctgagttaccctatgacccaagagtagatgtgacctcactggggcgcaccacggtcactttggcctggaaaccaagccccactgcctctttgctgaaacaacccattcagtactgtgtggtcatcaacaaagagcacaatttcaaaagtctctgtgcagtggaagcaaaactgagtgcagatgatgcttttatgatggcaccgaaacctggtctggacttcagcccctttgactttgcccactttggatttccttctgataattcaggtaaagaacgcagtttccaggcaaagccttctccaaaactggggcgtcatgtctactccaggcccaaggttgatattcagaaaatctgcataggaaacaagaacatcttcaccgtctctgatctgaaacccgacacgcagtactactttgatgtatttgtggtcaacatcaacagcaacatgagcaccgcttatgtaggtacctttgccaggaccaaggaagaagccaaacagaagacagtcgagctaaaagatgggaagataacagatgtatttgttaaaaggaagggagcaaagtttctacggtttgctccagtctcttctcaccaaaaagtcaccttctttattcactcttgtctggatgctgtccaaatccaagtgagaagagatgggaaacttcttctgtctcagaatgtggaaggcattcagcagtttcagcttagaggaaaacctaaagctaaatacctcgttcgactgaaaggaaacaagaaaggagcatctatgttgaaaattctagctaccacaaggcctactaagcagtcatttccctctcttcctgaagacacaagaatcaaagcctttgacaagctccgtacctgttcctcagccaccgtggcttggctaggcactcaggaaaggaacaagttttgcatctacaaaaaagaagtggatgataactacaatgaagaccagaagaaaagagagcaaaaccaatgtctaggaccagatataaggaagaagtcagaaaaggtcctctgtaaatatttccacagtcaaaacctgcagaaagcagtgaccacagaaacaattaaaggtcttcagcctggcaaatcttacctgctggatgtttatgtcataggacatggggggcactctgtaaagtatcagagtaaggttgtgaaaactagaaagttctgttagttaccttcttatagagatatattatgtagaactccaggagggacattaaatcactttaagtataaactgactactcccacagttgagagaagttgtgacctgtacttgtactatggaaggaaggatatcaacgtgtgtatattgatgtttatataagtaactcttgaaggagacttgttctagcgtgccccatggtacctagtgtgtgtctgatgccggttggtgtcaaagatagagggcttcttgaaggaacttgccattccttgctttgaccactgcatgaactgcttctaaattattttattacctaaaaatttaaaatatgccattcattgcacacacccacaaatgcaaatcattcctctctgtagatgctaggatatatataaattattttataaattcttgttttaaatgtcagtgtttctatgattgtaaactattaaattcttttcctattaaagtacagatctaatctaagtattattaagttgatagccctctagtcagttatattgctattgtaaattcttgtttgttgagtaaaatgtttaaatactatatgtatctcatgtacaaagttgacatacattatattcatgtacataaaattaaagagattagattatatactgttcattttcccaagca

SEQ ID NO: 215743 - DNA, 1707 bp, Artificial Sequence
  derived and/or modified sequence
atggtgctgctgcactggtgcctgctgtggctgctgttccccctgagctctagaacacaaaaattacctacccgcgatgaagagctgtttcagatgcagattagagacaaggcatttttccacgacagcagtgtcatcccagatggggccgagatctcgagctacctgtttcgggatacgcctaagcgttacttcttcgtggtcgaggaggacaatacaccactatccgtaaccgtgacaccatgtgacgcccctctggagtggaaattgtctctgcaggagttgcccgaggacagatccggagaagggagtggtgatcttgagcccctcgaacagcagaagcagcagatcattaacgaggaggggaccgagttgttctcctacaaaggtaacgatgtagagtatttcatctcctcatcctcaccttctggcctttaccaactggatttgctttcaacagagaaggatacgcactttaaagtatacgcaacaaccacacctgagtctgatcaaccatacccggagctcccttacgatccaagggtggatgttactagcctaggccggactactgtgactctggcttggaagcctagcccgaccgctagcttgctcaagcagccaatccagtactgcgtggtcatcaacaaggagcataacttcaagtccctatgcgccgtggaagccaaactatccgcagatgacgcttttatgatggcccctaagccaggcctggacttttctcctttcgatttcgcccattttggatttcccagcgacaactccggaaaagagcgttccttccaagcgaaaccgtcccccaagctgggcagacacgtttattcccggcccaaggtggacatccagaagatctgcattggaaataaaaacatttttaccgttagcgaccttaaaccagacacccaatattatttcgacgtgttcgtggtcaatatcaattccaatatgtctactgcttacgtcggaaccttcgctagaacaaaggaggaggcgaaacagaagacggttgagctgaaagacggaaagatcaccgatgtctttgtcaagcgtaaaggggcaaaatttctgcgattcgcacccgtgtcatcgcatcagaaagtcaccttctttatacactcatgcttggacgctgttcagatccaggtgagaagagatggcaaattgttgctttcccagaatgtggagggaatccaacagtttcaactccggggcaaaccaaaggccaagtacctggtgcgcttgaagggcaataagaaaggggcatcgatgttgaagattttggccacaacccgtcctaccaaacaaagcttcccctccttaccagaagatactcgcataaaagctttcgacaaacttcgaacatgcagttccgctaccgttgcatggcttggaactcaagaacggaataagttctgtatctacaaaaaggaggtggatgataattataacgaagaccagaagaaacgtgagcagaatcaatgtcttggccctgacattaggaagaaaagcgagaaggtattgtgtaaatactttcattcccaaaatttacagaaggccgtgactacagagaccattaagggcctgcagccaggaaaatcctatctcttagacgtctatgtaataggacacggaggtcactctgtgaaataccaatctaaagtcgttaagactaggaagttctgctag

SEQ ID NO: 215744 - DNA, 351 bp, Artificial Sequence
  derived and/or modified sequence
atggtgctgctgcactggtgcctgctgtggctgctgttccccctgagtagtcgcactcagaagctgcctactcgtgatgaggagctcttccagatgcagatccgggacaaggcatttttccacgatagcagcgtgatacctgacggcgcagagattagttcatacctgttcagagatactcctaaaaggtatttctttgtggtggaagaagacaacactccattgtccgtcaccgttactccatgcgatgctcctctagagtggaaattatctctgcaagagctgcctgaggacaggtccggcgaagggagcggagatttggaacccctggaacagcagaaacagcaatag

SEQ ID NO: 215745 - DNA, 438 bp, Artificial Sequence
  derived and/or modified sequence
atggtgctgctgcactggtgcctgctgtggctgctgttccccctgagttcacgcacacagaaactccccacccgtgacgaagagctgtttcaaatgcagattcgtgataaggcattctttcatgactccagcgtaatccccgatggcgcagaaatatccagctatctgttccgggacactccgaagaggtatttcttcgtagtggaggaagataacacacctctttctgttaccgtcacgccatgtgatgctcccctcgaatggaaactgtccctgcaggagctccctgaagatcggagcggagaggggagcggggacctggagcctttagagcagcagaagcagcagattattaacgaggagggcactgagctcttctcctataagggaaacgatgtcgagtactttatttccagcagtagtccctcaggcctttag

SEQ ID NO: 215746 - RNA, 1707 nt, Artificial Sequence
  derived and/or modified sequence
augguccugcugcauuggugucucuuguggcugcuguuuccccucucuucccggacacagaaacuuccuacuagggacgaagaguuguuucagaugcagauuagagacaaggcauuuuuccacgauucuagcgugauucccgauggggccgaaaucucaaguuaccuguuuagggacaccccgaagagguauuucuucguggucgaggaggacaacacuccccuaucuguaacugugacucccugugacgccccacuugaauggaaacuaucacuccaagagcugccugaagauagauccggugagggcaguggcgaucuggaaccccuugaacagcagaagcagcagauuauuaaugaggaggguacagaacuauuuaguuacaagggcaaugacguggaauacuucaucuccuccucaucccccagugggcucuaccagcuggacuuacugucuaccgaaaaagauacgcacuucaagguguacgccaccaccacaccagagagcgaccaaccauacccagaacugccauacgauccaagaguagacguuacuagucugggaagaacaacgguuacacucgccuggaaaccuucacccaccgccucucugcugaaacagccaauccaguauugcguugucaucaauaaggagcauaauuuuaaaagcuugugcgcaguugaagccaaguugagugccgaugaugcuuucaugauggcuccaaagcccggacuggauuuuucccccuucgacuucgcccacuucggcuuccccucugauaauucugguaaagagcguucguuccaagcaaagccaagccccaagcuagguagacacguguauucaaggccaaaaguggauauccagaagaucugcauaggcaacaagaauauuuucaccguaucugaucuuaagcccgauacucaauauuacuucgacgucuucguugugaauaucaacucuaacaugucgacagcuuaugugggaacuuucgcccgaacuaaagaggaggccaaacagaagacagucgagcugaaggauggaaaaauaacggauguauuuguuaagcgcaagggugcuaaauuccugcgguucgcaccugucuccucacaccagaaggucaccuuuuuuauucauucuuguuuggaugcagugcaaauccaggugaggagggauggcaagcuguuacucagccagaacguggaaggcauacagcaauuccaacugagaggcaaacccaaggccaaauacuuagugagacuaaaggggaauaagaagggcgccucaaugcuuaagauucuggcuaccaccaggccuacaaaacaaaguuucccuucacugcccgaggauaccagaaucaaagcauucgacaagcuccgcacuugcaguucagccacgguugcauggcuuggcacucaggaaagaaacaaguucugcaucuacaaaaaagagguggacgacaauuacaacgaggaucagaaaaagagagaacagaaucagugccucggccccgacauccgcaaaaaaagcgaaaagguguuaugcaaguacuuccauagccagaaccugcaaaaggcggucacuaccgaaacuauaaaaggccuacagccaggcaaaaguuaccugcuggauguguacgucauuggccacgggggacauuccgugaaguaccagaguaaggugguaaagaccagaaaguuuuguuag

SEQ ID NO: 215747 - RNA, 351 nt, Artificial Sequence
  derived and/or modified sequence
augguucugcugcauuggugccuacucuggcugcuguucccacuuucaucacguacgcagaagcuuccaacacgagacgaagaacuguuucaaaugcagaucagagauaaggccuucuuucacgacucuagcgucauccccgacggcgccgaaaucuccucuuaccuguuuagggacacaccuaaaagauacuucuucguaguggaagaggacaauacaccuuugucaguuaccgugacacccugcgaugcccccuuggaauggaaauuaucucugcaggagcugccagaggaucguucgggagaaggcucaggagaucuugaaccucuggaacaacagaagcaacaguag

SEQ ID NO: 215748 - RNA, 438 nt, Artificial Sequence
  derived and/or modified sequence
augguacuauugcacuggugccuccugugguuacuguucccuuugucgagccgcacacagaaguuaccuacuagagaugaagaacuguuccagaugcagaucagagauaaggcguuuuuccacgacucaagcguuaucccggacggagcugagaucagcucuuaucuguuccgagauacacccaagcgguacuucuucgucguugaagaggauaacacaccacuaucggugacugucacccccugcgaugccccccuggaauggaaacugagucugcaagaacuucccgaggacagaucuggcgaaggaagcggugacuuagaaccccuggaacaacagaaacagcagaucauuaacgaagaaggaacugaacuuuucagcuauaaagguaaugacgucgaguauuucauuuccaguucaucuccuucugguuuguag

SEQ ID NO: 215749 - RNA, 1707 nt, Artificial Sequence
  derived and/or modified sequence
augguucugcugcacuggugccuccugugguuacuguuuccacucuccucucgaacccagaaacugccaacccgugaugaggaauuauuucagaugcagaucagagacaaggccuuuuuucaugauaguucagucauuccugacggcgcggaaauuaguucauaccucuuuagagacacacccaagagauauuuuuuuguuguggaggaagauaacacuccacugagcgugacaguaacacccugcgaugccccccuggaguggaaacucucucuccaagaacuccccgaggacagaagcggcgaggggucgggcgaccuggaaccucucgaacagcaaaagcagcagauaauuaaugaggaagguacugaacuguuuucuuauaaagggaacgacguggaauauuucaucuccuccagcuccccuagugggcuguaccaauuggaccugcugagcacugaaaaggauacccacuucaaaguauaugcuacaaccacgccugagagcgaccaacccuaccccgaacugcccuaugacccucguguggacgugaccucucuaggacgaacaacugugacacuggcauggaaacccucucccaccgccucccugcugaagcagcccauacaguacugugucgucaucaauaaagaacacaauuucaaaucauuaugugcuguugaagcaaaguugagcgccgaugaugccuuuaugauggcaccaaagcccggacuggauuuuucuccauuugauuucgcccacuucggguucccgagcgacaacuccggcaaagagagguccuuucaagccaagcccagccccaaauuaggccgccacguguacucccguccuaagguagauauucagaagauuuguauuggaaacaaaaauauauucaccgugagugaccuuaagccugacacucaguauuauuucgaugucuucguugucaacauuaauucuaauaugagcaccgccuacguagggacuuucgcacgaacaaaagaagaagcuaaacagaaaacugucgaacuuaaggacggaaaaaucaccgacguguucgugaagcggaaaggggcaaaauucuuaagguucgcaccuguaucaucccaccagaaaguuacuuuuuuuauccauuccugccucgaugcagugcaaauacaaguuagaagggauggaaagcuacugcugagucagaauguggaaggcauacagcaauuccaacugagaggcaaacccaaggccaaauacuuagugagacuaaaggggaauaagaagggcgccucaaugcuuaagauucuggcuaccaccaggccuacaaaacaaaguuucccuucacugcccgaggauaccagaaucaaagcauucgacaagcuccgcacuugcaguucagccacgguugcauggcuuggcacucaggaaagaaacaaguucugcaucuacaaaaaagagguggacgacaauuacaacgaggaucagaaaaagagagaacagaaucagugucucgggccugauauucguaaaaaaagugagaaaguucucugcaaguacuuccauucucaaaaucuucaaaaagcaguuacuacagagaccaucaagggacuucaaccaggcaagucauaucuucuggacguguaugucaucgggcacggggggcacagcgugaaguaucagucaaaggucgugaagacacgcaaguuuugcuag

SEQ ID NO: 215750 - RNA, 351 nt, Artificial Sequence
  derived and/or modified sequence
auggugcuacuacacuggugucuccuuugguuguuguuuccucugucuagcagaacacagaaacucccaacgagggaugaggaauuguuucaaaugcagaucagagauaaggccuucuuccacgauaguuccgugaucccugacggcgccgagauuuccuccuaccuguuccgggacacuccaaaaagauauuuuuucgucguagaggaggacaauacaccccugagcgugaccguuacccccugcgaugccccucuggaauggaaacuuagccugcaagagcuaccugaagacagauccggugaaggcaguggagaucuggaacccuuggagcagcagaaacagcaauag

SEQ ID NO: 215751 - RNA, 438 nt, Artificial Sequence
  derived and/or modified sequence
augguacuacugcauuggugucuguuauggcuacucuuuccacuaucgagucgaacccagaaauugccuacucgagaugaggaacucuuucaaaugcagauacgagacaaagccuuuuuccacgacucuagcgucaucccugacggggccgagaucucgagcuaucucuucagagacacaccgaagcgcuauuucuuuguggucgaagaggauaauaccccccugagcgugacggucacaccaugcgaugccccgcuugaauggaagcugagccugcaggagcugccagaggauagaucuggcgagggaaguggggaccuagagccucuagagcagcagaagcaacaaauaaucaacgaagaaggaaccgagcucuucuccuauaaagguaaugaugucgaauacuuuauuaguucauccaguccaagcggccuguag

SEQ ID NO: 215752 - protein, 184 aa, Artificial Sequence
  derived and/or modified sequence
MESFSSKSLALQAEKKLLSKMAGRSVAHLFIDETSSEVLDELYRVSKEYTHSRPQAQRVIKDLIKVAIKVAVLHRNGSFGPSELALATRFRQKLRQGAMTALSFGEVDFTFEAAVLAGLLTECRDVLLELVEHHLTPKSHGRIRHVFDHFSDPGLLTALYGPDFTQHLGKICDGLRKLLDEGKL

SEQ ID NO: 215753 - DNA, 555 bp, Artificial Sequence
  derived and/or modified sequence
atggagagcttcagcagcaagagcctggccctgcaggccgagaagaagctgctgagcaagatggccggcagaagcgtggcccacctgttcatcgacgagaccagcagcgaggtgctggacgagctgtacagagtgagcaaggagtacacccacagcagaccccaggcccagagagtgatcaaggacctgatcaaggtggccatcaaggtggccgtgctgcacagaaacggcagcttcggccccagcgagctggccctggccaccagattcagacagaagctgagacagggcgccatgaccgccctgagcttcggcgaggtggacttcaccttcgaggccgccgtgctggccggcctgctgaccgagtgcagagacgtgctgctggagctggtggagcaccacctgacccccaagagccacggcagaatcagacacgtgttcgaccacttcagcgaccccggcctgctgaccgccctgtacggccccgacttcacccagcacctgggcaagatctgcgacggcctgagaaagctgctggacgagggcaagctgtag

SEQ ID NO: 215754 - DNA, 555 bp, Artificial Sequence
  derived and/or modified sequence
atggaaagcttctctagcaagagcctggcattacaggccgaaaagaagttgctatctaagatggctggcaggtcagtggctcacctctttattgatgaaacttctagtgaggtacttgacgaattgtatagagtgagcaaagagtatactcactcgcgaccacaggcccagagggtgatcaaagatctcatcaaagtagccattaaggtcgcggtgcttcacaggaacggatcatttggaccatcagaactagccttagccaccagatttagacagaagttgcgtcagggggcaatgaccgccttgtcttttggtgaagttgattttacctttgaagcagcagttctggctgggctgttgactgagtgccgggatgtgctgctcgaactggtggagcatcatttgactcctaagtcacacgggcgaattcgccatgttttcgatcactttagcgaccctgggctcctgacagccctgtacgggcccgacttcacgcagcaccttggaaagatttgtgacgggcttagaaagctgcttgatgagggaaaactgtag

SEQ ID NO: 215755 - DNA, 555 bp, Artificial Sequence
  derived and/or modified sequence
atggagagcttcagcagcaagagcctggccctgcaggccgagaagaagctgctgagcaagatggccggccgctctgtggcccacctgttcattgatgagaccagcagcgaggtgctggatgagctgtacagagtgtccaaggagtacacccacagccggccccaggcccagagggtcatcaaggacctgatcaaggtggccatcaaggtggccgtgctgcacagaaatggcagctttggccccagcgagctggccctggccacccgcttccggcagaagctgcggcagggcgccatgacagccctgagctttggagaggtggacttcacctttgaagctgctgtgctggccggcctgctgacagagtgcagagatgtgctgctggagctggtggagcaccacctgacccccaagagccacggccgcatcagacatgtgtttgaccacttcagtgaccccggcctgctgacagccctgtatggccctgacttcacccagcacctgggcaagatctgtgatggcctgaggaagctgctggatgagggcaagctgtag

SEQ ID NO: 215756 - DNA, 555 bp, Artificial Sequence
  derived and/or modified sequence
atggagagcttcagcagcaagagcctggccctgcaggccgagaagaaactgctctcaaaaatggctggaagaagtgtggctcatttgttcatcgatgaaacttcaagtgaagtgctagacgagctctaccgcgtgtcgaaagagtacacccactcccggcctcaggcccagagggtgatcaaagatttgatcaaggttgcaataaaagtggccgtgctccatagaaatggcagtttcgggccctctgagctggctctcgcaacacggtttcggcagaagctcagacagggcgctatgactgccctgagctttggcgaggtcgatttcacattcgaagcagccgtgttggccggcctgctgaccgagtgtcgcgacgtgctgctcgagctggtagagcaccacctgacaccaaagtcacacggcaggattcggcacgtgtttgaccacttctctgaccccgggctactgacggccctttatggcccagacttcactcagcacctgggaaagatctgcgacggcctgcgcaagttgctcgatgaggggaaactgtag

SEQ ID NO: 215757 - DNA, 555 bp, Artificial Sequence
  derived and/or modified sequence
atggaatccttcagctcaaagtcactggcactgcaggccgagaaaaagctccttagcaagatggccggtcgctctgttgcccacctgttcatcgatgagacttcctctgaggtgctggacgaactgtacagagtaagtaaggagtacacgcattcaagaccacaggcccagcgggttattaaagatctgatcaaagttgcgataaaggttgccgttcttcacaggaacggtagctttgggccaagcgagttggcactggctactcgttttcgccagaaactgcgccagggagccatgacagccctgagctttggcgaggttgactttacattcgaggccgcagtcctcgccggactgttgaccgaatgtagagatgtgttgctggaacttgtggagcaccatctcactccaaagagccacgggagaattagacatgtatttgatcattttagtgacccaggcctgctgacggctctatatggcccagacttcactcagcatctcggcaagatatgtgatggactgagaaagttgctggatgagggaaagctgtag

SEQ ID NO: 215758 - DNA, 1178 bp, Artificial Sequence
  derived and/or modified sequence
ggccaagccaaagggctctcacactaagtgaagcttctccattctgtaagctttccgggaacatccaaggcaagactggcacccagcacagcagtgactgaccacataccccactctccaggacccatggagtccttcagctcaaagagcctggcactgcaagcagagaagaagctactgagtaagatggcgggtcgctctgtggctcatctcttcatagatgagacaagcagtgaggtgctagatgagctctaccgtgtgtccaaggagtacacgcacagccggccccaggcccagcgcgtgatcaaggacctgatcaaagtggccatcaaggtggctgtgctgcaccgcaatggctcctttggccccagtgagctggccctggctacccgctttcgccagaagctgcggcagggtgccatgacggcacttagctttggtgaggtagacttcaccttcgaggctgctgttctggctggcctgctgaccgagtgccgggatgtgctgctagagttggtggaacaccacctcacgcccaagtcacatggccgcatccgccacgtgtttgatcacttctctgacccaggtctgctcacggccctctatgggcctgacttcactcagcaccttggcaagatctgtgacggactcaggaagctgctagacgaagggaagctctgagagccctgagcctagcacattccaccttgacaaaatggttgactgagaaaacacagataatgggcttcctaaccctgctcacctggcactaacacttttcaatcttcaggcttcattccttcccaagagtgcttttgactctgagaccagcccacccccaaacagctagtggagaaggagcaatgctgaggggtgaggcctctctcccactccagccccaggacaggaaacagaactgcctgaaaaaggtgaagtgaaacttggatctctatttctcccataagggacttctgaaacagggaagccccctcccatgtgaaccaaggaaaggaggcacagcccagagaacccctttggggatactaaagacagaagaggggaaggtggcccttagagacagagcttggacagatgccagaggctctgttccagagtgcaggaagaaggggctagggcaggggagattctcataggggaaataaaactactaaaatatg

SEQ ID NO: 215759 - protein, 934 aa, Artificial Sequence
  derived and/or modified sequence
MEEIWKFSTYLNLGYVSMCLEHLLFDHKYWLNCILVEDTEIQVSVDDKHLETIYLGLLIQEGHFFCRALCSVTPPAEKEGECLTLCKNELISVKMAEAGSELEGVSLVTGQRGLVLVSALEPLPLPFHQWFLKNYPGSCGLSRKRDWTGSYQIGRGRCKALTGYEPGEKDELNFYQGESIEIIGFVIPGLQWFIGKSTSSGQVGFVPTRNIDPDSYSPMSRNSAFLSDEERCSLLALGSDKQTECSSFLHTLARTDITSVYRLSGFESIQNPPNDLSASQPEGFKEVRPGRAWEEHQAVGSRQSSSSEDSSLEEELLSATSDSYRLPEPDDLDDPELLMDLSTGQEEEAENFAPILAFLDHEGYADHFKSLYDFSFSFLTSSFYSFSEEDEFVAYLEASRKWAKKSHMTWAHARLCFLLGRLSIRKVKLSQARVYFEEAIHILNGAFEDLSLVATLYINLAAIYLKQRLRHKGSALLEKAGALLACLPDRESSAKHELDVVAYVLRQGIVVGSSPLEARACFLAIRLLLSLGRHEEVLPFAERLQLLSGHPPASEAVASVLSFLYDKKYLPHLAVASVQQHGIQSAQGMSLPIWQVHLVLQNTTKLLGFPSPGWGEVSALACPMLRQALAACEELADRSTQRALCLILSKVYLEHRSPDGAIHYLSQALVLGQLLGEQESFESSLCLAWAYLLASQAKKALDVLEPLLCSLKETESLTQRGVIYNLLGLALQGEGRVNRAAKSYLRALNRAQEVGDVHNQAVAMANLGHLSLKSWAQHPARNYLLQAVRLYCELQASKETDMELVQVFLWLAQVLVSGHQLTHGLLCYEMALLFGLRHRHLKSKYVPCCWEAIEKSVGSSFIHFLSQVISFMSLLCVQVSFRPPNPSAISTALCPQTLRHASPTMSTGWPWLSNSGTGRWKGGCWSPWGSFIGT

SEQ ID NO: 215760 - protein, 150 aa, Artificial Sequence
  derived and/or modified sequence
MSEQMMQSVGCRISLSVFQFLGDQRQELVAFHRLATVYYSLHMYEMAEDCYLKTLSLCPPWLQSPKEALYYAKVYYRLGRLTFCQLKDAHDATEYFLLALAAAVLLGDEELQDTIRSRLDNICQSPLWHSRPSGCSSERARWLSGGGLAL

SEQ ID NO: 215761 - protein, 1288 aa, Artificial Sequence
  derived and/or modified sequence
MGGCFCIPRERSLTRGPGKETPSKDPTVSSECIASSEYKEKCFLPQNINPDLTLSFCVKSRSRRCVNGPLQEAARRRLWALENEDQEVRMLFKDLSARLVSIQSQRAQFLITFKTMEEIWKFSTYLNLGYVSMCLEHLLFDHKYWLNCILVEDTEIQVSVDDKHLETIYLGLLIQEGHFFCRALCSVTPPAEKEGECLTLCKNELISVKMAEAGSELEGVSLVTGQRGLVLVSALEPLPLPFHQWFLKNYPGSCGLSRKRDWTGSYQIGRGRCKALTGYEPGEKDELNFYQGESIEIIGFVIPGLQWFIGKSTSSGQVGFVPTRNIDPDSYSPMSRNSAFLSDEERCSLLALGSDKQTECSSFLHTLARTDITSVYRLSGFESIQNPPNDLSASQPEGFKEVRPGRAWEEHQAVGSRQSSSSEDSSLEEELLSATSDSYRLPEPDDLDDPELLMDLSTGQEEEAENFAPILAFLDHEGYADHFKSLYDFSFSFLTSSFYSFSEEDEFVAYLEASRKWAKKSHMTWAHARLCFLLGRLSIRKVKLSQARVYFEEAIHILNGAFEDLSLVATLYINLAAIYLKQRLRHKGSALLEKAGALLACLPDRESSAKHELDVVAYVLRQGIVVGSSPLEARACFLAIRLLLSLGRHEEVLPFAERLQLLSGHPPASEAVASVLSFLYDKKYLPHLAVASVQQHGIQSAQGMSLPIWQVHLVLQNTTKLLGFPSPGWGEVSALACPMLRQALAACEELADRSTQRALCLILSKVYLEHRSPDGAIHYLSQALVLGQLLGEQESFESSLCLAWAYLLASQAKKALDVLEPLLCSLKETESLTQRGVIYNLLGLALQGEGRVNRAAKSYLRALNRAQEVGDVHNQAVAMANLGHLSLKSWAQHPARNYLLQAVRLYCELQASKETDMELVQVFLWLAQVLVSGHQLTHGLLCYEMALLFGLRHRHLKSQLQATKSLCHFYSSVSPNPEACITYHEHWLALAQQLRDREMEGRLLESLGQLYRNLNTARSLRRSLTCIKESLRIFIDLGETDKAAEAWLGAGRLHYLMQEDELVELCLQAAIQTALKSEEPLLALKLYEEAGDVFFNGTRHRHHAVEYYRAGAVPLARRLKAVRTELRIFNKLTELQISLEGYEKALEFATLAARLSTVTGDQRQELVAFHRLATVYYSLHMYEMAEDCYLKTLSLCPPWLQSPKEALYYAKVYYRLGRLTFCQLKDAHDATEYFLLALAAAVLLGDEELQDTIRSRLDNICQSPLWHSRPSGCSSERARWLSGGGLAL

SEQ ID NO: 215762 - protein, 726 aa, Artificial Sequence
  derived and/or modified sequence
MDLSTGQEEEAENFAPILAFLDHEGYADHFKSLYDFSFSFLTSSFYSFSEEDEFVAYLEASRKWAKKSHMTWAHARLCFLLGRLSIRKVKLSQARVYFEEAIHILNGAFEDLSLVATLYINLAAIYLKQRLRHKGSALLEKAGALLACLPDRESSAKHELDVVAYVLRQGIVVGSSPLEARACFLAIRLLLSLGRHEEVLPFAERLQLLSGHPPASEAVASVLSFLYDKKYLPHLAVASVQQHGIQSAQGMSLPIWQVHLVLQNTTKLLGFPSPGWGEVSALACPMLRQALAACEELADRSTQRALCLILSKVYLEHRSPDGAIHYLSQALVLGQLLGEQESFESSLCLAWAYLLASQAKKALDVLEPLLCSLKETESLTQRGVIYNLLGLALQGEGRVNRAAKSYLRALNRAQEVGDVHNQAVAMANLGHLSLKSWAQHPARNYLLQAVRLYCELQASKETDMELVQVFLWLAQVLVSGHQLTHGLLCYEMALLFGLRHRHLKSQLQATKSLCHFYSSVSPNPEACITYHEHWLALAQQLRDREMEGRLLESLGQLYRNLNTARSLRRSLTCIKESLRIFIDLGETDKAAEAWLGAGRLHYLMQEDELVELCLQAAIQTALKSEEPLLALKLYEEAGDVFFNGTRHRHHAVEYYRAGAVPLARRLKAVRTELRIFNKLTELQISLEGYEKALEFATLAARLSTVTEARAGGLSPPGYSVLLPAHV

SEQ ID NO: 215763 - DNA, 2805 bp, Artificial Sequence
  derived and/or modified sequence
atggaggagatctggaaattctccacctatctcaatctggggtatgtttcgatgtgccttgagcatctactgtttgatcacaaatactggctcaactgcattttagtcgaggacaccgaaattcaggtcagtgtcgatgataagcatctcgagaccatttatctgggtctattaatacaggaggggcacttcttctgtagagccctgtgttcggtaacgcccccagccgagaaagagggagaatgtctgaccctgtgtaagaacgagcttattagcgtaaaaatggctgaagctggctcggagttagaaggcgtctctctggttactggtcagcgagggctggtcttggtgtcagcactggagcctctccccctgccctttcaccaatggttcctgaaaaattatccaggtagttgtgggctatctcggaaacgggactggacgggcagctaccagatcgggcgcggtagatgcaaggctttgaccgggtacgagcccggggagaaagacgagctaaatttctaccaaggcgagtccatagaaataataggctttgtgatacccggattgcagtggtttattggaaagtccacctcaagtggccaggtgggatttgtccccacacgcaacatagaccctgactcctattctcccatgtcaagaaatagtgcctttcttagcgatgaggagcggtgcagtctgttggctctcggctcagataaacagactgagtgctcatcattcctgcatacattggcaaggaccgatattaccagcgtgtacagactttctggatttgagtcgatacagaaccccccaaatgacctaagcgctagccagcccgaggggttcaaggaggttagaccaggcagggcatgggaagaacatcaggccgttgggagtaggcaatcctcttcctccgaggactccagtttggaagaggaactcttgtccgctacttccgacagttataggttgcccgagccagacgaccttgatgatcctgaactgttgatggatctgtcaaccgggcaggaggaggaggcagaaaactttgcacctatcctcgcttttctcgatcatgaagggtacgctgatcattttaaaagcctttacgacttcagcttcagcttcctcacgtctagcttttattcattttccgaagaagatgaattcgtggcatacctggaggcaagccggaaatgggccaagaagtcacatatgacgtgggctcatgcccggctgtgtttcttgctcggccggttgagcatccggaaagtcaaactcagtcaggcacgggtgtattttgaagaggcgatccatatcctcaacggcgcatttgaagacttgtcccttgttgcaaccctctacataaacctggccgccatatacctgaaacagcgtctccgccataagggaagcgctctgctggagaaggcaggcgccctgttggcgtgtctgccggatagagagtccagcgcgaaacatgagctggacgtggtggcatacgttctgagacagggcattgtggtcggcagctcgcccctagaggcccgagcttgcttcctcgctataagactgctgctgagcctgggtcgccacgaagaagtgcttcccttcgccgaaagactacagctgctgtcagggcatcccccagcctccgaggcagtggcttctgtcctctcctttttatacgacaaaaagtatctgccacatttggctgtggcctctgtccagcagcacggaatccaatctgcacaggggatgtcattgcctatatggcaggtgcatttggtcttgcagaacaccactaaacttttgggctttcccagtcccggctggggcgaagtgtctgctctggcgtgccccatgctacggcaggccctggccgcctgtgaagagctcgctgacagatctacccagcgggctctctgcctcatcctctcaaaggtttacctagagcaccggtcaccagacggcgctatacactatctaagccaggctctggtgttgggacaattactcggagagcaggaaagctttgagtctagcctgtgcctcgcttgggcgtacctgctggcctcacaggcaaagaaagcccttgacgttctcgagccacttctgtgtagcctgaaagagaccgaatcactgactcagagaggtgtcatttacaatctgttgggccttgcgttacagggcgagggccgtgtcaaccgcgctgccaagagctatttgcgtgccctcaatagggctcaggaggtaggagacgtccacaaccaggctgttgccatggcaaatctggggcacctttccttgaagtcctgggcccagcaccccgccaggaactaccttttacaggcagtcagattgtactgtgaactacaggcaagcaaagaaacagacatggagctggtacaggtgttcctttggctggcacaggtgctggtgtctgggcaccagttgacgcatgggctcctgtgctacgaaatggcactcctgtttggactccggcacagacacttgaaatctaaatacgtcccgtgttgttgggaggcgatcgaaaaaagtgtcggatcttcctttattcatttcttaagccaggtcatttcatttatgtcactgctgtgcgtccaggtttcttttcgacctcccaacccctctgccattagtacggcactgtgcccacagactttgcgccatgctagtccaactatgtctaccgggtggccttggctgtccaactccgggaccggtagatggaaggggggctgttggtcaccatggggaagcttcatcggtacttag

SEQ ID NO: 215764 - DNA, 453 bp, Artificial Sequence
  derived and/or modified sequence
atgagtgaacagatgatgcagagcgtcgggtgcaggattagtctctccgtgtttcaatttctcggcgaccagaggcaggagttggtagcgttccatagactcgcaaccgtatactattctctgcacatgtacgagatggccgaagactgctacctcaaaactttgagtctgtgtcccccctggctccagtctcctaaagaggcactgtattatgctaaagtctactacaggctgggccgactgactttctgtcagcttaaggatgcgcatgacgctactgaatatttcctactggctcttgccgccgccgtattactgggtgacgaagaactgcaggatacgatccgcagccgcctagacaacatttgtcaatctcctctttggcacagtcgcccctccggctgtagctcagaaagagctaggtggttgagcggtggtggcttagcactgtag

SEQ ID NO: 215765 - DNA, 3867 bp, Artificial Sequence
  derived and/or modified sequence
atgggcggttgcttctgcattcctagggaaagaagtcttacacggggccccggcaaagagaccccgagcaaagaccctactgtgtcatccgaatgtattgcgtctagcgagtataaagagaagtgttttttgcctcagaatatcaatcctgatctcactctgtcattttgcgtgaaatcgagaagccggaggtgtgtgaacgggcctctgcaggaggccgctaggcgccgcctgtgggcacttgaaaatgaggatcaggaagtgagaatgctgtttaaggatttgtccgctcgtctagtgtctatccagtctcagcgggcccagttcctgattacttttaagaccatggaggaaatttggaagttctctacttacctcaacttgggatatgtgtctatgtgcctggagcacctgctgttcgatcataagtattggctgaattgcatcttggtggaggacacagaaatccaggtgtccgtggacgacaagcacctggagacaatctatctggggctgctcatccaagagggccatttcttttgtcgcgcactttgtagcgtcacaccacccgctgagaaggaaggggagtgtttgaccctctgtaagaacgagttaatctcagtgaaaatggctgaagcaggatctgaattagagggagtcagcctggtcacaggacagagggggctggtcctcgtatcggccctggaaccactccctcttccttttcatcagtggtttctgaaaaactacccgggtagctgtggcctttccaggaaaagggattggactggcagctaccagatcggccggggtaggtgtaaagccctgaccggctatgagccaggggagaaggatgaattaaatttttatcagggcgagtctattgagatcattggatttgtgatccccggcctccagtggtttatcggcaagtccaccagcagtggacaggtgggttttgtacctacacgaaatatagaccccgatagctattcccccatgtccagaaactcagccttcctcagtgatgaagagcgctgtagtctcctggcgctggggtccgataaacagactgaatgtagttccttcctccacacactagcccgcaccgacattacctccgtgtaccggttgtctggattcgaatccatccagaatcccccaaatgaccttagtgccagtcaacccgagggcttcaaggaagtgcgccccggtagagcctgggaggagcaccaggcagtggggtctaggcagagctctagcagtgaggacagctcgctggaggaggaactgctgtcggctacctccgacagctaccgactgcccgagcctgacgacttggatgacccagagttgttgatggatctgtcaaccgggcaggaagaagaggccgagaatttcgcccccatcctggccttcttggaccatgaggggtatgccgaccatttcaaaagtctttatgacttctctttcagctttttgacttcctcattctactctttttccgaagaagacgagttcgttgcctatctggaggcatctaggaagtgggcgaagaaaagtcatatgacctgggcacatgcgagactctgtttccttcttggccgattatcgattaggaaggtgaaactatctcaagctcgggtatattttgaggaggcaatccacattctcaacggtgcatttgaggacttaagcctggtggcaacactatacatcaacttagcagctatttacttgaaacagaggcttaggcataaaggaagtgctttgctggaaaaggcaggggctctgcttgcttgtctgcctgatcgggagtcttcagcaaaacacgaactggacgtggtcgcctatgttctcaggcagggtatagtcgtgggaagcagccccctcgaagctagggcgtgttttttagctatcaggctcctcctatctctgggcagacatgaagaggtgcttcccttcgcagagcggctgcagttgctctccgggcatccacccgctagtgaagctgtggcttctgtgctgtcattcctctatgataagaagtaccttccacatctggctgtcgcttctgtccaacagcacggaatccaatccgcccagggcatgtccttaccgatatggcaagtccacctggtgctgcagaacaccactaagctcttaggttttccatcacctgggtggggagaagtgtctgcgctagcctgccccatgctgcgccaggcactcgctgcatgcgaggagttagctgaccgctccacacaacgtgcgctctgtttgattctcagcaaggtttacctggaacatagatccccagacggggccattcactacttgagccaggccctggtcctggggcagttgctgggcgagcaggagtcatttgaaagtagcttatgcctggcctgggcctacctgctcgccagtcaagccaaaaaagctctggacgtgctggaaccgctgctgtgctctcttaaggaaaccgagtcccttactcagcgaggcgtcatttataatttgctcggactcgctctccagggggagggccgtgttaatcgtgcggctaagtcttatctgagagccctgaaccgggcccaggaggtcggcgacgtgcataatcaggccgtcgccatggcgaatttgggccacttgagcttgaaatcctgggctcaacaccctgcccggaattatctgttacaagccgtgaggctgtactgtgagttgcaggccagtaaggagactgacatggaactcgtgcaggtgtttctctggctcgcccaagttctggtgtctggccatcagctcactcacggcttgttgtgctatgaaatggcattgctgtttggtctgcggcaccggcacctgaagagtcagctccaggctacgaagagcctgtgccatttttatagcagcgtctcccccaaccccgaggcatgtattacttaccacgaacactggcttgccctagctcagcagctcagggacagggaaatggagggcaggttgttagagtctttagggcagctgtatcggaacctgaacacagcgagaagtctgcgcagaagtcttacttgtattaaggaatccctcagaatctttattgatctgggcgagacagacaaggcggcagaagcatggctgggggcgggacgtctccattacctgatgcaggaggacgaactggtcgaattgtgtctgcaggcggctatccagaccgcactgaagagcgaagaacctctgctggccctgaagctttacgaggaggcgggcgatgtgttctttaacggaaccaggcataggcaccacgccgtagagtattatcgcgcaggggccgtccccctcgcccgtcggttaaaagcagtcagaacagaattgcgtatctttaacaaactcacagaattgcagatttctctggaaggctacgagaaggctctcgagtttgcgactctggccgccagactatccactgtcactggggatcagaggcaggaactggtcgccttccacaggttggccaccgtgtactattcgcttcatatgtacgaaatggccgaagactgctatctgaagaccctgagcctgtgtcccccctggctgcagagtcccaaggaggccctgtattacgccaaggtgtattacaggctcggtcgccttactttttgtcagctgaaagacgcacacgatgccaccgagtacttcctcttggctttggccgcagcagtcttgctaggagatgaggagctgcaggacacaattagatcaaggctggacaacatttgtcagagtccactgtggcacagccgcccgtctggctgctcctccgagcgagccagatggctatcaggtggcggtctggcactgtag

SEQ ID NO: 215766 - DNA, 2181 bp, Artificial Sequence
  derived and/or modified sequence
atggatttgtccactggccaagaggaggaagcggagaacttcgccccaatcctggcttttctcgatcacgaaggatatgccgaccacttcaaaagcctgtacgatttcagtttttcatttctaactagctcattctactcttttagcgaggaagacgagttcgtagcctacctggaagccagccggaagtgggctaaaaaaagtcatatgacctgggcacatgctagactttgtttcctgcttgggagactctccatccgcaaggtaaagttgtcgcaggccagggtgtattttgaagaagcgatacacattctcaatggggcttttgaagatctgtcgctggtagcgacactgtatattaatttggccgccatttatctcaagcaaaggctcaggcacaaaggcagtgcccttttggagaaggccggtgccctactcgcttgtctgccagaccgagagtccagtgccaagcatgaactcgatgtggttgcctacgtcttgcggcaaggaattgtcgtgggttcaagtccactggaagcgcgagcatgtttcctggcgatccgacttctcctgagtctggggcgacatgaggaggtactgccattcgctgaacgcctccagctgctgtctggacatccccctgcaagcgaggccgtggcatcagtgctatcctttttatatgacaagaaatatcttccacacctggctgtagcaagtgtgcagcaacacgggattcagagtgcccaaggcatgtccttgccgatctggcaggtccatctggttctccagaacacgacaaaattacttggttttccctcccccggatggggcgaagtgagtgccctggcctgtccaatgttgaggcaagctcttgccgcatgcgaggagctggctgacaggtcgacacaacgggctctgtgtctgattctgagcaaggtttatctggagcacagatcgcccgatggtgccatccattatctgagtcaggcccttgtactcggccagctgctgggggagcaggaatccttcgaatccagtctgtgcttggcgtgggcctacctgcttgcgagccaggcaaagaaagcactagacgtcctagagccgctgctctgttcgctcaaggagaccgaatcactgactcaacgcggcgtaatttataatcttttgggcttagccctgcagggagaggggagagttaatagagcggcgaaaagttacctgagggccctgaatcgggcgcaggaggtgggcgatgtgcataaccaggcggtggccatggcaaacctcggccacctgtctctcaaatcctgggcgcaacatcctgccagaaactatctccttcaagcagttcgtctctactgcgagctgcaggcctccaaagagacagacatggaactggtacaggttttcctgtggctcgctcaagtcctcgtgtctgggcaccaattaacacatgggctgttatgttacgaaatggctttgctgttcggcctgcgacatagacatctcaagtctcagctccaggcaaccaagtccctgtgccacttctattctagtgttagccccaaccctgaggcgtgcataacttaccatgaacattggctcgcccttgcacagcagctgagagatcgtgagatggaaggccgccttttggagtctctcgggcaactgtaccggaacctgaacaccgctaggtccctgaggaggagcctgacatgtatcaaagagtcattgcgcattttcattgacctcggtgagaccgataaggcagcagaggcttggctgggcgcaggacggttgcactatcttatgcaagaggatgagcttgtagaactgtgccttcaggcagcgatacagaccgccctgaaaagcgaagaaccccttctcgcactgaagttgtatgaggaagccggagatgttttcttcaatgggacaaggcatcggcaccacgccgtggagtattaccgggctggcgccgtgcctctggctcgcaggcttaaagcagtgaggaccgaattacgcatttttaacaaacttaccgagctccagatttcacttgaagggtacgagaaagctttggaatttgctaccctagctgccaggctgtctactgtaacagaggcccgcgccggcggcctttctcctccgggttattccgtcctcttgccagcccatgtttag

SEQ ID NO: 215767 - DNA, 2805 bp, Artificial Sequence
  derived and/or modified sequence
atggaggagatctggaagttcagcacctacctgaacctgggctacgtgtccatgtgcctggagcacctgctgtttgaccacaagtactggctgaactgcatcctggtggaggacacagagatccaggtgtctgtggatgacaagcacctggagaccatctacctgggcctgctgatccaggagggccacttcttctgccgggccctgtgcagcgtgaccccacctgctgagaaggagggagaatgtctgaccctgtgcaagaatgagctgatctctgtgaagatggccgaggccggcagcgagctggagggcgtgtccctggtgacaggccagaggggcctggtgctggtgtctgccctggagcccctgcccctgcccttccaccagtggttcctgaagaactacccaggcagctgtggcctgagcaggaagagggactggacaggcagctaccagatcggccggggccgctgcaaggccctgaccggctatgagcccggggagaaggatgagctgaacttctaccagggcgagagcattgagatcattggatttgtgattcctggcctgcagtggttcatcggcaagagcaccagcagcggccaggtgggctttgtgcccaccagaaatattgatcctgacagctacagccccatgagcagaaattctgccttcctgagtgatgaggagcgctgcagcctgctggccctgggcagtgacaagcagacagagtgcagcagcttcctgcacaccctggccaggacagacatcacctctgtgtaccgcctgagcggctttgagagcatccagaaccccccaaatgacctgagcgccagccagcctgagggcttcaaggaggtgcggcccggccgggcctgggaggagcaccaggccgtgggcagccggcagagcagcagcagcgaggacagcagcctggaggaggagctgctgagcgccaccagtgacagctaccgcctgcctgagccagatgacctggatgatcctgagctgctgatggacctgagcacaggccaggaggaggaggccgagaactttgcccccatcctggccttcctggaccacgagggctatgctgaccacttcaagagcctgtatgacttctccttctccttcctgaccagcagcttctacagcttctctgaagaagatgaatttgtggcctacctggaggccagcaggaagtgggccaagaagagccacatgacctgggcccacgcccggctgtgcttcctgctgggccgcctgagcatcaggaaggtgaagctgagccaggcccgggtgtactttgaggaggccatccacatcctgaatggagcctttgaggacctgagcctggtggccaccctgtacatcaacctggccgccatctacctgaagcagaggctgcggcacaagggcagcgccctgctggagaaggccggggccctgctggcctgcctgcctgaccgggagagcagcgccaagcatgagctggatgtggtggcctacgtgctgcggcagggcatcgtggtgggcagcagccccctggaggcccgggcctgcttcctggccatccggctgctgctgagcctgggcagacatgaggaggtgctgccctttgctgagcggctgcagctgctgagcggccaccccccagccagcgaggccgtggcctctgtgctgtccttcctgtatgacaagaagtacctgccccacctggccgtggcctctgtgcagcagcacggcatccagagcgcccagggcatgagcctgcccatctggcaggtgcacctggtgctgcagaacaccaccaagctgctgggcttccccagccctggctggggcgaggtgtctgccctggcctgccccatgctgcggcaggccctggccgcctgtgaggagctggccgacaggagcacccagagggccctgtgcctgatcctgagcaaggtgtacctggagcacaggagcccagatggagccatccactacctgagccaggccctggtgctgggccagctgctgggggagcaggagagctttgagagcagcctgtgcctggcctgggcctacctgctggccagccaggccaagaaggccctggatgtgctggagcccctgctgtgcagcctgaaggagacagagagcctgacccagaggggcgtcatctacaacctgctgggcctggccctgcagggcgagggccgggtgaacagagctgccaagagctacctgcgggccctgaacagagcccaggaggtgggagatgtgcacaaccaggccgtggccatggccaacctgggccacctgagcctgaagtcctgggcccagcacccagccaggaactacctgctgcaggccgtgcggctgtactgtgagctgcaggccagcaaggagacagacatggagctggtgcaggtgttcctgtggctggcccaggtgctggtgtctggccaccagctgacccacggcctgctgtgctatgagatggccctgctgtttggcctgcggcaccgccacctgaagagcaaatatgtgccctgctgctgggaggccatcgagaagtctgtgggcagcagcttcatccacttcctgagccaggtgatctccttcatgagcctgctgtgtgtgcaggtgtccttccggccccccaaccccagcgccatcagcacagccctgtgcccccagaccctgcggcatgccagccccaccatgagcacaggctggccctggctgagcaacagcggcaccggccgctggaagggcggctgctggagcccctggggcagcttcatcggcacctag

SEQ ID NO: 215768 - DNA, 453 bp, Artificial Sequence
  derived and/or modified sequence
atgtctgagcagatgatgcagagcgtgggctgccgcatcagcctgagcgtcttccagttcctgggggaccagaggcaggagctggtggccttccaccggctggccaccgtgtactacagcctgcacatgtatgagatggccgaggactgctacctgaagaccctgagcctgtgccccccctggctgcagagccccaaggaggccctgtactatgccaaggtgtactaccgcctgggccgcctgaccttctgccagctgaaggatgcccatgatgccacagagtacttcctgctggccctggccgctgctgtgctgctgggagatgaggagctgcaggacaccatccgcagccggctggacaacatctgccagagccccctgtggcacagccggcccagcggctgcagcagcgagcgggcccgctggctgagcggcggcggcctggccctgtag

SEQ ID NO: 215769 - DNA, 3867 bp, Artificial Sequence
  derived and/or modified sequence
atgggcggctgcttctgcatcccccgggagaggagcctgacccggggccctgggaaggagacccccagcaaggaccccaccgtgtccagtgaatgtattgccagcagcgagtacaaggagaagtgcttcctgccccagaacatcaacccagacctgaccctgtccttctgtgtgaagagccgcagcagaagatgtgtgaatggccccctgcaggaggccgcccggcggcggctgtgggccctggagaatgaagaccaggaggtgaggatgctgttcaaggacctgagcgcccggctggtgtccatccagagccagagggcccagttcctgatcaccttcaagaccatggaggagatctggaagttcagcacctacctgaacctgggctacgtgtccatgtgcctggagcacctgctgtttgaccacaagtactggctgaactgcatcctggtggaggacacagagatccaggtgtctgtggatgacaagcacctggagaccatctacctgggcctgctgatccaggagggccacttcttctgccgggccctgtgcagcgtgaccccacctgctgagaaggagggggagtgcctgaccctgtgcaagaatgaactcatctctgtgaagatggccgaggccggcagcgagctggagggcgtgtccctggtgacaggccagaggggcctggtgctggtgtctgccctggagcccctgcccctgcccttccaccagtggttcctgaagaactacccaggcagctgtggcctgagcaggaagagggactggacaggcagctaccagatcggccggggccgctgcaaggccctgaccggctatgagcctggagagaaggatgagctgaacttctaccagggcgagagcattgagatcatcggcttcgtcatccctggcctgcagtggttcatcggcaagagcaccagcagcggccaggtgggctttgtgcccaccaggaacatcgaccctgacagctacagccccatgagcaggaacagcgccttcctgagtgatgaggagcgctgcagcctgctggccctgggcagtgacaagcagacagaatgtagcagcttcctgcacaccctggccaggacagacatcacctctgtgtaccgcctgagcggctttgagagcatccagaaccccccaaatgacctgagcgccagccagcctgagggcttcaaggaggtgcggcccggccgggcctgggaggagcaccaggccgtgggcagccggcagagcagcagcagcgaggacagcagcctggaggaggagctgctgagcgccaccagtgacagctaccgcctgcctgagccagatgacctggatgatcctgagctgctgatggacctgagcacaggccaggaggaggaggctgaaaattttgcccccatcctggccttcctggaccacgagggctacgccgaccacttcaagagcctgtatgacttctccttctccttcctgaccagcagcttctacagcttcagcgaggaggatgaatttgtggcctacctggaggccagcaggaagtgggccaagaagagccacatgacctgggcccacgcccggctgtgcttcctgctgggccgcctgagcatcaggaaggtgaagctgagccaggcccgggtgtactttgaggaggccatccacatcctgaatggagcctttgaggacctgagcctggtggccaccctgtacatcaacctggccgccatctacctgaagcagaggctgcggcacaagggcagcgccctgctggagaaggccggggccctgctggcctgcctgcctgaccgggagagcagcgccaagcatgagctggatgtggtggcctacgtgctgcggcagggcatcgtggtgggcagcagccccctggaggcccgggcctgcttcctggccatccggctgctgctgagcctgggcagacatgaggaggtgctgccctttgctgagcggctgcagctgctgagcggccaccccccagccagcgaggccgtggcctctgtgctgtccttcctgtatgacaagaagtacctgccccacctggccgtggcctctgtgcagcagcacggcatccagagcgcccagggcatgagcctgcccatctggcaggtgcacctggtgctgcagaacaccaccaagctgctgggcttccccagccctggctggggcgaggtgtctgccctggcctgccccatgctgcggcaggccctggccgcctgtgaggagctggccgacaggagcacccagagggccctgtgcctgatcctgagcaaggtgtacctggagcacaggagcccagatggagccatccactacctgagccaggccctggtgctgggccagctgctgggggagcaggagagctttgagagcagcctgtgcctggcctgggcctacctgctggccagccaggccaagaaggccctggatgtgctggagcccctgctgtgcagcctgaaggagacagagagcctgacccagaggggcgtcatctacaacctgctgggcctggccctgcagggcgagggccgggtgaacagagctgccaagagctacctgcgggccctgaacagagcccaggaggtgggagatgtgcacaaccaggccgtggccatggccaacctgggccacctgagcctgaagtcctgggcccagcacccagccaggaactacctgctgcaggccgtgcggctgtactgtgagctgcaggccagcaaggagacagacatggagctggtgcaggtgttcctgtggctggcccaggtgctggtgtctggccaccagctgacccacggcctgctgtgctatgagatggccctgctgtttggcctgcggcaccgccacctgaagagccagctgcaggccaccaagagcctgtgccacttctacagctctgtgagccccaaccctgaggcctgcatcacctaccacgagcactggctggccctggcccagcagctgcgggaccgggagatggagggccgcctgctggagagcctgggccagctgtacagaaacctgaacacagcccggagcctgcggcgcagcctgacctgcatcaaggagagcctgcgcatcttcatcgacctgggggagacagacaaggctgctgaggcctggctgggcgccggccgcctgcactacctgatgcaggaggatgagctggtggagctgtgcctgcaggccgccatccagacagccctgaagtctgaggagcccctgctggccctgaagctgtatgaggaggccggagatgtgttcttcaacggcaccaggcaccgccaccacgctgtggagtactaccgggccggggctgtgcccctggcccggcggctgaaggctgtgaggacagagctgcgcatcttcaacaagctgacagagctgcagatcagcctggagggctatgagaaggccctggagtttgccaccctggccgcccggctgagcacagtgactggagaccagaggcaggagctggtggccttccaccggctggccaccgtgtactacagcctgcacatgtatgagatggccgaggactgctacctgaagaccctgagcctgtgccccccctggctgcagagccccaaggaggccctgtactatgccaaggtgtactaccgcctgggccgcctgaccttctgccagctgaaggatgcccatgatgccacagagtacttcctgctggccctggccgctgctgtgctgctgggagatgaggagctgcaggacaccatccgcagccggctggacaacatctgccagagccccctgtggcacagccggcccagcggctgcagcagcgagcgggcccgctggctgagcggcggcggcctggccctgtag

SEQ ID NO: 215770 - DNA, 2181 bp, Artificial Sequence
  derived and/or modified sequence
atggacctgagcacaggccaggaggaggaggccgagaactttgcccccatcctggccttcctggaccacgagggctatgctgaccacttcaagagcctgtatgacttctccttctccttcctgaccagcagcttctacagcttctctgaagaagatgaatttgtggcctacctggaggccagcaggaagtgggccaagaagagccacatgacctgggcccacgcccggctgtgcttcctgctgggccgcctgagcatcaggaaggtgaagctgagccaggcccgggtgtactttgaggaggccatccacatcctgaatggagcctttgaggacctgagcctggtggccaccctgtacatcaacctggccgccatctacctgaagcagaggctgcggcacaagggcagcgccctgctggagaaggccggggccctgctggcctgcctgcctgaccgggagagcagcgccaagcatgagctggatgtggtggcctacgtgctgcggcagggcatcgtggtgggcagcagccccctggaggcccgggcctgcttcctggccatccggctgctgctgagcctgggcagacatgaggaggtgctgccctttgctgagcggctgcagctgctgagcggccaccccccagccagcgaggccgtggcctctgtgctgtccttcctgtatgacaagaagtacctgccccacctggccgtggcctctgtgcagcagcacggcatccagagcgcccagggcatgagcctgcccatctggcaggtgcacctggtgctgcagaacaccaccaagctgctgggcttccccagccctggctggggcgaggtgtctgccctggcctgccccatgctgcggcaggccctggccgcctgtgaggagctggccgacaggagcacccagagggccctgtgcctgatcctgagcaaggtgtacctggagcacaggagcccagatggagccatccactacctgagccaggccctggtgctgggccagctgctgggggagcaggagagctttgagagcagcctgtgcctggcctgggcctacctgctggccagccaggccaagaaggccctggatgtgctggagcccctgctgtgcagcctgaaggagacagagagcctgacccagaggggcgtcatctacaacctgctgggcctggccctgcagggcgagggccgggtgaacagagctgccaagagctacctgcgggccctgaacagagcccaggaggtgggagatgtgcacaaccaggccgtggccatggccaacctgggccacctgagcctgaagtcctgggcccagcacccagccaggaactacctgctgcaggccgtgcggctgtactgtgagctgcaggccagcaaggagacagacatggagctggtgcaggtgttcctgtggctggcccaggtgctggtgtctggccaccagctgacccacggcctgctgtgctatgagatggccctgctgtttggcctgcggcaccgccacctgaagagccagctgcaggccaccaagagcctgtgccacttctacagctctgtgagccccaaccctgaggcctgcatcacctaccacgagcactggctggccctggcccagcagctgcgggaccgggagatggagggccgcctgctggagagcctgggccagctgtacagaaacctgaacacagcccggagcctgcggcgcagcctgacctgcatcaaggagagcctgcgcatcttcatcgacctgggggagacagacaaggctgctgaggcctggctgggcgccggccgcctgcactacctgatgcaggaggatgagctggtggagctgtgcctgcaggccgccatccagacagccctgaagtctgaggagcccctgctggccctgaagctgtatgaggaggccggagatgtgttcttcaacggcaccaggcaccgccaccacgctgtggagtactacagagctggagctgtgcccctggcccggcggctgaaggctgtgaggacagagctgcgcatcttcaacaagctgacagagctgcagatcagcctggagggctatgagaaggccctggagtttgccaccctggccgcccggctgagcacagtgacagaggcccgggccggcggcctgagccccccaggctacagcgtgctgctgcctgcccacgtgtag

SEQ ID NO: 215771 - DNA, 2805 bp, Artificial Sequence
  derived and/or modified sequence
atggaggagatctggaagttcagcacctacctgaacctgggctacgtaagtatgtgccttgagcacttattgtttgaccacaaatactggctcaactgcatcctggtagaggacactgaaatacaggtgagtgtcgatgacaaacacttggaaaccatttaccttggtctgttgatacaggaagggcacttcttctgccgggcgctgtgtagcgtcaccccccccgccgagaaagaaggcgagtgtctaaccctgtgtaagaatgagctaatcagtgtgaaaatggcagaggccggcagtgaactcgagggcgtaagcttggtcaccgggcagcggggcctagtactggtctcggccttggagccgctaccgctcccattccaccaatggtttttgaagaattaccctggctcgtgcggtctgagtagaaaaagggactggaccggcagctaccagatcgggcggggccgttgtaaggccctcacggggtacgagccaggcgaaaaggacgaactgaatttctatcagggtgagagcattgaaattataggctttgtcatcccagggctgcagtggtttatcggaaagagcactagcagcggccaagtaggcttcgtgcccacccgcaacattgacccagattcctatagcccgatgagtagaaactcagcttttcttagtgacgaggagagatgctctctgctggcccttgggtctgataaacagaccgagtgcagcagttttctgcacacactggcacgcaccgacataacaagtgtctataggctaagtgggtttgaatcaatccaaaacccccccaacgacctatcggcgtcacagcccgaaggattcaaggaggttagaccagggagggcctgggaggaacaccaagctgtggggtcccgccagagcagcagttctgaagactcgtcacttgaggaggagctcctctctgcgacctctgactcataccggctgccggagccagacgacctcgatgacccagaattgctgatggacctttctaccggacaggaggaagaggcagagaattttgccccgattttggcgtttttagatcatgaaggctatgccgaccacttcaaatccctgtacgacttttcatttagctttctgacgtcctctttctacagtttttctgaagaggatgaatttgtagcctacttagaggcatcaaggaagtgggctaagaagagccatatgacctgggcccatgcacggctctgctttttgttaggtcggctgtccattcgcaaagtcaaactgagccaggcccgggtctatttcgaggaggcaatccatattcttaacggcgctttcgaagatctatctctggtcgctactctctatatcaaccttgccgctatctacctcaagcagcgattgaggcataaagggtcagctcttttggagaaagcaggcgctctgctcgcctgtctgcccgatagggagtcatccgcaaaacacgaactcgacgtggtcgcctacgtgctgagacagggtattgtggtggggtcttctccactggaggcgcgagcttgctttttagcaattcggttattactctcactcgggaggcacgaggaggttctgccatttgctgaacggcttcagctcctgtcgggccatccccccgcatccgaggccgtggcctctgtactgagctttctgtacgacaaaaaatatttgccccacctcgctgtggcttccgttcagcagcatggtattcagtctgctcaggggatgtctttgcccatatggcaggtgcacctggtgctgcagaacacgaccaaactgctgggctttccaagccccggatggggggaggtgagcgccctggcttgccctatgctgagacaggccctggccgcttgtgaagagctggctgaccgttcaactcaacgagccctctgtttgattttgagcaaggtttatctggagcaccgatcgccagacggtgccatccactatctgtctcaggccctggtgctgggtcagttgcttggcgaacaggagagtttcgaaagttctctctgcctagcgtgggcatacctgctggcctcacaggcgaaaaaagccctagatgttctcgagcccctgttatgctcccttaaggaaaccgaatcattgactcagcgaggggtgatctacaatttgctgggcttggctttgcagggcgagggacgggttaatcgggcagccaagagttatctgagggcccttaatcgcgcccaggaggtgggcgacgtgcacaatcaagctgtggcgatggcaaacctcggtcacctgagtctgaagtcttgggctcagcacccagcccggaattacctactccaggctgtgcgtctgtattgcgagcttcaggcctctaaggagacggatatggaattggtgcaggtcttcctgtggctggcacaggttcttgtgagtggtcaccaactcacccatggcctgctgtgttacgagatggccctccttttcgggctgcgccaccggcacctcaagagtaagtatgtgccatgttgctgggaggccattgagaagagcgtcggcagcagcttcatccattttctgtctcaggttattagttttatgagcctgctgtgcgtgcaggtctcttttcgcccccctaatcctagtgctatctccaccgcgctttgcccacagacacttagacacgctagtcctacaatgtctaccggttggccttggctcagtaacagcggcacggggcggtggaaaggggggtgttggagcccatgggggtccttcattggaacctag

SEQ ID NO: 215772 - DNA, 453 bp, Artificial Sequence
  derived and/or modified sequence
atgagcgagcagatgatgcagagcgtgggctgccggatcagcctgagcgtctttcaatttctgggcgaccagaggcaggagttagtcgccttccaccgcctggcaacggtctattattccctccacatgtacgaaatggcagaggactgctacctgaagacattatccttatgtcctccatggcttcagtctcccaaagaggccctgtactacgccaaagtttattacagactcggcaggctgaccttctgccagctaaaggacgcccatgatgccacagagtactttttactggccctcgcggctgccgttctgctgggggatgaggaactccaggataccatccgctcccgtctggataatatttgtcagagcccgctgtggcacagcagaccatccggctgttctagtgagcgggcccgatggctgtcaggcggcggcctcgccctatag

SEQ ID NO: 215773 - DNA, 3867 bp, Artificial Sequence
  derived and/or modified sequence
atgggcggctgcttctgcatcccccgggagcggagcctgacccggggccccggcaaggagacccccagcaaggaccctactgtttcttccgagtgcatcgcctccagtgaatacaaagaaaaatgttttctgcctcagaatattaatcctgacctgaccctcagcttctgtgtgaaaagtcggagtcggcgctgtgtcaatggacctctacaggaagcagcacggaggaggctgtgggctttggaaaacgaggatcaagaggtccgcatgctgtttaaagacctttctgctcgccttgtgtctattcagtcacagagggcccagtttttaattactttcaaaacaatggaggagatttggaaattctcaacttacttgaacctcggatacgtctctatgtgcttggagcatctcctctttgatcataagtattggctgaactgtatactggtggaagataccgagatccaggtgtccgtggacgacaagcatttggagaccatatatctgggactcctgatacaggagggtcactttttctgccgcgctttgtgctctgttactcccccagctgagaaggaaggcgagtgcctcacactgtgtaaaaatgaactaatctcggtgaaaatggcagaggcaggctcagagcttgaaggcgtgtccctcgttaccggacagcgtgggctggtgctggtgtccgccttagaacccctgcccctgcccttccatcagtggttcctcaaaaactacccaggatcatgcggcctgagtcgaaaacgcgactggaccggatcataccagatcggccggggcaggtgtaaagctcttaccggctacgagccgggtgaaaaggacgagctcaatttctatcaaggggaatcaatagagattattgggttcgtcattcccggacttcagtggttcatcggcaaaagtacctcaagcggccaagttgggtttgtgcctacccggaacattgacccagactcctattcccccatgtccagaaattccgctttcttgagcgatgaagagaggtgttccctacttgcccttggctccgataaacagaccgagtgcagttcctttctgcatacactggccaggacggacattacgagtgtttatcggctgtcaggctttgagtctatccagaatccccctaacgacctaagcgcctctcagcctgagggctttaaggaggtgcgtccaggacgtgcttgggaggaacaccaggccgtgggtagtcggcagtcttcttcatcggaggattcaagcctggaggaagagttgctatccgcaacctctgatagctaccgcttacccgagcctgatgacttggacgaccccgaattattgatggacctgagcaccggtcaggaggaagaggccgaaaatttcgcccctatcctggccttcttggatcatgaaggctacgccgaccattttaagagcctgtatgactttagtttcagcttccttacttctagtttttattcttttagtgaggaagatgagttcgtggcgtatttggaagcttctcggaagtgggccaaaaagagtcacatgacttgggctcatgcccggctgtgtttcttattagggaggctgtccatccgcaaggttaaactgtctcaggcacgggtatactttgaagaggccatacacatcctgaatggcgcgttcgaggatctatctttggttgccactctatatatcaatctggcggctatttatctgaagcagagactgcgccataaaggttctgccctgctggagaaggctggagcgcttttggcatgcctccctgacagagagtcatcagctaaacacgaactggatgtggtcgcttatgtgctgcgccagggcatcgtggtcggctcttccccgctggaagcccgcgcctgcttccttgccatcaggcttctactcagcctgggtcgccacgaggaggtgctgccatttgcggaaagactgcagttgttaagtggtcatccacccgctagcgaagccgtcgcgagtgttctgtccttcctgtacgacaagaaatatctacctcacctggccgtggcctcagtgcagcagcacggtatccaatcagcgcaggggatgtccctgcctatctggcaggtgcacctggtcctgcaaaacactaccaaactgctcggcttcccctctccagggtggggagaggtgtcagcattggcttgtccaatgcttcgccaggctctggccgcctgcgaagaactggctgataggagcacccagcgagccctatgtttgatactgtcgaaggtctacttggaacataggagtcccgatggggcaatacattacctgagccaggccctcgtgcttggccagctgttgggggagcaggagtcctttgaaagctccctctgcctggcgtgggcctacttactggcctcccaggcgaagaaggcgctggatgtgctcgagccactactgtgtagcctgaaggaaactgaatctcttactcaacggggagtgatctacaatctgctgggtctagctcttcagggagagggaagagtcaatcgggccgccaagagctatctacgcgcgcttaatcgcgcgcaagaggtcggtgatgtccacaatcaggccgtggctatggcgaatctgggacatctgagcctgaagtcttgggctcagcatcctgcgcggaactatctcctccaggctgtcaggttgtactgtgaactgcaggccagcaaagaaacggatatggagttggtacaggtatttctatggctcgctcaggtgctagtatctggccatcagcttactcacggccttttatgctacgaaatggccttgctgtttggcttacggcacaggcatctgaaaagtcagctgcaggctacaaagtcgttatgccatttttactcctcagtgtcacccaatcctgaggcctgcattacgtatcatgagcattggctcgcgctggcccagcagttacgggatagggagatggaagggagactacttgaatcactcgggcagttgtatcgaaatttaaacacagcccggtcactccgccgatccctcacatgtattaaagagtctctgagaatttttatagatctgggcgagactgacaaggcagcagaggcatggttaggtgcagggaggctgcattaccttatgcaggaagatgagctggtggaactctgcctccaggcagccattcagaccgctcttaagtcagaggaacctcttctggcacttaagctgtatgaagaggcaggggatgtgtttttcaacgggaccaggcacagacatcacgccgtggagtattacagagccggcgcagtgccattagcacggcgcctgaaggccgttcgaacggagctgcgtatctttaataagctaactgagttacagataagtctggagggttatgagaaggctctcgaattcgctacgttagctgctcggctgtcaacggttacaggagatcaaaggcaggagctcgttgctttccaccggttggcgaccgtctattactcattgcacatgtacgaaatggctgaagactgttatctgaagacactgagcctgtgcccgccctggctccagtcccccaaagaggccctgtactacgccaaggtttactatagactgggccgtttgaccttttgccagcttaaggacgcacatgatgccaccgaatatttcttattggccctggctgcggcggtcctgctgggggatgaggagctacaggacacaattcgcagcagactggacaacatatgccagtcccccctgtggcactcaagaccctccggctgcagtagcgaacgggccaggtggctatccggaggcggcctagccctctag

SEQ ID NO: 215774 - DNA, 2181 bp, Artificial Sequence
  derived and/or modified sequence
atggacctgagcaccggccaggaggaggaggccgagaacttcgcccctattctcgccttcctggaccatgaggggtacgcggaccacttcaaaagtctgtacgacttcagtttttcttttcttaccagcagtttctatagcttcagcgaagaggatgagtttgtggcctatctggaggcctccaggaagtgggccaagaagtcccatatgacatgggcgcacgctagactgtgctttctcctgggaaggctttccattagaaaagtgaaactatcccaggctcgggtgtacttcgaagaggccatccacatcttgaacggggctttcgaggatctatccctcgttgccacactctacattaacctggctgcgatctaccttaagcagagattaaggcacaaggggagcgcgctacttgaaaaggccggtgcattacttgcatgccttccggatcgtgagtcaagtgccaaacacgagctggacgttgtggcctacgtcctccggcaaggcattgtggtagggtcatcacctttggaggctcgcgcttgcttcctagctattcgtctgcttctgtctctgggccgacatgaagaggtccttccgtttgctgaacgcctgcagctactgagcggccacccacctgccagtgaggctgtggcgtccgtacttagctttctctacgacaagaaatatttgccccacctagctgttgcaagcgtacagcagcatggaattcagtctgcccagggcatgagcctgccgatttggcaagtacaccttgtgttgcagaacactaccaagctgctgggctttccttctccgggatggggtgaagtgtcagccctcgcttgcccgatgctacgccaagcgctggctgcctgtgaggaactggcagatcgaagtacccaaagggctttatgtctcatcctgagtaaagtgtatttggaacatcggtcgccagacggggcaatccattatctctcacaggccctggtgcttggacagctcttgggagagcaggagtctttcgagtccagtctgtgcctagcatgggcttacctgctggcgtcccaggccaaaaaggcccttgacgttctggagcctcttctgtgctcccttaaggagacggaatcacttactcagagaggcgtcatctataacttactcggattggctctgcagggcgagggacgggttaatagagcagcaaaaagctatctaagagcccttaaccgtgctcaggaggtgggggacgtgcacaaccaagcagtcgcaatggcaaacctggggcacctgagtctcaaatcttgggcccaacatccggctagaaactatctgttacaggccgtgcgactgtactgtgagctgcaggcctccaaggaaacagacatggaactggtccaggtgtttctctggctggcgcaagtgcttgttagtggacaccaactgacgcatggtcttctatgttacgagatggccttattgttcggtctgcgtcaccgtcacttgaaatcccagcttcaggcaacaaagtcactctgtcacttctattccagcgtgagtccaaaccctgaggcgtgcatcacctaccatgaacattggctagctctggctcagcagttgagagaccgtgaaatggagggtcgcctcctcgaaagtctgggccaactctataggaaccttaatacagctcgttctctgagacgtagtctcacttgcataaaagagagtctgagaatcttcatcgatctgggggagacagataaggccgccgaggcttggttaggcgccggccgcttgcactatctgatgcaggaagatgagctggtggaattgtgcctgcaggccgcaatccagacagccttaaaatctgaggagccactgctggctctaaagctgtacgaggaggctggtgatgtcttttttaatggcacccggcatcggcatcacgcagtcgagtactacagggccggggcggttcccttggcccgccggctcaaggcggtgcgcacggagctgagaatctttaataaactcaccgagttacagatctccttggaaggatacgaaaaggctctagagtttgcaacgcttgcggcccggttgagtactgttaccgaggctagggccggtggcctctccccacccggctactcagtcttactccccgcgcacgtgtag

SEQ ID NO: 215775 - DNA, 2805 bp, Artificial Sequence
  derived and/or modified sequence
atggaagaaatttggaaattttcaacatacttgaaccttggatacgtctcaatgtgtctggagcatctcctctttgatcataagtactggctgaattgcatattagtggaagacaccgaaatacaggtgagtgtggacgacaaacatctcgagacaatatacctgggccttctcatccaggaagggcatttcttttgtcgcgcactctgttcagtgacgcctcccgctgagaaggaaggagaatgcctgactctgtgtaaaaacgaacttatctctgtgaaaatggccgaagccggtagtgaactagagggcgtcagcctcgtgaccggtcagcggggattggttctggtttccgcactggagccactgcctctgccatttcatcagtggtttttgaaaaattatcctggcagttgcggattatcacggaaaagagattggacaggctcctaccaaatcggtaggggcagatgtaaagccctcactggctatgaacctggcgagaaagacgaattgaacttctatcagggagaaagtatagagatcataggatttgtaatccctggcctgcagtggttcataggcaagtcaaccagcagcgggcaggtcggtttcgtgcccacccggaatatagacccagacagttattcccccatgtccagaaactcggcctttctctctgacgaggagagatgtagtctcctggccctgggctccgacaagcagaccgaatgctcttctttcctacatacattggctaggaccgatattacatcagtgtacagactcagcggctttgaatcaatacaaaaccccccaaacgacctgagcgcaagccaacccgagggctttaaggaggtcagaccgggacgcgcatgggaggagcatcaggccgtgggttcccgacagtccagtagttcagaggactcttctttggaagaagagttgttatccgccacaagcgattcctaccgcttacctgagccagatgatctggatgatccggaacttctgatggacctcagtactggacaggaggaggaggcggaaaatttcgctccaatcctggcgttcctcgaccacgaagggtacgccgatcacttcaagagcctttatgactttagtttctcctttctgacgtccagcttttattctttcagcgaggaagatgagtttgtggcttacttggaggctagtaggaaatgggcaaagaaatctcatatgacgtgggcgcatgctcgcttatgttttctgctcggcaggctgtctatcaggaaggtcaagcttagccaagctcgcgtgtactttgaagaagcgattcacatcctgaatggtgcattcgaagacctgtctctggtagccaccctttatataaacctggccgcaatctacctcaagcagcgcctccggcacaagggtagcgccctcctcgagaaagccggtgccctcctggcctgtctgccagacagagagagctccgcaaagcacgagctggatgtcgtcgcctacgtcttacggcagggaatcgttgttggttcctcccccctggaggctagagcctgctttctggccattcgcctgctgttgtccctggggaggcacgaggaggtactcccctttgctgagaggctccagttgcttagtggccaccccccagcctcggaagccgtggcatccgtcctgtcctttttatatgataagaagtaccttccccacctggccgtcgcttctgtacaacagcatggcatccaaagcgcacaggggatgtccctgcctatctggcaggtgcatctggttcttcagaatactacaaagctgctcggatttcctagtcccggttggggtgaggtgagcgccctggcttgccctatgctgaggcaggctctggctgcctgcgaggaactggcagataggagcacccagcgagctctgtgtttgatcctcagtaaagtatacctcgagcatagaagcccggatggcgctattcactatctgagtcaggcccttgtgctgggccagctgctaggcgaacaggaatcatttgagtcctccctgtgtctggcgtgggcgtatttgctcgcttctcaggctaagaaagctctagatgttctggagccactcctttgtagtctcaaggagactgagagtttaactcagcgtggtgtgatatacaatctgctgggcctggccttacagggcgagggtcgcgtaaaccgagcggctaaatcttacttacgggcacttaacagggcccaggaagtcggagatgtgcataatcaggcagtggctatggcaaatttggggcacctctccctgaagagctgggctcagcaccctgcccgaaactatttgctgcaagccgtgcgcctttactgcgagctgcaagcatctaaagagaccgacatggaactggtgcaggtattcttgtggttggcccaggttcttgtgagtggccatcagctgacacatgggttgctctgttacgaaatggccctgctgtttggcctgaggcatcgacatctgaagtccaagtacgtcccctgctgctgggaggctattgagaaatcagtcggctcctcatttatccatttcctatcacaggtgatatctttcatgagtctcctctgtgtccaggtgagtttcagacctcctaatccttcagccatctccacggcactgtgtccccagaccttacggcacgcttcacctacgatgtctacaggttggccatggctgtcgaactcaggaaccgggcgatggaaaggaggctgctggagtccctggggctcatttattggaacctag

SEQ ID NO: 215776 - DNA, 453 bp, Artificial Sequence
  derived and/or modified sequence
atgagcgagcagatgatgcagagcgtcggttgccgcatctctttatcagtcttccagttcctcggagaccagagacaggagctcgtggcttttcacaggcttgccactgtgtattattcattacatatgtacgagatggccgaggactgttacctgaaaacactcagcctctgtcccccttggctgcagagtcccaaagaggccctttattacgcgaaggtgtattataggcttggacgactgactttctgtcagctcaaggatgctcacgatgctacagaatattttctgctcgcccttgccgctgcagtgttattgggcgatgaagaactgcaggataccatccggtccagactggacaatatctgccagagcccgttgtggcatagccgcccatctggctgtagttctgagagggccaggtggctttctggaggcggactggccctttag

SEQ ID NO: 215777 - DNA, 3867 bp, Artificial Sequence
  derived and/or modified sequence
atgggaggatgcttctgtatacccagagagcgcagtttgacccggggaccgggaaaggagactccatccaaggatcccacagtgtcatccgaatgcatcgcctcgagcgagtacaaggagaaatgtttcctgccccagaatataaacccagaccttaccctgagcttttgcgttaagtctcgtagccggcgatgtgtaaacggcccattgcaggaggctgccaggaggcgcctctgggccctggagaatgaggaccaggaggtgcggatgctctttaaggatctgagtgcgagactggtctccatccagtcacagagagctcagtttcttataacttttaagacaatggaagaaatctggaagttttcaacatatctgaacctgggatacgtgagtatgtgccttgagcacttacttttcgaccacaagtactggctaaattgcatcttagtagaagatactgagatccaggtgagcgttgatgataagcatctcgaaactatttacctcggcctgctgatccaggaaggtcattttttttgtagggcgctatgctccgtgacccctccagcggaaaaagagggcgagtgcttaaccctctgcaaaaacgaattgattagcgtgaaaatggctgaagctgggtcagagctggagggtgtgtcactggttactgggcaaaggggactcgtgctcgtatcagctctggagccactccccctgccttttcaccagtggtttcttaaaaattacccaggatcctgcggtctgtcccgcaaaagggattggactggttcctatcagattggcaggggcagatgcaaggccctcaccggatacgagccaggggagaaggatgaattaaatttctaccaaggggagtccatcgaaataatcggctttgtgatacccggtctgcagtggtttataggaaagtctacctccagtggccaggtgggctttgtgccaacacggaatattgatcctgattcttatagtcccatgagcagaaactcggcctttttgagcgacgaggagcggtgctccttgttagctctggggtctgataaacagacagagtgtagcagtttccttcatacattggcacgaaccgatattacttctgtgtacagactgtcaggctttgagtcgattcagaatccaccaaatgacttgagcgcaagccagcctgaaggcttcaaggaggtccggccaggcagagcttgggaagagcaccaagcggtcgggagccggcagtcaagtagctcggaggactcctcgttggaagaggagctactaagcgccacaagcgattcataccggctcccggaaccagatgacctagatgacccagagctactgatggacctatccaccggccaagaggaggaggcagaaaactttgcccctatactggcctttctagatcatgagggctatgccgaccattttaaaagcttatacgacttttcttttagtttcctcactagctccttctacagtttttcagaagaagacgagtttgtcgcttacttggaggcctccagaaaatgggccaaaaaatcccacatgacttgggcccatgcgaggctgtgctttctgctcggtcgtctgagcatcagaaaagtgaagcttagccaggcaagagtctatttcgaggaggccattcatatcctaaatggagcattcgaggacctcagcctcgtcgctacactttacatcaatctggcagctatttatctgaaacagcggctgcggcataaaggaagcgcgctgctcgaaaaggccggagctcttctggcttgcctgcctgatcgggaatcttcagcaaagcatgagttggatgtagttgcatacgtgcttagacaggggattgtcgtcggctcttcgccgttagaagccagagcgtgctttctggccattcgtctgctcttatctcttggtcgacacgaggaagtcctgcccttcgccgaaaggctgcagctattatctggtcacccgcctgcctctgaggctgttgcctcagtgctgtccttcctgtacgacaaaaagtatcttccacacttggcggtggcctccgtccagcagcatggtattcagagcgctcagggaatgtctctgcctatctggcaagtccacttggtgctgcagaacaccacaaagttactcggatttccatccccaggctggggggaagtgtccgccctcgcctgtcctatgcttaggcaggccctggccgcttgtgaggaattagccgatcgaagcacccagcgggcactatgtctgatactctctaaggtgtatttagagcaccgcagcccagacggagctatccattatttaagccaagccctggtactgggccaactgctgggtgaacaagagagctttgaaagcagtctttgtctggcatgggcttacctgctggccagccaggccaaaaaggctctcgatgtgctggagccactgctctgttccctaaaggagactgagtccctcactcaacgcggagttatctacaatttgctggggctcgccttacagggcgaaggtagagtgaaccgggcagctaagagttacttaagagctctaaacagggctcaagaagtgggagacgttcacaaccaggccgttgcgatggctaatctgggccacctttcacttaaatcctgggcacaacaccccgcacggaactatctcctccaggccgtcaggctgtactgcgaattgcaggcttcaaaggaaacagatatggaattggtacaggtctttctgtggcttgcccaagtcctggtgtccggccatcagctgacacacggcctactttgttacgagatggctctattgtttggactgagacatcgacacctgaaatcacagctgcaagccaccaagagcctctgtcatttttatagcagcgtgtcacctaaccctgaagcatgtataacttaccatgaacactggttagccctagcccagcaattgcgcgatcgggaaatggaggggagactgcttgagtcattaggtcagctgtataggaacttaaataccgcccgatccctgcgcaggtctctcacctgtattaaggagagccttaggatcttcattgacttgggcgagacagacaaggcggctgaggcctggttaggtgcgggtcgattgcactacctgatgcaggaagacgagttagtggaactgtgcctgcaggccgcaattcagacggctctcaagtcagaggagcccctgctagccctaaagttatatgaagaagctggtgatgtcttcttcaacggcacccgtcaccgccaccacgccgtcgagtattaccgtgcgggagcagtgcccttggccaggcgcttaaaggctgtacggacagaacttaggatctttaataagctgaccgaactgcagatttctttggaagggtacgagaaggccctggagttcgccaccctcgccgcaagattaagcaccgtcactggggatcagaggcaggaactggtggccttccatcggctggcgactgtgtactatagcttacacatgtacgaaatggctgaagattgttacctgaaaactctaagcctttgcccaccgtggctacaatcacccaaagaggctctctactacgcaaaggtctactacaggctgggccgtttgacattttgccagctcaaggacgctcacgatgcaaccgaatacttcctactggcactggcagccgctgtgctgcttggtgacgaggagctgcaagacaccatccgttctcggttggacaatatttgtcagtcgccattgtggcacagccgaccgtccggctgttcttccgaacgcgctcggtggctgtccggagggggtctggctctctag

SEQ ID NO: 215778 - DNA, 2181 bp, Artificial Sequence
  derived and/or modified sequence
atggacctgagtacgggtcaggaggaggaagccgaaaatttcgctcctatcctcgctttcctggaccacgagggctatgcagaccacttcaagtccttatatgatttcagtttctccttcctcacctcctcgttctactcgttttcagaggaggacgaatttgtcgcctaccttgaggcgagccggaagtgggctaagaagtcccatatgacctgggcacacgccagactgtgttttctgcttggtcgtttgtcaattcgcaaggtgaagttgagccaggccagggtatactttgaagaagccattcatattcttaatggcgctttcgaggacttgagccttgtggcgaccctatacatcaacctggccgcaatctatctgaaacagcgactgcgccacaaagggtcagctctgctcgaaaaagccggtgctctcctggcttgccttccagatagggagtcctcagccaagcacgaattggacgtcgtggcctacgtattgcgccaaggcatcgttgtcggttccagccctctcgaagctagagcgtgctttctagcaatcaggctcttgctgtctctcggaagacacgaagaggtgcttcccttcgctgagcgccttcagctactctccgggcacccaccagcctcggaggccgtggcatccgtgctcagcttcttgtatgataagaagtaccttccccatctggccgtggcaagcgttcaacaacacggcattcaatctgcccaggggatgagtctgcctatatggcaggtgcacctggtcctccagaacaccactaaactactcggattccccagccctggttggggcgaggtctccgcacttgcctgccctatgctcagacaggctctggcggcatgtgaagagctcgccgaccggtctacacaacgagccctgtgcttaatcttaagtaaggtttaccttgagcacaggagtccagatggcgcaatccactacctatctcaggcgttagttctgggccaactcttgggggagcaggagtctttcgaatcatcactgtgtctggcctgggcctacctgctcgcatctcaagcaaagaaggccctggacgtactcgagccactgctgtgctccttgaaggagacagaaagccttacacagcggggagttatctataacctacttggcctcgccctccagggggagggacgtgttaaccgggctgcaaaaagttatttgagggctctgaatagggctcaagaggtaggcgacgttcataatcaagcggtggcgatggctaacttagggcatttaagtctaaagagctgggctcaacaccccgctcgcaattatctgctgcaggctgtccgattgtactgtgaacttcaagcgagcaaagaaactgacatggaactggtgcaggtgttcctgtggttggcccaagtccttgtcagtgggcatcaactcacacatggtctgctctgctacgagatggccctcctgtttgggcttagacatagacaccttaaaagccaattgcaggctacaaagagtttgtgtcatttctattcgtctgtgagtcctaatccggaggcctgcattacataccatgaacattggctcgctcttgctcagcagctccgcgaccgggaaatggaaggaagactcttagagtcactaggtcagctgtaccgcaatctgaatacggccagatctcttcggagatcactaacctgtattaaagaaagcctgcgcatcttcatcgatttaggcgagactgacaaagccgcagaggcttggctaggcgcaggcagactgcattacttgatgcaagaggacgaactcgtcgagctctgcctgcaggccgcaattcagaccgccctgaagtctgaggaacccctcctcgctctcaagctgtacgaggaggccggagatgtattcttcaacggcacccgtcatagacaccatgcagtagaatactatcgcgctggtgccgtacccctcgccagaagactgaaagcagtacgaaccgaacttaggattttcaacaaactgacagagctacagattagtttagagggctatgaaaaggccctagagtttgcaacgctcgccgcaagacttagcactgtgacagaggcccgagccggaggcctatcacctcccggatacagcgtcctgctgcctgctcacgtgtag

SEQ ID NO: 215779 - DNA, 3276 bp, Artificial Sequence
  derived and/or modified sequence
gtgttcccaagggcctcggccagggtaggatggtacacacatgggtggctgcttctgcatccccagggagcggagtctgacccggggcccaggtaaagaaactccttccaaggatccaactgtatcgagtgagtgtatagcctcatctgaatacaaggaaaaatgttttctgccacagaacattaatccagacctgacactctccttctgtgtaaagagccgctccaggaggtgtgtaaatggacccctacaggaagctgctcggaggcggctctgggcactggagaatgaggaccaggaggtgcgcatgctgtttaaggtattataaaaaaaccaggccgggtgcggtggctcacgcctgtaatcccagcactttgggaggccaaggacctctcagcaaggttggtcagtatccagtctcagagggcccagtttctcatcaccttcaagaccatggaggaaatctggaagttctccacctaccttaatttaggctacgtatccatgtgtctagaacatctcctctttgaccacaagtactggctcaactgcatattggtggaggatacagagatccaagtgtctgtagatgataaacacctggaaacaatatacctgggactcctgatacaggaaggccacttcttctgcagagccctgtgctccgtgactccaccagccgagaaggaaggggaatgcttgacactttgcaagaatgagttaatctcagtgaagatggcagaagctggctccgagttggaaggcgtgtctttggtgacaggtcagcggggcctggtactggtgtcagccttggagcctctgcctctccctttccaccagtggttcctaaagaattatccaggaagctgtggcctttccaggaagagggattggacaggctcctatcagattggcagaggacgctgtaaggccttgacgggttatgagccaggagaaaaggatgaactgaatttctaccagggagaaagcattgagatcatcggctttgtcatacctgggcttcagtggttcattggaaagtcgacaagttcaggacaagtgggctttgtccccaccaggaacatagatcctgattcttattccccaatgagcaggaactctgcctttctcagtgatgaggagagatgctccctgttggccctgggaagtgataagcagactgagtgttccagcttcctccacactcttgctcgcactgacatcacatctgtctaccggctcagtgggtttgaatccatccagaatcctccaaatgatctgagtgcatcccagcctgaaggtttcaaggaggtcaggcctggcagagcctgggaggagcatcaggccgtggggtccagacagtccagcagctctgaggactccagcctggaggaggagctcctctcggccacctcagacagctatcgcctgccggagcctgatgaccttgatgacccggaactgctcatggacctaagcactggtcaggaggaggaggctgagaacttcgcccccatattggcttttctggatcatgagggttatgctgaccactttaagagtctctatgacttctccttctctttcctcacttcttccttttatagcttctctgaggaggatgagtttgtggcctacctggaggcatcaagaaagtgggccaagaagagccacatgacctgggcccatgcccgtctctgcttcctcctgggccggctgagcatcaggaaggtcaaactctctcaggccagggtgtacttcgaggaggccatccacattctcaatggagcatttgaggacctatccttggtggccactctgtacatcaatttggctgccatctacctgaaacagaggctgagacataaaggctccgccctgttggaaaaggcaggtgccctgctggcctgcctgcctgaccgtgagtctagtgccaagcatgaactcgacgtggtggcctacgtgctgcgccaggggattgtggtgggcagcagcccgctggaggccagggcctgctttctggccatccgcttgctcctgagcctaggccggcacgaggaggtcctgccctttgccgagcgcctgcagctcctctctggacaccctcctgcctctgaggctgtggccagtgttttgagttttctgtatgacaagaaatatcttccacaccttgcagtggcctctgtccagcaacatggtatccagagtgcccaagggatgtctcttcctatttggcaggtccaccttgtcctccagaacacaaccaagctccttggctttccttccccaggctggggtgaagtttctgccttggcctgcccaatgctcagacaggccctggctgcctgtgaggaactagcagaccggagcacccagagggccctgtgtctcatcctttccaaagtgtacctcgagcacaggtctcctgacggtgccatccactacctgagccaggccttggtgctagggcagctgctgggtgagcaggaatcctttgagtcttctctctgcctggcatgggcctatctcttagccagccaggccaagaaggctttggatgtgcttgagccactgctatgctccctgaaggagacagagagtctcactcaaaggggagtcatctataacctcctgggacttgcactccaaggtgaaggccgggtgaacagggcagccaagagctatcttcgggccttgaacagagcccaggaggtgggagatgtgcataaccaggcagtggctatggccaatcttggccacctgagccttaagtcctgggctcagcatccagccagaaactatctcctgcaggctgtacgactctattgtgaacttcaggccagtaaggagacagacatggaattagtacaggtgtttctctggttggcccaagttctggtgtctggacaccagctgacccatggccttctttgttatgaaatggcattgctgtttggcttaaggcatcgacatctaaagagtaagtatgtcccatgctgctgggaagctatagagaaaagtgttggatcaagttttatccatttcctatctcaagtcatctcattcatgtccctgctttgtgttcaggtcagcttcaggccaccaaatccctctgccatttctacagctctgtgtccccaaaccctgaggcatgcatcacctaccatgagcactggctggccctggctcagcaactcagggaccgggagatggaagggaggctgctggagtccctggggcagctttatcggaacctaaataccgccaggtgagtca

SEQ ID NO: 215780 - DNA, 2681 bp, Artificial Sequence
  derived and/or modified sequence
attatccatgtaacagccatagcacaatcctgggtacatggtaagtccttggtaagtgttgcctgtgccacactattattatattacaggtgctgttgttccccaagtgtaaagtaaatgatattttattctcttcataagctatgttcccattgcaaaaggactgtgccctgaattttaaattagttaatttttagttaaaagtgcattttcccatgaagctaaaatgtaaatgaaggtcaggttcccattaccctaactcagaacatagctgaatatcttgtgtttatgtcaaaagctagtgggaaacaataatagtcatcagaacagataaatggcagaataaaaaagatttaaaaacccctcatcttgaatgttggtgtttgaagaaaagcaggtttgatagagaagccttgattagatgtaagggtaaatgtaatattctgtgatgattccaggagggtcttctgggcattttcaagggcatcgggtgtggatgataccggactttattttgtctaattgcattcttgagagagccttccctcttttccctacctttttccttattgcataggatctcatctgagtgactgtgtgctaatctcaggaaaggccttggaggccccaggcagttcctctgagcactctttatccctcactggatgggagctgaagggaggttgtatgcatcctttatataagtacttcccctgtggctgatttttccatatcagagaattttctctctcttagattttcttttttaattttggcttttggctctttgaagcttaaaagtgatgtttttagatggtatcccacagccaccttgcaaatattccaaagacatgattgtaagcctttgttccctgtaaaagattgctctgtattaaaacaaatccaccaaacaacaagtcatagacccgttagaaaccagcattctaaagcatggtttaagtgtgaacaggtgtttgtagcttatctgagactgacagtaggtaaaggggccaaggagagactgctacatggtggtacccaagataattctctgaagagagagacttttgtgtgaggaagacatttattatacagagtgatttattgcaattcttagctactccatcaagctagacttgtcaccatgtcccattaaaagggtttaagaagaattctttctcagaatcctgcattacagtagcatctgcaataaggagaaaattttcttctgggaatcactccaggaaaccttgacccatcctctacttagtcactcttatagagccctgcattttcttttgtagcatttatgacatgtgtaatgttacatttgtttgtgggattatttaaggaatgtctgtcatgtgagacaataagctttatgagtacaggcacctcttctgtcttatttcctatgccccagcacagtccctgacatctagtagaccttcaaaaagttttatggaatgaatgagtgaacaaatgatgcaaagtgttggttgcaggatatctctctcagtcttccaattcttaggagatcagaggcaagagctggtggcctttcaccgcctggctacagtgtactactccctgcacatgtatgagatggctgaggactgctacctgaagaccctgtccctctgtccaccatggctgcagagtcccaaggaggccctgtactatgccaaggtgtattatcgcctgggcagactcaccttctgccagctgaaggatgcccatgatgccactgagtacttccttctggccctggcagcagcggtcctgctgggtgatgaggagcttcaggacaccattaggagcaggctggacaacatctgccagagccccctgtggcacagcaggccctccgggtgctcctcagagagggcgcggtggctgagtggtggtggcctggccctctgaggaaagctgtcctgtctctggacatttggcatggccagactctgaccccactgccctaggctcttaaatactcattgggagggtccgagtccttacctggcctagccccctcatttcacaagaagaagaatgaagtccaggaggagaagggctcattgcaggccacagaaagatttgatggtgcagcgatgagaattcctggttccaggctttgcatctggagcctttaccggttgactgttgccttccacacaaacagcctctgaaaagcactttctccatacataattctggagaagatgagggatcttgccctccaggagccttccttcctcccccaatgaggaaatcagtcactgcactggtgcaaaggcaagcagattggaatttgtgctcttcaccgattttctcagggaaagaccccttccccttgccagcagaggaacctgtagttttttccatttctttcttcagaaccaaagtatgtatcactcctcatgctcacagggattgacaggagagaattcaccaggatcttagctcaaaagacacagcctcagaatggccagatggattgcacgaaacctgacttggattcaccatcttcctcctgccataaggctgtgctcccacataacctcccagaagctccagggaagctttccaagagcaaaggcttggaaattgaatgttaagaaaattatgacataaattacatgtaaatagtgtatatgattaaatattgtccagttacattt

SEQ ID NO: 215781 - DNA, 4059 bp, Artificial Sequence
  derived and/or modified sequence
agggaggaggcgggaggagggacaccgttgggaggctgtcccttgcagcactcttctggcctgtgttcccaagggcctcggccagggtaggatggtacacacatgggtggctgcttctgcatccccagggagcggagtctgacccggggcccaggtaaagaaactccttccaaggatccaactgtatcgagtgagtgtatagcctcatctgaatacaaggaaaaatgttttctgccacagaacattaatccagacctgacactctccttctgtgtaaagagccgctccaggaggtgtgtaaatggacccctacaggaagctgctcggaggcggctctgggcactggagaatgaggaccaggaggtgcgcatgctgtttaaggacctctcagcaaggttggtcagtatccagtctcagagggcccagtttctcatcaccttcaagaccatggaggaaatctggaagttctccacctaccttaatttaggctacgtatccatgtgtctagaacatctcctctttgaccacaagtactggctcaactgcatattggtggaggatacagagatccaagtgtctgtagatgataaacacctggaaacaatatacctgggactcctgatacaggaaggccacttcttctgcagagccctgtgctccgtgactccaccagccgagaaggaaggggaatgcttgacactttgcaagaatgagttaatctcagtgaagatggcagaagctggctccgagttggaaggcgtgtctttggtgacaggtcagcggggcctggtactggtgtcagccttggagcctctgcctctccctttccaccagtggttcctaaagaattatccaggaagctgtggcctttccaggaagagggattggacaggctcctatcagattggcagaggacgctgtaaggccttgacgggttatgagccaggagaaaaggatgaactgaatttctaccagggagaaagcattgagatcatcggctttgtcatacctgggcttcagtggttcattggaaagtcgacaagttcaggacaagtgggctttgtccccaccaggaacatagatcctgattcttattccccaatgagcaggaactctgcctttctcagtgatgaggagagatgctccctgttggccctgggaagtgataagcagactgagtgttccagcttcctccacactcttgctcgcactgacatcacatctgtctaccggctcagtgggtttgaatccatccagaatcctccaaatgatctgagtgcatcccagcctgaaggtttcaaggaggtcaggcctggcagagcctgggaggagcatcaggccgtggggtccagacagtccagcagctctgaggactccagcctggaggaggagctcctctcggccacctcagacagctatcgcctgccggagcctgatgaccttgatgacccggaactgctcatggacctaagcactggtcaggaggaggaggctgagaacttcgcccccatattggcttttctggatcatgagggttatgctgaccactttaagagtctctatgacttctccttctctttcctcacttcttccttttatagcttctctgaggaggatgagtttgtggcctacctggaggcatcaagaaagtgggccaagaagagccacatgacctgggcccatgcccgtctctgcttcctcctgggccggctgagcatcaggaaggtcaaactctctcaggccagggtgtacttcgaggaggccatccacattctcaatggagcatttgaggacctatccttggtggccactctgtacatcaatttggctgccatctacctgaaacagaggctgagacataaaggctccgccctgttggaaaaggcaggtgccctgctggcctgcctgcctgaccgtgagtctagtgccaagcatgaactcgacgtggtggcctacgtgctgcgccaggggattgtggtgggcagcagcccgctggaggccagggcctgctttctggccatccgcttgctcctgagcctaggccggcacgaggaggtcctgccctttgccgagcgcctgcagctcctctctggacaccctcctgcctctgaggctgtggccagtgttttgagttttctgtatgacaagaaatatcttccacaccttgcagtggcctctgtccagcaacatggtatccagagtgcccaagggatgtctcttcctatttggcaggtccaccttgtcctccagaacacaaccaagctccttggctttccttccccaggctggggtgaagtttctgccttggcctgcccaatgctcagacaggccctggctgcctgtgaggaactagcagaccggagcacccagagggccctgtgtctcatcctttccaaagtgtacctcgagcacaggtctcctgacggtgccatccactacctgagccaggccttggtgctagggcagctgctgggtgagcaggaatcctttgagtcttctctctgcctggcatgggcctatctcttagccagccaggccaagaaggctttggatgtgcttgagccactgctatgctccctgaaggagacagagagtctcactcaaaggggagtcatctataacctcctgggacttgcactccaaggtgaaggccgggtgaacagggcagccaagagctatcttcgggccttgaacagagcccaggaggtgggagatgtgcataaccaggcagtggctatggccaatcttggccacctgagccttaagtcctgggctcagcatccagccagaaactatctcctgcaggctgtacgactctattgtgaacttcaggccagtaaggagacagacatggaattagtacaggtgtttctctggttggcccaagttctggtgtctggacaccagctgacccatggccttctttgttatgaaatggcattgctgtttggcttaaggcatcgacatctaaagagtcagcttcaggccaccaaatccctctgccatttctacagctctgtgtccccaaaccctgaggcatgcatcacctaccatgagcactggctggccctggctcagcaactcagggaccgggagatggaagggaggctgctggagtccctggggcagctttatcggaacctaaataccgccaggtccctcaggaggtcactcacatgcatcaaggagagcctgcgtatcttcattgacctgggggagacagacaaggctgctgaggcctggcttggggcggggcgactccactacctcatgcaggaagacgagctggtggagctgtgcctgcaggcagccatccagacagccctgaagtcagaggagcctttgctggctctcaaactttatgaagaagcaggtgatgtgttcttcaatgggacccgccacaggcatcatgcagtggagtactaccgagctggagctgttcctttagcaaggaggttgaaggcggtgagaactgagctccggattttcaataagctgacagagctgcagattagcctcgaaggctatgagaaggctttggaatttgccaccctggccgccaggctcagcacagtcacaggagatcagaggcaagagctggtggcctttcaccgcctggctacagtgtactactccctgcacatgtatgagatggctgaggactgctacctgaagaccctgtccctctgtccaccatggctgcagagtcccaaggaggccctgtactatgccaaggtgtattatcgcctgggcagactcaccttctgccagctgaaggatgcccatgatgccactgagtacttccttctggccctggcagcagcggtcctgctgggtgatgaggagcttcaggacaccattaggagcaggctggacaacatctgccagagccccctgtggcacagcaggccctccgggtgctcctcagagagggcgcggtggctgagtggtggtggcctggccctctgaggaaagctgtcctgtctctggacatttggcatggccagactctgaccccactgccctaggctcttaaatactcattgggagggtccgagt

SEQ ID NO: 215782 - DNA, 4153 bp, Artificial Sequence
  derived and/or modified sequence
tgcaagaatgagttaatctcagtgaagatggcagaagctggctccgagttggaaggcgtgtctttggtgacaggtcagcggggcctggtactggtgtcagccttggagcctctgcctctccctttccaccagtggttcctaaagaattatccaggaagctgtggcctttccaggaagagggattggacaggctcctatcagattggcagaggacgctgtaaggccttgacgggttatgagccaggagaaaaggatgaactgaatttctaccagggagaaagcattgagatcatcggctttgtcatacctgggcttcagtggttcattggaaagtcgacaagttcaggacaagtgggctttgtccccaccaggaacatagatcctgattcttattccccaatgacttggtgtgtttcttcaatatgaagattcatgtctttcttcaattctggaaaattttcagtccttcttcctttgaatattgcctctctctcgttctttttagtctctcttctggaattcctattagaggagcaggaactctgcctttctcagtgatgaggagagatgctccctgttggccctgggaagtgataagcagactgagtgttccagcttcctccacactcttgctcgcactgacatcacatctgtctaccggctcagtgggtttgaatccatccagaatcctccaaatgatctgagtgcatcccagcctgaaggtttcaaggaggtcaggcctggcagagcctgggaggagcatcaggccgtggggtccagacagtccagcagctctgaggactccagcctggaggaggagctcctctcggccacctcagacagctatcgcctgccggagcctgatgaccttgatgacccggaactgctcatggacctaagcactggtcaggaggaggaggctgagaacttcgcccccatattggcttttctggatcatgagggttatgctgaccactttaagagtctctatgacttctccttctctttcctcacttcttccttttatagcttctctgaggaggatgagtttgtggcctacctggaggcatcaagaaagtgggccaagaagagccacatgacctgggcccatgcccgtctctgcttcctcctgggccggctgagcatcaggaaggtcaaactctctcaggccagggtgtacttcgaggaggccatccacattctcaatggagcatttgaggacctatccttggtggccactctgtacatcaatttggctgccatctacctgaaacagaggctgagacataaaggctccgccctgttggaaaaggcaggtgccctgctggcctgcctgcctgaccgtgagtctagtgccaagcatgaactcgacgtggtggcctacgtgctgcgccaggggattgtggtgggcagcagcccgctggaggccagggcctgctttctggccatccgcttgctcctgagcctaggccggcacgaggaggtcctgccctttgccgagcgcctgcagctcctctctggacaccctcctgcctctgaggctgtggccagtgttttgagttttctgtatgacaagaaatatcttccacaccttgcagtggcctctgtccagcaacatggtatccagagtgcccaagggatgtctcttcctatttggcaggtccaccttgtcctccagaacacaaccaagctccttggctttccttccccaggctggggtgaagtttctgccttggcctgcccaatgctcagacaggccctggctgcctgtgaggaactagcagaccggagcacccagagggccctgtgtctcatcctttccaaagtgtacctcgagcacaggtctcctgacggtgccatccactacctgagccaggccttggtgctagggcagctgctgggtgagcaggaatcctttgagtcttctctctgcctggcatgggcctatctcttagccagccaggccaagaaggctttggatgtgcttgagccactgctatgctccctgaaggagacagagagtctcactcaaaggggagtcatctataacctcctgggacttgcactccaaggtgaaggccgggtgaacagggcagccaagagctatcttcgggccttgaacagagcccaggaggtgggagatgtgcataaccaggcagtggctatggccaatcttggccacctgagccttaagtcctgggctcagcatccagccagaaactatctcctgcaggctgtacgactctattgtgaacttcaggccagtaaggagacagacatggaattagtacaggtgtttctctggttggcccaagttctggtgtctggacaccagctgacccatggccttctttgttatgaaatggcattgctgtttggcttaaggcatcgacatctaaagagtcagcttcaggccaccaaatccctctgccatttctacagctctgtgtccccaaaccctgaggcatgcatcacctaccatgagcactggctggccctggctcagcaactcagggaccgggagatggaagggaggctgctggagtccctggggcagctttatcggaacctaaataccgccaggtccctcaggaggtcactcacatgcatcaaggagagcctgcgtatcttcattgacctgggggagacagacaaggctgctgaggcctggcttggggcggggcgactccactacctcatgcaggaagacgagctggtggagctgtgcctgcaggcagccatccagacagccctgaagtcagaggagcctttgctggctctcaaactttatgaagaagcaggtgatgtgttcttcaatgggacccgccacaggcatcatgcagtggagtactaccgagctggagctgttcctttagcaaggaggttgaaggcggtgagaactgagctccggattttcaataagctgacagagctgcagattagcctcgaaggctatgagaaggctttggaatttgccaccctggccgccaggctcagcacagtcacagaggcaagagctggtggcctttcaccgcctggctacagtgtactactccctgcacatgtatgagatggctgaggactgctacctgaagaccctgtccctctgtccaccatggctgcagagtcccaaggaggccctgtactatgccaaggtgtattatcgcctgggcagactcaccttctgccagctgaaggatgcccatgatgccactgagtacttccttctggccctggcagcagcggtcctgctgggtgatgaggagcttcaggacaccattaggagcaggctggacaacatctgccagagccccctgtggcacagcaggccctccgggtgctcctcagagagggcgcggtggctgagtggtggtggcctggccctctgaggaaagctgtcctgtctctggacatttggcatggccagactctgaccccactgccctaggctcttaaatactcattgggagggtccgagtccttacctggcctagccccctcatttcacaagaagaagaatgaagtccaggaggagaagggctcattgcaggccacagaaagatttgatggtgcagcgatgagaattcctggttccaggctttgcatctggagcctttaccggttgactgttgccttccacacaaacagcctctgaaaagcactttctccatacataattctggagaagatgagggatcttgccctccaggagccttccttcctcccccaatgaggaaatcagtcactgcactggtgcaaaggcaagcagattggaatttgtgctcttcaccgattttctcagggaaagaccccttccccttgccagcagaggaacctgtagttttttccatttctttcttcagaaccaaagtatgtatcactcctcatgctcacagggattgacaggagagaattcaccaggatcttagctcaaaagacacagcctcagaatggccagatggattgcacgaaacctgacttggattcaccatcttcctcctgccataaggctgtgctcccacataacctcccagaagctccagggaagctttccaagagcaaaggcttggaaattgaatgttaagaaaattatgacataaattacatgtaaatagtgtatatgattaaatattgtccagttacatttacacac

SEQ ID NO: 215783 - DNA, 2805 bp, Artificial Sequence
  derived and/or modified sequence
atggaggagatctggaagttcagcacctacctgaacctgggctacgtgagcatgtgcctggagcacctgctgttcgaccacaagtactggctgaactgcatcctggtggaggacaccgagatccaggtgagcgtggacgacaagcacctggagaccatctacctgggcctgctgatccaggagggccacttcttctgcagagccctgtgcagcgtgaccccccccgccgagaaggagggcgagtgcctgaccctgtgcaagaacgagctgatcagcgtgaagatggccgaggccggcagcgagctggagggcgtgagcctggtgaccggccagagaggcctggtgctggtgagcgccctggagcccctgcccctgcccttccaccagtggttcctgaagaactaccccggcagctgcggcctgagcagaaagagagactggaccggcagctaccagatcggcagaggcagatgcaaggccctgaccggctacgagcccggcgagaaggacgagctgaacttctaccagggcgagagcatcgagatcatcggcttcgtgatccccggcctgcagtggttcatcggcaagagcaccagcagcggccaggtgggcttcgtgcccaccagaaacatcgaccccgacagctacagccccatgagcagaaacagcgccttcctgagcgacgaggagagatgcagcctgctggccctgggcagcgacaagcagaccgagtgcagcagcttcctgcacaccctggccagaaccgacatcaccagcgtgtacagactgagcggcttcgagagcatccagaacccccccaacgacctgagcgccagccagcccgagggcttcaaggaggtgagacccggcagagcctgggaggagcaccaggccgtgggcagcagacagagcagcagcagcgaggacagcagcctggaggaggagctgctgagcgccaccagcgacagctacagactgcccgagcccgacgacctggacgaccccgagctgctgatggacctgagcaccggccaggaggaggaggccgagaacttcgcccccatcctggccttcctggaccacgagggctacgccgaccacttcaagagcctgtacgacttcagcttcagcttcctgaccagcagcttctacagcttcagcgaggaggacgagttcgtggcctacctggaggccagcagaaagtgggccaagaagagccacatgacctgggcccacgccagactgtgcttcctgctgggcagactgagcatcagaaaggtgaagctgagccaggccagagtgtacttcgaggaggccatccacatcctgaacggcgccttcgaggacctgagcctggtggccaccctgtacatcaacctggccgccatctacctgaagcagagactgagacacaagggcagcgccctgctggagaaggccggcgccctgctggcctgcctgcccgacagagagagcagcgccaagcacgagctggacgtggtggcctacgtgctgagacagggcatcgtggtgggcagcagccccctggaggccagagcctgcttcctggccatcagactgctgctgagcctgggcagacacgaggaggtgctgcccttcgccgagagactgcagctgctgagcggccacccccccgccagcgaggccgtggccagcgtgctgagcttcctgtacgacaagaagtacctgccccacctggccgtggccagcgtgcagcagcacggcatccagagcgcccagggcatgagcctgcccatctggcaggtgcacctggtgctgcagaacaccaccaagctgctgggcttccccagccccggctggggcgaggtgagcgccctggcctgccccatgctgagacaggccctggccgcctgcgaggagctggccgacagaagcacccagagagccctgtgcctgatcctgagcaaggtgtacctggagcacagaagccccgacggcgccatccactacctgagccaggccctggtgctgggccagctgctgggcgagcaggagagcttcgagagcagcctgtgcctggcctgggcctacctgctggccagccaggccaagaaggccctggacgtgctggagcccctgctgtgcagcctgaaggagaccgagagcctgacccagagaggcgtgatctacaacctgctgggcctggccctgcagggcgagggcagagtgaacagagccgccaagagctacctgagagccctgaacagagcccaggaggtgggcgacgtgcacaaccaggccgtggccatggccaacctgggccacctgagcctgaagagctgggcccagcaccccgccagaaactacctgctgcaggccgtgagactgtactgcgagctgcaggccagcaaggagaccgacatggagctggtgcaggtgttcctgtggctggcccaggtgctggtgagcggccaccagctgacccacggcctgctgtgctacgagatggccctgctgttcggcctgagacacagacacctgaagagcaagtacgtgccctgctgctgggaggccatcgagaagagcgtgggcagcagcttcatccacttcctgagccaggtgatcagcttcatgagcctgctgtgcgtgcaggtgagcttcagaccccccaaccccagcgccatcagcaccgccctgtgcccccagaccctgagacacgccagccccaccatgagcaccggctggccctggctgagcaacagcggcaccggcagatggaagggcggctgctggagcccctggggcagcttcatcggcacctag

SEQ ID NO: 215784 - DNA, 453 bp, Artificial Sequence
  derived and/or modified sequence
atgagcgagcagatgatgcagagcgtgggctgcagaatcagcctgagcgtgttccagttcctgggcgaccagagacaggagctggtggccttccacagactggccaccgtgtactacagcctgcacatgtacgagatggccgaggactgctacctgaagaccctgagcctgtgccccccctggctgcagagccccaaggaggccctgtactacgccaaggtgtactacagactgggcagactgaccttctgccagctgaaggacgcccacgacgccaccgagtacttcctgctggccctggccgccgccgtgctgctgggcgacgaggagctgcaggacaccatcagaagcagactggacaacatctgccagagccccctgtggcacagcagacccagcggctgcagcagcgagagagccagatggctgagcggcggcggcctggccctgtag

SEQ ID NO: 215785 - DNA, 3867 bp, Artificial Sequence
  derived and/or modified sequence
atgggcggctgcttctgcatccccagagagagaagcctgaccagaggccccggcaaggagacccccagcaaggaccccaccgtgagcagcgagtgcatcgccagcagcgagtacaaggagaagtgcttcctgccccagaacatcaaccccgacctgaccctgagcttctgcgtgaagagcagaagcagaagatgcgtgaacggccccctgcaggaggccgccagaagaagactgtgggccctggagaacgaggaccaggaggtgagaatgctgttcaaggacctgagcgccagactggtgagcatccagagccagagagcccagttcctgatcaccttcaagaccatggaggagatctggaagttcagcacctacctgaacctgggctacgtgagcatgtgcctggagcacctgctgttcgaccacaagtactggctgaactgcatcctggtggaggacaccgagatccaggtgagcgtggacgacaagcacctggagaccatctacctgggcctgctgatccaggagggccacttcttctgcagagccctgtgcagcgtgaccccccccgccgagaaggagggcgagtgcctgaccctgtgcaagaacgagctgatcagcgtgaagatggccgaggccggcagcgagctggagggcgtgagcctggtgaccggccagagaggcctggtgctggtgagcgccctggagcccctgcccctgcccttccaccagtggttcctgaagaactaccccggcagctgcggcctgagcagaaagagagactggaccggcagctaccagatcggcagaggcagatgcaaggccctgaccggctacgagcccggcgagaaggacgagctgaacttctaccagggcgagagcatcgagatcatcggcttcgtgatccccggcctgcagtggttcatcggcaagagcaccagcagcggccaggtgggcttcgtgcccaccagaaacatcgaccccgacagctacagccccatgagcagaaacagcgccttcctgagcgacgaggagagatgcagcctgctggccctgggcagcgacaagcagaccgagtgcagcagcttcctgcacaccctggccagaaccgacatcaccagcgtgtacagactgagcggcttcgagagcatccagaacccccccaacgacctgagcgccagccagcccgagggcttcaaggaggtgagacccggcagagcctgggaggagcaccaggccgtgggcagcagacagagcagcagcagcgaggacagcagcctggaggaggagctgctgagcgccaccagcgacagctacagactgcccgagcccgacgacctggacgaccccgagctgctgatggacctgagcaccggccaggaggaggaggccgagaacttcgcccccatcctggccttcctggaccacgagggctacgccgaccacttcaagagcctgtacgacttcagcttcagcttcctgaccagcagcttctacagcttcagcgaggaggacgagttcgtggcctacctggaggccagcagaaagtgggccaagaagagccacatgacctgggcccacgccagactgtgcttcctgctgggcagactgagcatcagaaaggtgaagctgagccaggccagagtgtacttcgaggaggccatccacatcctgaacggcgccttcgaggacctgagcctggtggccaccctgtacatcaacctggccgccatctacctgaagcagagactgagacacaagggcagcgccctgctggagaaggccggcgccctgctggcctgcctgcccgacagagagagcagcgccaagcacgagctggacgtggtggcctacgtgctgagacagggcatcgtggtgggcagcagccccctggaggccagagcctgcttcctggccatcagactgctgctgagcctgggcagacacgaggaggtgctgcccttcgccgagagactgcagctgctgagcggccacccccccgccagcgaggccgtggccagcgtgctgagcttcctgtacgacaagaagtacctgccccacctggccgtggccagcgtgcagcagcacggcatccagagcgcccagggcatgagcctgcccatctggcaggtgcacctggtgctgcagaacaccaccaagctgctgggcttccccagccccggctggggcgaggtgagcgccctggcctgccccatgctgagacaggccctggccgcctgcgaggagctggccgacagaagcacccagagagccctgtgcctgatcctgagcaaggtgtacctggagcacagaagccccgacggcgccatccactacctgagccaggccctggtgctgggccagctgctgggcgagcaggagagcttcgagagcagcctgtgcctggcctgggcctacctgctggccagccaggccaagaaggccctggacgtgctggagcccctgctgtgcagcctgaaggagaccgagagcctgacccagagaggcgtgatctacaacctgctgggcctggccctgcagggcgagggcagagtgaacagagccgccaagagctacctgagagccctgaacagagcccaggaggtgggcgacgtgcacaaccaggccgtggccatggccaacctgggccacctgagcctgaagagctgggcccagcaccccgccagaaactacctgctgcaggccgtgagactgtactgcgagctgcaggccagcaaggagaccgacatggagctggtgcaggtgttcctgtggctggcccaggtgctggtgagcggccaccagctgacccacggcctgctgtgctacgagatggccctgctgttcggcctgagacacagacacctgaagagccagctgcaggccaccaagagcctgtgccacttctacagcagcgtgagccccaaccccgaggcctgcatcacctaccacgagcactggctggccctggcccagcagctgagagacagagagatggagggcagactgctggagagcctgggccagctgtacagaaacctgaacaccgccagaagcctgagaagaagcctgacctgcatcaaggagagcctgagaatcttcatcgacctgggcgagaccgacaaggccgccgaggcctggctgggcgccggcagactgcactacctgatgcaggaggacgagctggtggagctgtgcctgcaggccgccatccagaccgccctgaagagcgaggagcccctgctggccctgaagctgtacgaggaggccggcgacgtgttcttcaacggcaccagacacagacaccacgccgtggagtactacagagccggcgccgtgcccctggccagaagactgaaggccgtgagaaccgagctgagaatcttcaacaagctgaccgagctgcagatcagcctggagggctacgagaaggccctggagttcgccaccctggccgccagactgagcaccgtgaccggcgaccagagacaggagctggtggccttccacagactggccaccgtgtactacagcctgcacatgtacgagatggccgaggactgctacctgaagaccctgagcctgtgccccccctggctgcagagccccaaggaggccctgtactacgccaaggtgtactacagactgggcagactgaccttctgccagctgaaggacgcccacgacgccaccgagtacttcctgctggccctggccgccgccgtgctgctgggcgacgaggagctgcaggacaccatcagaagcagactggacaacatctgccagagccccctgtggcacagcagacccagcggctgcagcagcgagagagccagatggctgagcggcggcggcctggccctgtag

SEQ ID NO: 215786 - DNA, 2181 bp, Artificial Sequence
  derived and/or modified sequence
atggacctgagcaccggccaggaggaggaggccgagaacttcgcccccatcctggccttcctggaccacgagggctacgccgaccacttcaagagcctgtacgacttcagcttcagcttcctgaccagcagcttctacagcttcagcgaggaggacgagttcgtggcctacctggaggccagcagaaagtgggccaagaagagccacatgacctgggcccacgccagactgtgcttcctgctgggcagactgagcatcagaaaggtgaagctgagccaggccagagtgtacttcgaggaggccatccacatcctgaacggcgccttcgaggacctgagcctggtggccaccctgtacatcaacctggccgccatctacctgaagcagagactgagacacaagggcagcgccctgctggagaaggccggcgccctgctggcctgcctgcccgacagagagagcagcgccaagcacgagctggacgtggtggcctacgtgctgagacagggcatcgtggtgggcagcagccccctggaggccagagcctgcttcctggccatcagactgctgctgagcctgggcagacacgaggaggtgctgcccttcgccgagagactgcagctgctgagcggccacccccccgccagcgaggccgtggccagcgtgctgagcttcctgtacgacaagaagtacctgccccacctggccgtggccagcgtgcagcagcacggcatccagagcgcccagggcatgagcctgcccatctggcaggtgcacctggtgctgcagaacaccaccaagctgctgggcttccccagccccggctggggcgaggtgagcgccctggcctgccccatgctgagacaggccctggccgcctgcgaggagctggccgacagaagcacccagagagccctgtgcctgatcctgagcaaggtgtacctggagcacagaagccccgacggcgccatccactacctgagccaggccctggtgctgggccagctgctgggcgagcaggagagcttcgagagcagcctgtgcctggcctgggcctacctgctggccagccaggccaagaaggccctggacgtgctggagcccctgctgtgcagcctgaaggagaccgagagcctgacccagagaggcgtgatctacaacctgctgggcctggccctgcagggcgagggcagagtgaacagagccgccaagagctacctgagagccctgaacagagcccaggaggtgggcgacgtgcacaaccaggccgtggccatggccaacctgggccacctgagcctgaagagctgggcccagcaccccgccagaaactacctgctgcaggccgtgagactgtactgcgagctgcaggccagcaaggagaccgacatggagctggtgcaggtgttcctgtggctggcccaggtgctggtgagcggccaccagctgacccacggcctgctgtgctacgagatggccctgctgttcggcctgagacacagacacctgaagagccagctgcaggccaccaagagcctgtgccacttctacagcagcgtgagccccaaccccgaggcctgcatcacctaccacgagcactggctggccctggcccagcagctgagagacagagagatggagggcagactgctggagagcctgggccagctgtacagaaacctgaacaccgccagaagcctgagaagaagcctgacctgcatcaaggagagcctgagaatcttcatcgacctgggcgagaccgacaaggccgccgaggcctggctgggcgccggcagactgcactacctgatgcaggaggacgagctggtggagctgtgcctgcaggccgccatccagaccgccctgaagagcgaggagcccctgctggccctgaagctgtacgaggaggccggcgacgtgttcttcaacggcaccagacacagacaccacgccgtggagtactacagagccggcgccgtgcccctggccagaagactgaaggccgtgagaaccgagctgagaatcttcaacaagctgaccgagctgcagatcagcctggagggctacgagaaggccctggagttcgccaccctggccgccagactgagcaccgtgaccgaggccagagccggcggcctgagcccccccggctacagcgtgctgctgcccgcccacgtgtag

SEQ ID NO: 215787 - protein, 1120 aa, Artificial Sequence
  derived and/or modified sequence
MVLNSLDKMIQLQKNTANIRNICVLAHVDHGKTTLADCLISSNGIISSRLAGKLRYMDSREDEQIRGITMKSSAISLHYATGNEEYLINLIDSPGHVDFSSEVSTAVRICDGCIIVVDAVEGVCPQTQAVLRQAWLENIRPVLVINKIDRLIVELKFTPQEAYSHLKNILEQINALTGTLFTSKVLEERAERETESQVNPNSEQGEQVYDWSTGLEDTDDSHLYFSPEQGNVVFTSAIDGWGFGIEHFARIYSQKIGIKKEVLMKTLWGDYYINMKAKKIMKGDQAKGKKPLFVQLILENIWSLYDAVLKKDKDKIDKIVTSLGLKIGAREARHSDPKVQINAICSQWLPISHAVLAMVCQKLPSPLDITAERVERLMCTGSQTFDSFPPETQALKAAFMKCGSEDTAPVIIFVSKMFAVDAKALPQNKPRPLTQEEIAQRRERARQRHAEKLAAAQGQAPLEPTQDGSAIETCPKGEEPRGDEQQVESMTPKPVLQEENNQESFIAFARVFSGVARRGKKIFVLGPKYSPLEFLRRVPLGFSAPPDGLPQVPHMAYCALENLYLLMGRELEYLEEVPPGNVLGIGGLQDFVLKSATLCSLPSCPPFIPLNFEATPIVRVAVEPKHPSEMPQLVKGMKLLNQADPCVQILIQETGEHVLVTAGEVHLQRCLDDLKERFAKIHISVSEPIIPFRETITKPPKVDMVNEEIGKQQKVAVIHQMKEDQSKIPEGIQVDSDGLITITTPNKLATLSVRAMPLPEEVTQILEENSDLIRSMEQLTSSLNEGENTHMIHQKTQEKIWEFKGKLEQHLTGRRWRNIVDQIWSFGPRKCGPNILVNKSEDFQNSVWTGPADKASKEASRYRDLGNSIVSGFQLATLSGPMCEEPLMGVCFVLEKWDLSKFEEQGASDLAKEGQEENETCSGGNENQELQDGCSEAFEKRTSQKGESPLTDCYGPFSGQLIATMKEACRYALQVKPQRLMAAMYTCDIMATGDVLGRVYAVLSKREGRVLQEEMKEGTDMFIIKAVLPVAESFGFADEIRKRTSGLASPQLVFSHWEIIPSDPFWVPTTEEEYLHFGEKADSENQARKYMNAVRKRKGLYVEEKIVEHAEKQRTLSKNK

SEQ ID NO: 215788 - DNA, 3363 bp, Artificial Sequence
  derived and/or modified sequence
atggtgctgaacagcctggacaagatgatccagctgcagaagaacaccgccaacatcagaaacatctgcgtgctggcccacgtggaccacggcaagaccaccctggccgactgcctgatcagcagcaacggcatcatcagcagcagactggccggcaagctgagatacatggacagcagagaggacgagcagatcagaggcatcaccatgaagagcagcgccatcagcctgcactacgccaccggcaacgaggagtacctgatcaacctgatcgacagccccggccacgtggacttcagcagcgaggtgagcaccgccgtgagaatctgcgacggctgcatcatcgtggtggacgccgtggagggcgtgtgcccccagacccaggccgtgctgagacaggcctggctggagaacatcagacccgtgctggtgatcaacaagatcgacagactgatcgtggagctgaagttcaccccccaggaggcctacagccacctgaagaacatcctggagcagatcaacgccctgaccggcaccctgttcaccagcaaggtgctggaggagagagccgagagagagaccgagagccaggtgaaccccaacagcgagcagggcgagcaggtgtacgactggagcaccggcctggaggacaccgacgacagccacctgtacttcagccccgagcagggcaacgtggtgttcaccagcgccatcgacggctggggcttcggcatcgagcacttcgccagaatctacagccagaagatcggcatcaagaaggaggtgctgatgaagaccctgtggggcgactactacatcaacatgaaggccaagaagatcatgaagggcgaccaggccaagggcaagaagcccctgttcgtgcagctgatcctggagaacatctggagcctgtacgacgccgtgctgaagaaggacaaggacaagatcgacaagatcgtgaccagcctgggcctgaagatcggcgccagagaggccagacacagcgaccccaaggtgcagatcaacgccatctgcagccagtggctgcccatcagccacgccgtgctggccatggtgtgccagaagctgcccagccccctggacatcaccgccgagagagtggagagactgatgtgcaccggcagccagaccttcgacagcttcccccccgagacccaggccctgaaggccgccttcatgaagtgcggcagcgaggacaccgcccccgtgatcatcttcgtgagcaagatgttcgccgtggacgccaaggccctgccccagaacaagcccagacccctgacccaggaggagatcgcccagagaagagagagagccagacagagacacgccgagaagctggccgccgcccagggccaggcccccctggagcccacccaggacggcagcgccatcgagacctgccccaagggcgaggagcccagaggcgacgagcagcaggtggagagcatgacccccaagcccgtgctgcaggaggagaacaaccaggagagcttcatcgccttcgccagagtgttcagcggcgtggccagaagaggcaagaagatcttcgtgctgggccccaagtacagccccctggagttcctgagaagagtgcccctgggcttcagcgccccccccgacggcctgccccaggtgccccacatggcctactgcgccctggagaacctgtacctgctgatgggcagagagctggagtacctggaggaggtgccccccggcaacgtgctgggcatcggcggcctgcaggacttcgtgctgaagagcgccaccctgtgcagcctgcccagctgcccccccttcatccccctgaacttcgaggccacccccatcgtgagagtggccgtggagcccaagcaccccagcgagatgccccagctggtgaagggcatgaagctgctgaaccaggccgacccctgcgtgcagatcctgatccaggagaccggcgagcacgtgctggtgaccgccggcgaggtgcacctgcagagatgcctggacgacctgaaggagagattcgccaagatccacatcagcgtgagcgagcccatcatccccttcagagagaccatcaccaagccccccaaggtggacatggtgaacgaggagatcggcaagcagcagaaggtggccgtgatccaccagatgaaggaggaccagagcaagatccccgagggcatccaggtggacagcgacggcctgatcaccatcaccacccccaacaagctggccaccctgagcgtgagagccatgcccctgcccgaggaggtgacccagatcctggaggagaacagcgacctgatcagaagcatggagcagctgaccagcagcctgaacgagggcgagaacacccacatgatccaccagaagacccaggagaagatctgggagttcaagggcaagctggagcagcacctgaccggcagaagatggagaaacatcgtggaccagatctggagcttcggccccagaaagtgcggccccaacatcctggtgaacaagagcgaggacttccagaacagcgtgtggaccggccccgccgacaaggccagcaaggaggccagcagatacagagacctgggcaacagcatcgtgagcggcttccagctggccaccctgagcggccccatgtgcgaggagcccctgatgggcgtgtgcttcgtgctggagaagtgggacctgagcaagttcgaggagcagggcgccagcgacctggccaaggagggccaggaggagaacgagacctgcagcggcggcaacgagaaccaggagctgcaggacggctgcagcgaggccttcgagaagagaaccagccagaagggcgagagccccctgaccgactgctacggccccttcagcggccagctgatcgccaccatgaaggaggcctgcagatacgccctgcaggtgaagccccagagactgatggccgccatgtacacctgcgacatcatggccaccggcgacgtgctgggcagagtgtacgccgtgctgagcaagagagagggcagagtgctgcaggaggagatgaaggagggcaccgacatgttcatcatcaaggccgtgctgcccgtggccgagagcttcggcttcgccgacgagatcagaaagagaaccagcggcctggccagcccccagctggtgttcagccactgggagatcatccccagcgaccccttctgggtgcccaccaccgaggaggagtacctgcacttcggcgagaaggccgacagcgagaaccaggccagaaagtacatgaacgccgtgagaaagagaaagggcctgtacgtggaggagaagatcgtggagcacgccgagaagcagagaaccctgagcaagaacaagtag

SEQ ID NO: 215789 - DNA, 93 bp, Artificial Sequence
  derived and/or modified sequence
atggtgctgaacagcctggacaagatgatccagctgcagaagaacaccgccaacatcagaaacatctgcgtgctggcccacgtggaccactag

SEQ ID NO: 215790 - DNA, 54 bp, Artificial Sequence
  derived and/or modified sequence
atggtgctgaacagcctggacaagatgatccagctgcagaagaacaccgcctag

SEQ ID NO: 215791 - DNA, 3363 bp, Artificial Sequence
  derived and/or modified sequence
atggtgttaaatagcctggacaagatgattcaactccagaagaataccgccaacatacggaacatctgcgttctggcccatgtggatcatggaaagaccactcttgccgactgcctcatctcatccaatggcattatatcctcccggctggccggcaagctgcgctatatggattctcgtgaggacgaacagatccgggggatcaccatgaagtcctctgcgatcagcttgcactacgctaccggaaatgaggaatacctgatcaacctgattgattctcccgggcacgtggatttctccagcgaagtcagcactgccgtgcgtatctgtgacgggtgtattatcgtggtcgacgccgtggaaggcgtgtgtccccagactcaggcagtactgaggcaggcctggctggaaaatatcaggcctgtccttgtaatcaacaaaatcgataggctgatagtggagttgaaatttacaccccaggaggcctactcccatctgaagaacatcctggaacagattaacgcactcacaggcactctattcacctccaaagtcttggaggaacgagctgagagagagactgaatcccaggtgaaccccaatagcgagcagggggaacaggtttacgactggtccaccggtctggaggacaccgacgattcacacctctatttttcacccgagcaggggaacgtcgtgtttaccagtgccattgacggctggggctttggaattgagcactttgcgaggatttatagtcagaaaattggaataaagaaagaggtcctcatgaagaccctgtggggcgattattatattaacatgaaggctaagaaaatcatgaagggggatcaggctaaagggaagaagcccctgtttgtgcaactgattctggagaacatctggtcgctgtacgatgccgtactcaaaaaggacaaggacaagattgataaaattgtgactagcctgggcctgaagataggggcccgcgaggcgcggcatagtgaccctaaagtacagattaacgcaatttgctctcagtggctgcctattagtcacgccgttctcgctatggtctgtcagaaacttccttcacctctggatattaccgcggaaagagtggaacgactcatgtgcaccggcagtcagacttttgactccttcccacccgagacgcaggccctgaaagctgcattcatgaaatgcggttccgaagacacagccccggtgattattttcgtgtcgaagatgttcgccgtcgacgccaaagctctgcctcagaacaaacccagaccccttacccaggaggagattgctcagcgccgagaaagggcccggcagcgtcatgcagaaaaactcgccgcagctcagggtcaggcacctttggaaccgactcaggatggttcagccatcgagacttgtccgaaaggtgaggagcctaggggcgacgagcagcaggttgagagcatgacacctaagccagtattgcaggaggaaaacaatcaggagagcttcatcgcattcgcaagagtgttctccggcgtggcccgccggggcaagaagatcttcgtgttgggaccaaaatatagcccacttgagttcctgcggagggtgcccctcggtttttctgcaccccctgacggactgccgcaagtcccacatatggcgtactgcgcgttggaaaacctttatttgctgatgggacgggaactggagtacctagaagaagtgcctccagggaacgtgcttggtatcggtgggctccaagacttcgttctgaagagcgccacgttgtgctccctgccgtcttgccctccgtttatacccttaaatttcgaggcgacgccaatcgttagggtcgccgtcgagcccaagcacccatctgagatgcctcagttagtgaagggaatgaaactcttgaaccaggcagatccatgcgttcaaatcctgatccaagagaccggtgagcacgtgctggtgaccgcaggtgaggtgcatctgcaacggtgcctcgacgacttgaaggagaggttcgccaagatccacatctccgtgagcgagcccatcattcccttccgagagacaattacaaagcccccgaaggtggatatggtcaacgaagagattgggaaacagcagaaggtcgccgtgattcaccagatgaaggaggatcagtccaaaattcccgaaggcatccaagtggactcagatgggcttattaccataacaactccgaacaaactcgccaccctgtccgttagagctatgccactgcccgaggaggtgacacaaattctggaggagaatagcgacctaattaggtctatggaacagctaaccagtagccttaacgaaggtgagaatacacatatgatccaccagaagacccaagaaaaaatctgggagttcaaaggcaaactagaacaacatctgactggaagaaggtggcgaaatatcgttgatcagatctggtcatttggcccccggaagtgcgggcctaatatcctcgtcaataagtccgaggactttcaaaatagcgtatggacagggccggcagacaaagctagtaaggaagcaagccggtacagagatttagggaactcgatcgtcagtggtttccagttagccacattatctggccccatgtgtgaagaaccactgatgggagtatgcttcgtcctggagaagtgggacctcagtaagttcgaggagcaaggagcatccgacctcgcaaaagaaggccaggaagagaatgaaacgtgttcaggcggaaacgagaatcaggagctccaagatggctgcagtgaggcattcgaaaagagaacatcacaaaagggggaaagccctctgaccgactgctatggtcctttctccggacaattgatcgcgacaatgaaagaagcctgccgatatgcattgcaggtaaagcctcaaaggcttatggcggcaatgtacacatgtgacatcatggccacaggagatgtgttggggcgagtgtacgccgttttaagcaagagagagggccgcgtcttgcaggaggaaatgaaagaggggacagacatgttcattatcaaggctgttctgccagtggccgagtcttttggatttgcggatgaaattaggaaaagaacatctggacttgcatcaccacagctagtcttttcgcattgggagataattccatcagatccattctgggtgcccaccaccgaggaagagtacttgcattttggagaaaaggccgacagcgagaatcaagccaggaagtacatgaacgccgtgcgtaaacggaagggactgtacgtagaggagaagatagtcgaacacgctgaaaagcagcggaccctgagcaagaataaatag

SEQ ID NO: 215792 - DNA, 93 bp, Artificial Sequence
  derived and/or modified sequence
atggttcttaactcactggacaagatgattcaattgcagaagaataccgcaaacatccggaacatttgtgtgttagcgcacgtcgatcactag

SEQ ID NO: 215793 - DNA, 54 bp, Artificial Sequence
  derived and/or modified sequence
atggtcctgaattcactcgataagatgatccagctccaaaagaataccgcatag

SEQ ID NO: 215794 - DNA, 3675 bp, Artificial Sequence
  derived and/or modified sequence
agagacgtgcgggtgaaaggtcgagcgacagccggccccgccccctggcgcgcgggcgtgtcggacccgcagagctctcggactttcggaagctctcggtgtgggtgcgacccgagagaaggagcggggctggtggggctgctgcagccgtcacaggaaataagtaatcatggtgctcaacagtttggataagatgattcaactccagaaaaacactgccaacatcaggaatatttgtgttttggctcatgttgaccatggaaaaactactctggctgactgtcttatatctagcaatggaatcatctccagccgcctagcaggcaagttaaggtacatggacagcagagaagatgaacagatccgagggatcactatgaaatccagtgccatttccctacattatgcaacaggtaatgaggagtacctgatcaatctgatagactctccaggacacgtggacttttcctcagaagtatcaaccgctgttcgcatttgtgatggatgcatcattgtggtagatgctgtggaaggagtctgtccacagacacaggcagttctgcgacaagcttggcttgaaaacatccgtccggttttagtgattaataagattgatcgcttgatagtggaactgaaattcaccccacaagaggcctattctcacctcaagaatattttagaacagattaatgcgctcacagggactctttttacttctaaagtcctagaagaaagagcagagagggagactgaatcccaagtgaatccaaattctgaacaaggagagcaagtatatgactggagcactggcttggaggacacagatgattctcacctttacttctctccagaacagggaaatgtggtgtttaccagtgcaatagatgggtggggctttggaattgagcacttcgccagaatctacagtcaaaaaattggcatcaaaaaggaagttcttatgaaaaccttgtggggagattactatataaatatgaaggctaaaaagatcatgaagggtgatcaggccaaaggaaagaaacctttatttgtacagttgatcctggaaaatatatggagtttgtatgatgctgttttgaaaaaggacaaagacaaaattgataaaatagtgacttctttaggattaaaaattggagcccgggaggcacgacattcagaccctaaagttcagatcaacgccatttgcagtcagtggctacccatatcccatgctgttcttgctatggtgtgtcagaaacttcctagtccccttgatattacagctgagagagtggagagactgatgtgcacaggatcacaaacttttgactcttttccaccagaaactcaagcactgaaagcagcttttatgaaatgtggaagtgaggacactgctccagttattatatttgtttccaaaatgtttgcagttgatgctaaggccttgcctcagaataagccaaggcctctcactcaagaagaaattgctcagagacgtgagcgtgcaagacaaaggcatgcagagaagcttgcagcagcacagggacaggcacccttggagcccacccaagatgggagtgccattgaaacatgtccaaaaggagaggagccaagaggtgacgagcaacaggtggaaagtatgacccctaaacctgtgctccaggaagaaaacaaccaagagtcttttattgcatttgctcgggtgttcagtggtgtggctcgaagaggaaagaaaatttttgtcttggggcccaaatacagtcctcttgagtttttacgaagggtaccattaggcttctcagctccaccagatggcctcccccaagtcccccacatggcatactgtgctctggaaaacctgtatcttctgatgggaagggaactggaatatctagaggaggtacctccaggaaatgtgctaggaataggaggccttcaagattttgtgctgaaatctgcaacactgtgtagcctgccatcctgcccaccatttataccactcaacttcgaagccactcctattgtgagagttgctgttgaaccaaaacatccaagtgaaatgcctcagctcgtaaaaggaatgaaactgttaaaccaggctgatccctgtgtccagattttaattcaggaaacgggagagcacgttttagtcacagcaggagaagtccaccttcagcgatgcctggatgacttaaaagaaaggtttgcaaagattcatatcagtgtatctgaacctattattccattcagagaaacaatcacaaaacccccaaaagttgacatggtcaatgaagaaataggcaaacagcaaaaagttgcagtcatacaccaaatgaaagaagatcaaagcaaaatccctgaaggaatccaagttgactctgacgggctaatcaccataacaactcccaataaacttgccacgctcagtgttcgagccatgccccttccagaagaagtcacccagattctggaagaaaatagtgatttgattcgttctatggagcagttgacatcctctttgaatgagggtgaaaatactcacatgattcatcagaagacccaagagaaaatttgggaattcaaaggaaaactggagcaacacctaacagggagaagatggaggaacattgttgaccaaatctggtcatttggcccaagaaaatgtgggcccaacatactagtcaataaaagtgaagattttcagaactcagtatggacaggtccagctgacaaagcttcaaaagaagccagtagataccgagatttgggcaatagcattgtgagtggcttccaactagcaaccctctctggccccatgtgtgaggagcctctcatgggtgtctgttttgttctggaaaaatgggacctaagtaaatttgaggaacaaggagcaagtgatctggcaaaagagggacaggaggaaaatgaaacctgttctggtggaaatgaaaaccaagagctacaagatggctgctctgaggcctttgagaagaggacatcacagaaaggagaatctccactcactgactgctatggacctttctcaggacagctaattgccaccatgaaagaagcatgtcgctatgcactgcaagtgaaacctcagcgcctgatggcagctatgtacacatgtgacatcatggccactggtgatgttctcggtcgagtctatgctgtcttgtcaaagagagaaggtcgggtacttcaagaagaaatgaaagaagggacagacatgttcatcatcaaggctgtgctgcctgttgctgaaagctttggttttgctgatgaaatcaggaagaggacaagtggcctggccagcccacaactagtattcagccattgggagatcattcccagtgaccccttctgggtgccaactactgaggaggaatacttgcactttggggagaaggctgactctgagaaccaagcccggaagtacatgaacgcagtacgaaagcggaaggggctttatgtggaagaaaagattgtggagcatgcagaaaagcagaggacactcagcaaaaataagtagctacctactactggtggattcttttccttatagtgaatttaaaagtatcatcaagggtttaatattgggaaaatttctttttgccacattatctctgtttattcactttcaataaagttgatccatataaatattttaaagag

SEQ ID NO: 215795 - DNA, 3363 bp, Artificial Sequence
  derived and/or modified sequence
atggtgctgaacagcctggacaagatgatccagctgcagaagaacacagccaacatccggaacatctgtgtgctggcccacgtggaccacggcaagaccaccctggccgactgcctgatcagcagcaatggcatcatcagcagccggctggccggcaagctgcgctacatggacagcagagaagatgagcagatccggggcatcaccatgaagagcagcgccatcagcctgcactacgccactggaaatgaggagtacctgatcaacctgattgacagccctggccacgtggacttcagcagcgaggtgtccacagctgtgcgcatctgtgatggctgcatcatcgtggtggatgctgtggagggcgtgtgcccccagacccaggccgtgctgcggcaggcctggctggagaacatccggcctgtgctggtgatcaacaagattgacaggctcatcgtggagctgaagttcaccccccaggaggcctacagccacctgaagaacatcctggagcagatcaatgccctgaccggcaccctcttcaccagcaaggtgctggaggagcgggcagagcgggagacagagagccaggtgaaccccaacagcgagcagggcgagcaggtgtatgactggagcacaggcctggaggacacagatgacagccacctgtacttcagccctgagcagggcaatgtggtgttcaccagcgccattgatggctggggctttggaattgagcactttgcccgcatctacagccagaagattggcatcaagaaggaggtgctgatgaagaccctgtggggagactactacatcaacatgaaggccaagaagatcatgaagggggaccaggccaagggcaagaagcccctgtttgtgcagctgatcctggagaacatctggagcctgtatgatgctgtgctgaagaaggacaaggacaagattgacaagatcgtgaccagcctgggcctgaagattggagcccgggaggcccggcacagcgaccccaaggtgcagatcaatgccatctgcagccagtggctgcccatcagccatgctgtgctggccatggtgtgccagaagctgcccagccccctggacatcacagctgagcgggtggagcggctgatgtgcaccggcagccagacctttgacagcttccccccagagacccaggccctgaaggccgccttcatgaagtgtggcagcgaggacacagcccctgtgatcatctttgtgtccaagatgtttgctgtggatgccaaggccctgccccagaacaagccccggcccctgacccaggaggagatcgcccagaggcgggagcgggcccggcagagacatgctgagaagctggccgccgcccagggccaggcccccctggagcccacccaggacggcagcgccatcgagacctgccccaagggggaggagcccagaggagatgagcagcaggtggagagcatgacccccaagcctgtgctgcaggaggagaacaaccaggagagcttcatcgcctttgcccgggtcttctctggagtggcccggcggggcaagaagatctttgtgctgggccccaagtacagccccctggagttcctgcggcgggtgcccctgggcttcagcgcccccccagatggcctgccccaggtgccccacatggcctactgtgccctggagaacctgtacctgctgatgggccgggagctggagtacctggaggaggtgcccccaggaaatgtgctgggcattggaggcctgcaggactttgtgctgaagagcgccaccctgtgcagcctgcccagctgcccccccttcatccccctgaactttgaggccacccccatcgtgcgggtggccgtggagcccaagcaccccagcgagatgccccagctggtgaagggcatgaagctgctgaaccaggccgacccctgtgtgcagatcctgatccaggagaccggggagcacgtgctggtgacagctggggaggtgcacctgcagcgctgcctggatgacctgaaggagagatttgccaagatccacatctctgtgtctgagcccatcatccccttccgggagaccatcaccaagccacccaaggtggacatggtgaatgaggagatcggcaagcagcagaaggtggccgtcatccaccagatgaaggaggaccagagcaagatccctgagggcatccaggtggacagtgatggcctcatcaccatcaccacccccaacaagctggccaccctgtctgtgcgggccatgcccctgcctgaggaggtgacccagatcctggaggagaacagcgacctgatccgctccatggagcagctgaccagcagcctgaatgaaggagagaacacccacatgatccaccagaagacccaggagaagatctgggagttcaagggcaagctggagcagcacctgaccggccgccgctggagaaatattgtggaccagatctggagctttggccccaggaaatgtggccccaacatcctggtgaacaagtctgaggacttccagaacagcgtgtggacaggccctgctgacaaggccagcaaggaggccagccgctacagagacctgggcaacagcatcgtgtctggcttccagctggccaccctgagcggccccatgtgtgaggagcccctgatgggcgtgtgctttgtgctggagaagtgggacctgagcaagtttgaggagcagggcgccagtgacctggccaaggagggccaggaggagaatgagacctgcagcggcggcaatgaaaaccaggagctgcaggacggctgcagcgaggcctttgagaagaggaccagccagaagggggagagccccctgacagactgctacggccccttcagcggccagctgattgccaccatgaaggaggcctgccgctatgccctgcaggtgaagccccagaggctgatggccgccatgtacacctgtgacatcatggccactggagatgtgctgggccgggtgtatgctgtgctgagcaagcgggagggccgggtgctgcaggaggagatgaaggagggcacagacatgttcatcatcaaggctgtgctgcctgtggccgagagctttggatttgctgatgagatcaggaagaggaccagcggcctggccagcccccagctggtgttcagccactgggagatcatccccagcgaccccttctgggtgcccaccacagaggaggagtacctgcactttggagagaaggctgacagcgagaaccaggccaggaagtacatgaatgctgtgaggaagaggaagggcctgtatgtggaggagaagatcgtggagcacgccgagaagcagaggaccctgagcaagaacaagtag

SEQ ID NO: 215796 - DNA, 93 bp, Artificial Sequence
  derived and/or modified sequence
atggtgctgaacagcctggacaagatgatccagctgcagaagaacacagccaacatccggaacatctgtgtgctggcccacgtggaccactag

SEQ ID NO: 215797 - DNA, 54 bp, Artificial Sequence
  derived and/or modified sequence
atggtgctgaacagcctggacaagatgatccagctgcagaagaacacagcctag

SEQ ID NO: 215798 - DNA, 3363 bp, Artificial Sequence
  derived and/or modified sequence
atggtgctgaacagcctggacaagatgatccagctgcagaagaacacggcaaacatccgtaacatttgtgttctcgcccacgtggaccatggaaaaactacactggctgattgcctgattagcagcaatgggatcatctcttcaaggcttgctggtaaacttagatacatggattctagggaggacgaacagattagggggatcactatgaagtccagcgccattagcctgcactatgcaacaggcaatgaagaatatctaataaacctgatcgatagtcctggccacgtcgatttctcttctgaggtaagcacagcagtgcgaatctgtgacggatgcataatagtcgtcgatgccgtcgagggagtgtgcccacaaacacaggccgtcctcagacaggcttggctggaaaatatccgtcctgttctggttattaacaaaatagatcgactcattgtggagctcaagtttaccccacaggaggcctacagccatctgaaaaacattctggagcagatcaacgccctcactggaacgctgttcacctccaaggttctcgaagaacgcgccgagagggaaaccgaatctcaggtgaatcccaacagcgagcagggagaacaggtgtatgattggtcaacagggttggaggacacggatgatagccacctgtattttagccccgagcagggcaatgttgtgttcacttcagctatcgatggatggggttttgggatcgaacacttcgcccgcatatactcccagaaaatcggaattaagaaggaagtcctgatgaaaacgctgtggggggactattacataaatatgaaagctaaaaagataatgaagggcgatcaggcgaagggaaaaaaacccctgttcgtacagctcatcctggaaaatatctggtccttatacgatgcagtgctgaaaaaggacaaagacaagatcgacaagatagtgacatcactgggactgaaaataggcgcacgcgaagctagacactcagaccctaaggtccagatcaatgcaatttgtagccaatggctcccaatctcccacgctgtgcttgctatggtgtgccaaaaactgccgtctcctctggacataactgccgaacgggtagaacgcttaatgtgcactggctcccagaccttcgacagctttccaccggagacacaggctttgaaggctgcgttcatgaaatgcggatctgaggacaccgcccccgttatcatcttcgtgagcaagatgtttgcagtggacgccaaggctctgccccagaacaagccccgcccgctaacccaggaggagatcgctcagcgccgagagcgggcccggcaacggcatgccgagaaactcgctgcagcgcaggggcaggcaccactagagcctacccaagatggttcagcgatcgaaacgtgtcccaaaggagaagaaccaaggggtgatgagcaacaggtggagtccatgacccccaaacccgtcctccaggaggagaataatcaggaaagcttcattgcattcgcgcgggtgttttccggagtcgcccgaaggggcaagaagatcttcgtactgggacctaagtatagcccattggagttcctccgcagggtgccgctgggcttcagtgcaccacctgacggtttaccacaggtgcctcatatggcctattgcgccctggaaaatctataccttttgatgggcagagaactggaatatctagaggaagttccaccaggtaacgtcctcggaatcggaggtcttcaagacttcgtgttaaagtctgccacactgtgtagcctccccagttgccccccctttattcctctaaactttgaggcgactcccattgtcagggtggctgtggaacctaagcacccatccgagatgccacaacttgtgaaagggatgaagctcctgaaccaagcggatccttgcgtccaaatccttatccaggaaactggagagcacgtgctggtcaccgctggcgaagtacatcttcaaagatgcctagacgatctaaaagaacgttttgcaaagattcacatctcggtgagcgaacccataataccttttcgggaaacaatcactaaaccccccaaggtggacatggtcaatgaggaaatcggaaaacagcagaaagtcgcagttattcaccagatgaaagaggaccaaagcaagatacccgagggcatacaggtggatagcgatggcctgatcactattacgacaccaaataagctggccacgcttagcgtgagagcaatgcccctgccggaagaggttacacagattttggaggaaaactcagacctgattcggtctatggaacagctgacatcctcgctcaacgaaggtgagaacactcacatgattcaccagaaaacacaagagaagatttgggagtttaagggaaagctagaacagcaccttactggaaggcgatggcggaatatagttgaccagatttggtcttttggccccaggaagtgtggccctaacatcctcgtcaacaagtcggaggattttcaaaactcagtctggactgggccagctgacaaggcttcaaaggaggcatctaggtaccgtgacctggggaatagcattgtgagcggttttcagctcgccacactgtccgggccaatgtgcgaagagccattgatgggagtgtgctttgtattagagaagtgggacctctctaagttcgaagagcagggcgccagcgatctcgctaaggagggtcaggaggagaacgaaacatgttcgggcgggaatgaaaatcaggaactccaggacggctgctcagaagcgtttgagaagaggacaagccagaagggcgagagcccacttaccgactgttatggccccttctccggacagctgatagctacaatgaaagaggcttgcaggtacgccctgcaagtcaaaccccagcgccttatggctgccatgtacacctgtgatataatggcaactggtgacgttctggggcgcgtgtacgcagtactttcaaagcgggaaggaagagtacttcaggaagagatgaaagaaggcacggatatgtttatcattaaggccgtactgcccgtggcagaaagcttcggattcgccgatgagatccggaagcgaacctcaggcttggcatcaccccagctggtgttttcacactgggagataattccctcggatcccttctgggtcccaaccacagaagaggagtatcttcactttggcgagaaggccgacagcgaaaaccaggccagaaaatatatgaacgctgtccggaagcgtaagggcctgtacgtcgaagagaaaatcgtcgagcatgccgaaaagcaacggactctgagcaagaataaatag

SEQ ID NO: 215799 - DNA, 93 bp, Artificial Sequence
  derived and/or modified sequence
atggtgctgaacagcctggacaagatgatccagctgcagaagaacacggccaacatcagaaacatttgcgtgttggctcatgtcgaccattag

SEQ ID NO: 215800 - DNA, 54 bp, Artificial Sequence
  derived and/or modified sequence
atggtgctgaacagcctggacaagatgatccagctgcagaagaacactgcgtag

SEQ ID NO: 215801 - DNA, 3363 bp, Artificial Sequence
  derived and/or modified sequence
atggtcctcaattccctcgacaaaatgattcagcttcagaagaacacagccaatattagaaacatctgcgttctagcacacgtagatcatgggaagacgacccttgcagactgcctgatctcaagcaatggaattatcagctctcgcctggccggaaaactacgatacatggactccagggaggacgagcagatccggggaataaccatgaagtcctccgctatctccctgcattacgctactggaaatgaggagtacctcattaacctgattgactcccctggccacgttgactttagcagcgaagtgagcaccgctgtgagaatttgtgacggctgcatcatagtggtcgatgcggtagaaggggtttgccctcagacccaagccgttttacgccaggcctggctggagaacatcagacctgtcctagtgatcaataagatcgataggcttatcgttgagcttaagttcacaccacaagaggcttacagccacctgaagaatattctggagcagataaatgctttaactggtacattgttcacttcaaaagttctggaggaaagggccgaaagggagaccgaaagccaggtgaatccgaactccgagcaaggcgaacaagtgtatgactggtccacgggccttgaggacacagatgacagccacctctattttagtcccgagcagggaaacgttgtttttaccagcgcgattgatggatggggcttcggaatcgagcactttgccaggatctacagccagaaaatcgggataaagaaagaagtcctcatgaaaacgctctggggggactactatattaacatgaaggctaaaaagatcatgaagggagaccaggcgaagggaaagaaaccactctttgttcagttaattctggaaaacatatggtccctatacgatgccgtcttaaagaaagacaaagataaaatcgacaaaatagtgacgtcactgggcctcaagatcggggcacgggaggcgaggcattctgatccaaaagtgcaaattaacgccatttgttctcagtggctgcctattagtcatgccgtcctggcaatggtgtgtcagaagttgcccagccctctggacatcacagccgagcgcgttgagcgcttgatgtgcacaggtagccagacttttgactcatttcctcctgagactcaggctctcaaggctgcctttatgaaatgcggttccgaggacaccgccccagtgatcatctttgtgtccaaaatgtttgccgttgacgcaaaggctcttccgcaaaacaagcctcgacctctcacacaagaggaaatagctcaaaggagggagcgggcaaggcagcgtcacgccgaaaagctggctgctgcccaagggcaggctccgttggagcctacgcaggatgggtccgcaatagaaacatgtcctaagggcgaagagcccagaggggacgagcagcaggtggagtctatgacccccaagccagtactgcaagaggagaacaaccaggagtcatttatcgcattcgcccgtgtcttcagtggcgtggcacggagagggaaaaaaatttttgtcctggggccaaaatactcccccctcgaattcctgagaagggtcccactgggcttttccgcccctcctgacggtcttccacaggtgccacatatggcctactgcgccctggaaaatttgtatctcctcatgggcagagaactggagtacctggaggaggtgccaccaggcaacgtactggggatcggcggactacaagacttcgtcctcaaatccgcaactctctgcagcctgcctagctgcccacctttcatcccactgaatttcgaggcaaccccaatagtcagagtcgccgtggaaccaaagcatccttctgagatgccccaattggtgaaaggaatgaaactcctcaatcaggccgacccatgtgtgcagatcctgatccaagagacaggagagcatgtcctagtcactgccggtgaagtccacttacagaggtgtctggacgacttgaaggaaaggttcgccaagatccatatctccgtgagcgaaccgattattcccttcagggagacgatcacaaaaccaccaaaagtcgacatggtgaacgaagagattggcaagcagcagaaagttgcagtcattcaccagatgaaggaggatcagagcaagatccctgaaggtattcaggtagacagcgacggtctcatcaccattaccactccgaacaaactggctacactgagcgtgagggccatgccactcccagaagaagtcactcaaattctggaggaaaatagtgatctgattcgcagcatggaacaattaacaagctcactgaacgagggggagaatacccatatgatccatcagaagactcaagagaaaatttgggaattcaaaggtaagctcgaacagcaccttactggcagaagatggcgaaatatagtcgatcagatctggtcttttgggcctcggaagtgcggacctaacatcctggttaacaagtccgaagacttccagaactcagtgtggacaggacctgctgacaaagcaagcaaggaagcatcaagataccgagacttggggaactcaattgtgtccgggttccaacttgcgactctgtctggacctatgtgtgaggaaccactgatgggcgtgtgttttgtactggaaaagtgggatttaagtaagtttgaggagcaaggagcttccgacctcgcaaaggaaggacaggaagaaaatgagacatgcagcgggggaaatgaaaatcaggagttgcaggatggttgctcagaggccttcgagaagcgcacatcccagaagggagaaagcccactgactgactgctacggaccgttttccggccagctcatcgccacaatgaaggaggcctgccggtacgctctgcaggtcaaaccccagcggctgatggccgctatgtatacctgtgatattatggctactggggatgtcctcggcagagtgtacgctgtattatccaagcgggagggcagggtgctgcaagaagagatgaaggagggcaccgatatgtttatcatcaaggcggttctgcccgttgcagaaagctttggcttcgccgacgaaattaggaagcgcaccagtggacttgcctccccacagctggtgttttcccactgggagatcattccatctgatcctttctgggttcccacaaccgaggaggagtatctgcacttcggggagaaggcggactccgagaatcaggctagaaaatatatgaacgccgtccggaagaggaagggtctgtatgtagaagaaaaaatcgtagaacatgcagaaaagcagaggacactcagcaagaacaagtag

SEQ ID NO: 215802 - DNA, 93 bp, Artificial Sequence
  derived and/or modified sequence
atggtgttgaatagcctcgacaagatgattcagctacaaaagaacaccgcgaatattcgcaatatctgcgtcttagctcatgtcgaccactag

SEQ ID NO: 215803 - DNA, 54 bp, Artificial Sequence
  derived and/or modified sequence
atggtgctgaattccctagataagatgattcaactccagaagaatactgcctag

SEQ ID NO: 215804 - protein, 1140 aa, Artificial Sequence
  derived and/or modified sequence
MATPGMSWQQHYYGGSAAKFAPSPATAQLAGHSMDYSQEMHLKMSKKIAQLTKVIYALNTKNDEHESAIQALKDAHEEEIQQILAETREKILQYKSKVTEELDLRRKIQVLESSLEDHIKMKQQALTEFEAYKHRVEDMQLCAEAQHVQRIVTMSREVEEIRRKFEEKLRSFGQLQVQFEKDKRLALEDLQAAHRREIQELLKSQQDHSASVNKGQEKAEELHRMEVESLNKMLEELRLERKKLIEDYEGKLNKAQSFYERELDTLKRSQLFTAESLQASKEKEADLRKEFQGQEAILRKTIGKLKTELQMVQDEAGSLLDKCQKLQTALAIAENNVQVLQKQLDDAKEGEMALLSKHKEVESELAAARERLQQQASDLVLKASHIGMLQATQMTQEVTIKDLESEKSRVNERLSQLEEERAFLRSKTQSLDEEQKQQILELEKKVNEAKRTQQEYYERELKNLQSRLEEEVTQLNEAHSKTLEELAWKHHMAIEAVHSNAIRDKKKLQMDLEEQHNKDKLNLEEDKNQLQQELENLKEVLEDKLNTANQEIGHLQDMVRKSEQGLGSAEGLIASLQDSQERLQNELDLTKDSLKETKDALLNVEGELEQERQQHEETIAAMKEEEKLKVDKMAHDLEIKWTENLRQECSKLREELRLQHEEDKKSAMSQLLQLKDREKNAARDSWQKKVEDLLNQISLLKQNLEIQLSQSQTSLQQLQAQFTQERQRLTQELEELEEQHQQRHKSLKEAHVLAFQTMEEEKEKEQRALENHLQQKHSAELQSLKDAHRESMEGFRIEMEQELQTLRFELEDEGKAMLASLRSELNHQHAAAIDLLRHNHHQELAAAKMELERSIDISRRQSKEHICRITDLQEELRHREHHISELDKEVQHLHENISALTKELEFKGKEILRIRSESNQQIRLHEQDLNKRLEKELDVMTADHLREKNIMRADFNKTNELLKEINAALQVSLEEMEEKYLMRESKPEDIQMITELKAMLTERDQIIKKLIEDNKFYQLELVNRETNFNKVFNSSPTVGVINPLAKQKKKNDKSPTNRFVSVPNLSALESGGVGNGHPNRLDPIPNSPVHDIEFNSSKPLPQPVPPKGPKTFLSPAQSEASPVASPDPQRQEWFARYFTF

SEQ ID NO: 215805 - DNA, 3423 bp, Artificial Sequence
  derived and/or modified sequence
atggccacccccggcatgagctggcagcagcactactacggcggcagcgccgccaagttcgcccccagccccgccaccgcccagctggccggccacagcatggactacagccaggagatgcacctgaagatgagcaagaagatcgcccagctgaccaaggtgatctacgccctgaacaccaagaacgacgagcacgagagcgccatccaggccctgaaggacgcccacgaggaggagatccagcagatcctggccgagaccagagagaagatcctgcagtacaagagcaaggtgaccgaggagctggacctgagaagaaagatccaggtgctggagagcagcctggaggaccacatcaagatgaagcagcaggccctgaccgagttcgaggcctacaagcacagagtggaggacatgcagctgtgcgccgaggcccagcacgtgcagagaatcgtgaccatgagcagagaggtggaggagatcagaagaaagttcgaggagaagctgagaagcttcggccagctgcaggtgcagttcgagaaggacaagagactggccctggaggacctgcaggccgcccacagaagagagatccaggagctgctgaagagccagcaggaccacagcgccagcgtgaacaagggccaggagaaggccgaggagctgcacagaatggaggtggagagcctgaacaagatgctggaggagctgagactggagagaaagaagctgatcgaggactacgagggcaagctgaacaaggcccagagcttctacgagagagagctggacaccctgaagagaagccagctgttcaccgccgagagcctgcaggccagcaaggagaaggaggccgacctgagaaaggagttccagggccaggaggccatcctgagaaagaccatcggcaagctgaagaccgagctgcagatggtgcaggacgaggccggcagcctgctggacaagtgccagaagctgcagaccgccctggccatcgccgagaacaacgtgcaggtgctgcagaagcagctggacgacgccaaggagggcgagatggccctgctgagcaagcacaaggaggtggagagcgagctggccgccgccagagagagactgcagcagcaggccagcgacctggtgctgaaggccagccacatcggcatgctgcaggccacccagatgacccaggaggtgaccatcaaggacctggagagcgagaagagcagagtgaacgagagactgagccagctggaggaggagagagccttcctgagaagcaagacccagagcctggacgaggagcagaagcagcagatcctggagctggagaagaaggtgaacgaggccaagagaacccagcaggagtactacgagagagagctgaagaacctgcagagcagactggaggaggaggtgacccagctgaacgaggcccacagcaagaccctggaggagctggcctggaagcaccacatggccatcgaggccgtgcacagcaacgccatcagagacaagaagaagctgcagatggacctggaggagcagcacaacaaggacaagctgaacctggaggaggacaagaaccagctgcagcaggagctggagaacctgaaggaggtgctggaggacaagctgaacaccgccaaccaggagatcggccacctgcaggacatggtgagaaagagcgagcagggcctgggcagcgccgagggcctgatcgccagcctgcaggacagccaggagagactgcagaacgagctggacctgaccaaggacagcctgaaggagaccaaggacgccctgctgaacgtggagggcgagctggagcaggagagacagcagcacgaggagaccatcgccgccatgaaggaggaggagaagctgaaggtggacaagatggcccacgacctggagatcaagtggaccgagaacctgagacaggagtgcagcaagctgagagaggagctgagactgcagcacgaggaggacaagaagagcgccatgagccagctgctgcagctgaaggacagagagaagaacgccgccagagacagctggcagaagaaggtggaggacctgctgaaccagatcagcctgctgaagcagaacctggagatccagctgagccagagccagaccagcctgcagcagctgcaggcccagttcacccaggagagacagagactgacccaggagctggaggagctggaggagcagcaccagcagagacacaagagcctgaaggaggcccacgtgctggccttccagaccatggaggaggagaaggagaaggagcagagagccctggagaaccacctgcagcagaagcacagcgccgagctgcagagcctgaaggacgcccacagagagagcatggagggcttcagaatcgagatggagcaggagctgcagaccctgagattcgagctggaggacgagggcaaggccatgctggccagcctgagaagcgagctgaaccaccagcacgccgccgccatcgacctgctgagacacaaccaccaccaggagctggccgccgccaagatggagctggagagaagcatcgacatcagcagaagacagagcaaggagcacatctgcagaatcaccgacctgcaggaggagctgagacacagagagcaccacatcagcgagctggacaaggaggtgcagcacctgcacgagaacatcagcgccctgaccaaggagctggagttcaagggcaaggagatcctgagaatcagaagcgagagcaaccagcagatcagactgcacgagcaggacctgaacaagagactggagaaggagctggacgtgatgaccgccgaccacctgagagagaagaacatcatgagagccgacttcaacaagaccaacgagctgctgaaggagatcaacgccgccctgcaggtgagcctggaggagatggaggagaagtacctgatgagagagagcaagcccgaggacatccagatgatcaccgagctgaaggccatgctgaccgagagagaccagatcatcaagaagctgatcgaggacaacaagttctaccagctggagctggtgaacagagagaccaacttcaacaaggtgttcaacagcagccccaccgtgggcgtgatcaaccccctggccaagcagaagaagaagaacgacaagagccccaccaacagattcgtgagcgtgcccaacctgagcgccctggagagcggcggcgtgggcaacggccaccccaacagactggaccccatccccaacagccccgtgcacgacatcgagttcaacagcagcaagcccctgccccagcccgtgccccccaagggccccaagaccttcctgagccccgcccagagcgaggccagccccgtggccagccccgacccccagagacaggagtggttcgccagatacttcaccttctag

SEQ ID NO: 215806 - DNA, 3423 bp, Artificial Sequence
  derived and/or modified sequence
atggccactcccggaatgtcctggcagcagcattattacggcggtagtgctgctaaatttgccccttcccctgcaactgctcagctggctggtcacagcatggattattcccaggaaatgcatcttaagatgagcaagaaaatcgctcagctgacaaaagtgatctatgcactgaatactaaaaatgacgaacatgagtccgctatacaggcccttaaagatgcacacgaggaggagatccagcagatcctggccgagactagagagaaaatcctgcaatacaaatccaaggtgaccgaagaattggaccttaggcgcaagatacaggtgctggagagttcactggaagatcacatcaagatgaaacagcaagctctcaccgaattcgaggcatacaagcatagggttgaggatatgcaactttgcgctgaggcacagcacgtacagcgaatcgtgaccatgtcgcgtgaggtggaggaaataaggaggaagtttgaggagaagctaaggtctttcggtcaactccaggtgcagttcgagaaagacaagaggctagctttagaagacttgcaggccgcccaccgacgggagattcaggagctgttgaagtcccaacaggatcattccgcttccgtgaataaaggtcaggagaaagctgaagagcttcatcgaatggaagttgaatcactgaataaaatgctggaggaactgcggctggagcgcaagaagctcatcgaagattacgagggcaagcttaacaaggctcagagtttctacgaaagggagcttgacactctaaagcgttcccaactgtttacagcggaatccctgcaggcctctaaagagaaggaggctgacctgagaaaggagtttcagggccaggaggccattctccgcaagactatcgggaagctaaaaactgagctgcaaatggtgcaggatgaggctgggagcctgctggataaatgccagaagctgcaaactgctctcgctatagccgagaataacgtacaggttcttcagaagcaactggatgacgcaaaagagggtgagatggcactcctctctaagcacaaagaggttgagtcagagttagccgccgctcgggagcggctgcaacagcaagcttctgatctggtcctaaaggccagccatattggcatgttgcaggccacacagatgacacaggaggtcactataaaagacctggagtcagagaaatcccgggtcaatgagaggctttcgcagctcgaagaagaacgagctttcctccgcagcaaaacccagtctctggacgaagagcagaagcaacaaatcctcgagcttgagaagaaagtcaatgaggctaagaggacgcaacaggagtactatgaacgggagctaaagaatttacagtctaggctcgaggaggaggtgactcaactgaacgaagcacactcgaagaccctggaggagttagcctggaaacaccacatggccattgaagccgtgcactcaaatgctatccgcgataagaagaaactgcagatggaccttgaagaacagcacaataaggataagctgaacctggaagaggacaagaaccagcttcagcaggagctggagaacctgaaagaagtccttgaggataaactgaacacagctaaccaggaaattggacacctgcaggatatggttaggaagagcgaacaggggttgggatctgcagaggggctgattgcctctttgcaggattctcaggagagacttcagaatgagttagacttaaccaaagactcattaaaggagactaaggacgctctcctgaatgttgaaggggagctagagcaggaacggcagcagcacgaagagacaattgctgctatgaaggaagaagaaaaactgaaagtggacaagatggcacacgatctggagatcaaatggaccgagaatttaaggcaagaatgttcaaagctgcgcgaggagctacgcctgcagcacgaagaggataagaaaagtgctatgagtcagctactccagttgaaggacagagagaaaaatgctgcccgcgactcttggcagaaaaaagtggaggaccttcttaatcaaatctccttgcttaagcagaacttggaaatccagctgagccagtctcagacaagtcttcaacagttgcaagcccagtttactcaggagagacaacggctcacccaggaactggaggagctggaagagcaacaccagcaaagacacaagtctttgaaggaagcccacgtactcgcttttcagacaatggaggaagagaaggaaaaagagcaaagagctcttgaaaatcatctccagcagaaacattccgccgagcttcagtcactgaaggacgcacatcgggaatcaatggagggattcaggattgagatggagcaggaactgcagacacttcgcttcgagctcgaggacgagggcaaagccatgctcgcctccctccggtccgagctgaatcaccaacacgcagccgcaattgaccttctgcgtcataatcaccatcaggagctggctgccgcaaagatggagctggagaggagtatcgacatctctcgccgacaatccaaggaacacatctgcaggataactgatctgcaggaggaactgcgtcatagggaacatcatatttcagaactggacaaagaagtccaacacctgcacgagaacatttctgctttgactaaggaattagaatttaaagggaaggagattctgcgcattcggagtgagtctaatcaacaaatacggctgcacgagcaagacttaaataaacgtctggagaaggagctggatgttatgacggcagaccacctaagggaaaagaacatcatgcgcgctgatttcaataaaactaacgagctgctgaaggagattaatgccgcattgcaagtgagcctggaggagatggaggaaaagtacctgatgcgggaatctaagccggaagacatccagatgataacggagctgaaagcaatgttaacagagagggatcagatcattaagaaactgatagaagataataaattttaccagttggagctggtgaatcgggagaccaattttaataaagtgtttaactcatcacccaccgtaggcgtgatcaatcctctcgctaagcaaaagaaaaagaatgataaatcccccaccaaccgtttcgtcagtgtgccgaacctcagcgccctggaaagcggcggagttgggaacggccatcctaacagactcgatcccatcccaaatagtccagttcacgatattgagtttaatagttcaaaaccactcccgcagcccgtaccgcctaaagggcctaaaacattcctgtcccctgcacagtccgaggcttcccccgtagccagccctgacccccagcggcaagagtggttcgcaagatattttacattctag

SEQ ID NO: 215807 - DNA, 4141 bp, Artificial Sequence
  derived and/or modified sequence
ggtaacggcggctcccgcgtcctcctccatgtccccgcctatccccgccgcagcccgccccgtctcctcctccctccgcagcctcgccgagtcctcggtgcgggctgcgagcgggacccgcggagctgcgctgtcctcgacgcctccgccaggcgcgggccgaggagcctccaagagctggcccggcccccggccgccgccgcccaaccccgggcatctgccccgcgccgttgtccccgcggcttcgggccggcgggaccgccccgtcccttccaggggtgacccgggggtcgcgggtgggacggcgcctgcggccgagtctggggggcgccgggtgtcgggtcgggaagcggccgccgcgactcttgcctcccgggcgtcgttgctccacgggcctgcctccacccgcggggacaggtgccccggctggggtctgttgggaagatggcgaccccgggcatgagctggcagcagcactattacggcggctcggcggccaaattcgcgccctcgccggccaccgcacagctggctgggcacagcatggactacagccaggagatgcacctgaaaatgagcaagaaaatcgcccagctcaccaaggtaatatatgctttaaacactaaaaatgatgagcatgaatctgcaattcaagccctcaaagatgctcatgaagaagaaattcaacaaattcttgctgaaacaagagaaaaaatattgcagtataaaagcaaagtaacagaggagctagaccttagaagaaagattcaagttttagaatcatcattagaagatcacataaaaatgaagcagcaggctttgacagaatttgaagcttataagcacagagttgaggacatgcaactttgtgcagaagcccagcatgtccaacgcatagtgaccatgtctagagaagtcgaagagattagaaggaaatttgaagaaaaattacggagctttggacaacttcaagtacagtttgaaaaagacaaacgattggcattggaagacttgcaagctgctcacagacgggagatacaagagctattgaagtcacagcaggatcacagtgcctcagtaaataaaggccaggaaaaggcagaggaactacacagaatggaggtggagtccctaaacaaaatgcttgaggagctaagacttgaacggaagaaactaattgaggattatgaaggcaagttgaataaagctcagtccttttatgaacgtgagcttgatactttgaaaaggtcacagctttttacagcagaaagcctacaggccagcaaagaaaaggaagctgatcttagaaaagaatttcagggacaagaagcaattttacgaaaaactataggaaaattaaagacagagttacagatggtacaggatgaagctggaagtcttcttgacaaatgccaaaagcttcagacggcacttgccatagcagagaacaatgttcaggttcttcaaaaacagcttgatgatgccaaggagggagaaatggccctattaagcaagcacaaagaagtggaaagtgagctagcagctgccagagaacgtttacaacagcaagcttcagatcttgtcctcaaagctagtcatattggaatgcttcaagcaactcaaatgacccaggaagttacaattaaagatttagaatcagaaaaatcgagagtcaatgagagattatctcaacttgaagaggaaagagcttttttgcgaagcaaaacccaaagtctggatgaagagcagaagcaacagattctagaactggagaagaaagtaaatgaagcaaagagaactcagcaagaatattatgaaagggaacttaaaaacctgcaaagtagattggaagaggaggtgactcaattaaacgaggcccattctaagactttggaagaattagcttggaagcaccatatggcaattgaagctgtccacagtaatgcaattagggataagaaaaaactgcaaatggatttggaagaacaacataacaaagataaactaaacctggaagaggataaaaatcagcttcaacaagagctagaaaacctaaaggaagtactggaagacaagttgaatacagccaatcaagagattggccacctccaagatatggtaaggaaaagtgaacaaggtcttggctctgcagaaggacttattgctagtcttcaggactcccaggaaaggcttcagaatgagcttgacttgactaaagacagcctaaaggagaccaaggatgctctattaaatgtggagggtgagctagaacaagaaaggcaacagcatgaagaaacaattgctgccatgaaagaagaagagaagctcaaagtggacaaaatggcccatgacttagaaattaagtggactgaaaatcttagacaagagtgttctaaacttcgtgaagagttaaggcttcaacatgaagaggataagaagtcagcaatgtctcaacttttgcagttgaaagatcgagagaaaaatgcagcaagagattcatggcagaagaaagtagaagatctcttaaaccagatttccttgctgaaacagaatctggagatacagctttcccagtctcagacttctttgcaacaactgcaagcccagtttacgcaagaacgacagcggcttacgcaagagcttgaagaattagaggagcaacatcagcaaagacacaaatcattaaaagaagcacatgtccttgcatttcaaactatggaagaggaaaaggaaaaggagcaaagagctcttgaaaatcatttacaacagaagcattctgcagagcttcaatcactaaaagatgcacacagagagtcaatggagggcttccggatagaaatggaacaggaacttcagactcttcggtttgaattagaagatgaaggaaaggctatgcttgcttccttgcgctcagaactcaaccatcaacatgcagctgcaattgatttgttacggcataatcatcatcaagaattggcagctgctaaaatggaattagagagaagcatagacatcagcagaagacagagtaaggagcacatatgtagaattacagatctacaagaggaattaagacacagagagcatcacatctctgaattggataaggaggttcagcaccttcatgagaatataagtgccctaaccaaagaactggaatttaaggggaaagaaattctcagaatacgaagtgaatctaaccaacagataaggttgcatgaacaagatttaaacaagagacttgaaaaagagttggatgtcatgacagcagaccacctcagagagaaaaatatcatgcgggcagattttaataagactaacgagctactcaaggaaataaatgccgctttacaagtgtcattagaagaaatggaagaaaaatatctaatgagagaatcaaaaccagaagatatacagatgattacagaattaaaagccatgcttacagaaagagaccagatcataaagaaactaattgaggataataagttttatcagctggaattagtcaatcgagaaactaacttcaacaaagtgtttaactcaagtcctactgttggtgttattaatccattggctaagcaaaagaagaagaatgataaatcaccaacaaacaggtttgtgagtgttcccaatctaagtgctctggaatctggtggagtgggcaatggacatcctaaccgcctggatcccattcctaattctccagtccacgatattgagttcaacagcagcaaaccacttccacagccagtgccacctaaagggcccaagacatttttgagtcctgctcagagtgaagcttctccagtggcttctccagatccccagcgccaggagtggtttgcccggtacttcacattctgaaagaattgtgttggcacagctctgtatagactgttactaagagcatgactttatacagattgttatgtaaataggctttcctatgtcaaacactgtgaatgagaaagtatttgtctctccaacttgaaaatgcactgtatttcctgtgatatttattggaatcattctataaggtactatattatgtgtgtaattataactgttatttttatttgagatggaagagtctttaacctttgtaattactgcataataaattttgttagaatcaaac

SEQ ID NO: 215808 - DNA, 3700 bp, Artificial Sequence
  derived and/or modified sequence
aaatctcacagtgctcatttttaaaagggtacacaaaaaaatctcaattccaaagaatttggatcagccaagagaaggcatgggaaaatatcaaatgtttgtatgattacctgggcaaccttttctgtgctatgtaaatgtgtaatgactaatcaaccaggacggccaagggatttgtttctagagataggcaattttcatttgtgcctgtgattggctcagctctgcgtgtgaagagggaaaaggcttccgtttatttagcataatgatggaccaaaacaaaagaagaaatcatttcactcatgcttaggtaatatatgctttaaacactaaaaatgatgagcatgaatctgcaattcaagccctcaaagatgctcatgaagaagaaattcaacaaattcttgctgaaacaagagaaaaaatattgcagtataaaagcaaagtaacagaggagctagaccttagaagaaagattcaagttttagaatcatcattagaagatcacataaaaatgaagcagcaggctttgacagaatttgaagcttataagcacagagttgaggacatgcaactttgtgcagaagcccagcatgtccaacgcatagtgaccatgtctagagaagtcgaagagattagaaggaaatttgaagaaaaattacggagctttggacaacttcaagtacagtttgaaaaagacaaacgattggcattggaagacttgcaagctgctcacagacgggagatacaagagctattgaagtcacagcaggatcacagtgcctcagtaaataaaggccaggaaaaggcagaggaactacacagaatggaggtggagtccctaaacaaaatgcttgaggagctaagacttgaacggaagaaactaattgaggattatgaaggcaagttgaataaagctcagtccttttatgaacgtgagcttgatactttgaaaaggtcacagctttttacagcagaaagcctacaggccagcaaagaaaaggaagctgatcttagaaaagaatttcagggacaagaagcaattttacgaaaaactataggaaaattaaagacagagttacagatggtacaggatgaagctggaagtcttcttgacaaatgccaaaagcttcagacggcacttgccatagcagagaacaatgttcaggttcttcaaaaacagcttgatgatgccaaggagggagaaatggccctattaagcaagcacaaagaagtggaaagtgagctagcagctgccagagaacgtttacaacagcaagcttcagatcttgtcctcaaagctagtcatattggaatgcttcaagcaactcaaatgacccaggaagttacaattaaagatttagaatcagaaaaatcgagagtcaatgagagattatctcaacttgaagaggaaagagcttttttgcgaagcaaaacccaaagtctggatgaagagcagaagcaacagattctagaactggagaagaaagtaaatgaagcaaagagaactcagcaagaatattatgaaagggaacttaaaaacctgcaaagtagattggaagaggaggtgactcaattaaacgaggcccattctaagactttggaagaattagcttggaagcaccatatggcaattgaagctgtccacagtaatgcaattagggataagaaaaaactgcaaatggatttggaagaacaacataacaaagataaactaaacctggaagaggataaaaatcagcttcaacaagagctagaaaacctaaaggaagtactggaagacaagttgaatacagccaatcaagagattggccacctccaagatatggtaaggaaaagtgaacaaggtcttggctctgcagaaggacttattgctagtcttcaggactcccaggaaaggcttcagaatgagcttgacttgactaaagacagcctaaaggagaccaaggatgctctattaaatgtggagggtgagctagaacaagaaaggcaacagcatgaagaaacaattgctgccatgaaagaagaagagaagctcaaagtggacaaaatggcccatgacttagaaattaagtggactgaaaatcttagacaagagtgttctaaacttcgtgaagagttaaggcttcaacatgaagaggataagaagtcagcaatgtctcaacttttgcagttgaaagatcgagagaaaaatgcagcaagagattcatggcagaagaaagtagaagatctcttaaaccagatttccttgctgaaacagaatctggagatacagctttcccagtctcagacttctttgcaacaactgcaagcccagtttacgcaagaacgacagcggcttacgcaagagcttgaagaattagaggagcaacatcagcaaagacacaaatcattaaaagaagcacatgtccttgcatttcaaactatggaagaggaaaaggaaaaggagcaaagagctcttgaaaatcatttacaacagaagcattctgcagagcttcaatcactaaaagatgcacacagagagtcaatggagggcttccggatagaaatggaacaggaacttcagactcttcggtttgaattagaagatgaaggaaaggctatgcttgcttccttgcgctcagaactcaaccatcaacatgcagctgcaattgatttgttacggcataatcatcatcaagaattggcagctgctaaaatggaattagagagaagcatagacatcagcagaagacagagtaaggagcacatatgtagaattacagatctacaagaggaattaagacacagagagcatcacatctctgaattggataaggaggttcagcaccttcatgagaatataagtgccctaaccaaagaactggaatttaaggggaaagaaattctcagaatacgaagtgaatctaaccaacagataagattagaagaaatggaagaaaaatatctaatgagagaatcaaaaccagaagatatacagatgattacagaattaaaagccatgcttacagaaagagaccagatcataaagaaactaattgaggataataagttttatcagctggaattagtcaatcgagaaactaacttcaacaaagtgtttaactcaagtcctactgttggtgttattaatccattggctaagcaaaagaagaagaatgataaatcaccaacaaacaggtttgtgagtgttcccaatctaagtgctctggaatctggtggagtgggcaatggacatcctaaccgcctggatcccattcctaattctccagtccacgatattgagttcaacagcagcaaaccacttccacagccagtgccacctaaagggcccaagacatttttgagtcctgctcagagtgaagcttctccagtggcttctccagatccccagcgccaggagtggtttgcccggtacttcacattctgaaagaattgtgttggcacagctctgtatagactgttactaagagcatgactttatacagattgttatgtaaataggctttcctatgtcaaacactgtgaatgagaaagtatttgtctctccaacttgaaaatgcactgtatttcctgtgatatttattggaatcattctataaggtactatattatgtgtgtaattataactgttatttttatttgagatggaagagtctttaacctttgtaattactgcataataaattttgttagaatcaaa

SEQ ID NO: 215809 - DNA, 3423 bp, Artificial Sequence
  derived and/or modified sequence
atggccaccccaggcatgtcctggcagcagcactactatggaggcagcgctgccaagtttgcccccagccctgccacagcccagctggccggccacagcatggactacagccaggagatgcacctgaagatgagcaagaagatcgcccagctgaccaaggtgatctatgccctgaacaccaagaatgatgaacatgaaagtgccatccaggccctgaaggatgcccacgaggaggagatccagcagatcctggccgagacccgggagaagatcctgcagtacaagagcaaggtgacagaggagctggacctgcggaggaagatccaggtgctggagagcagcctggaggaccacatcaagatgaagcagcaggccctgacagaatttgaggcctacaagcaccgggtggaggacatgcagctgtgtgccgaggcccagcacgtgcagagaattgtgaccatgagccgggaggtggaggagatccggaggaagtttgaggagaagctgcggagctttggccagctgcaggtgcagtttgagaaggacaagaggctggccctggaggacctgcaggccgcccacagaagagagatccaggagctgctgaagagccagcaggaccacagcgcctctgtgaacaagggccaggagaaggccgaggagctgcacaggatggaggtggagagcctgaacaagatgctggaggagctgcggctggagaggaagaagctgattgaggactatgagggcaagctgaacaaggcccagagcttctatgagcgggagctggacaccctgaagaggagccagctgttcaccgctgagagcctgcaggccagcaaggagaaggaggccgacctgaggaaggagttccagggccaggaggccatcctgaggaagaccatcggcaagctgaagacagagctgcagatggtgcaggatgaggccggcagcctgctggacaagtgccagaagctgcagacagccctggccatcgccgagaacaacgtgcaggtgctgcagaagcagctggatgatgccaaggagggggagatggccctgctgagcaagcacaaggaggtggagagcgagctggccgccgcccgggagcggctgcagcagcaggccagtgacctggtgctgaaggccagccacatcggcatgctgcaggccacccagatgacccaggaggtgaccatcaaggacctggagagcgagaagagccgggtgaatgaaaggctgagccagctggaggaggagcgggccttcctgcggagcaagacccagagcctggatgaggagcagaagcagcagatcctggagctggagaagaaggtgaatgaggccaagaggacccagcaggagtactatgagcgggagctgaagaacctgcagagccggctggaggaggaggtgacccagctgaatgaggcccacagcaagaccctggaggagctggcctggaagcaccacatggccatcgaggccgtgcacagcaatgccatccgggacaagaagaagctgcagatggacctggaggagcagcacaacaaggacaagctgaacctggaggaggacaagaaccagctgcagcaggagctggagaacctgaaggaggtgctggaggacaagctgaacacagccaaccaggagatcggccacctgcaggacatggtgaggaagtctgagcagggcctgggcagcgctgagggcctgattgccagcctgcaggacagccaggagcggctgcagaatgagctggacctgaccaaggacagcctgaaggagaccaaggatgccctgctgaatgtggagggggagctggagcaggagcggcagcagcacgaggagaccatcgccgccatgaaggaggaggagaagctgaaggtggacaagatggcccatgacctggagatcaagtggacagagaacctgcggcaggagtgcagcaagctgcgggaggagctgcggctgcagcacgaggaggacaagaagagcgccatgagccagctgctgcagctgaaggaccgggagaagaatgctgcccgggacagctggcagaagaaggtggaggacctgctgaaccagatcagcctgctgaagcagaacctggagatccagctgagccagagccagaccagcctgcagcagctgcaggcccagttcacccaggagcggcagaggctgacccaggagctggaggagctggaggagcagcaccagcagaggcacaagagcctgaaggaggcccacgtgctggccttccagaccatggaggaggagaaggagaaggagcagagggccctggagaaccacctgcagcagaagcacagcgctgagctgcagagcctgaaggatgcccaccgggagagcatggagggcttcagaattgagatggagcaggagctgcagaccctgcgctttgagctggaggatgagggcaaggccatgctggccagcctgcggtctgagctgaaccaccagcacgccgccgccatcgacctgctgcggcacaaccaccaccaggagctggccgccgccaagatggagctggagaggagcattgacatcagccggcggcagagcaaggagcacatctgccgcatcacagacctgcaggaggagctgcggcaccgggagcaccacatcagcgagctggacaaggaggtgcagcacctgcacgagaacatcagcgccctgaccaaggagctggagttcaagggcaaggagatcctgcgcatccgctctgagagcaaccagcagatccggctgcacgagcaggacctgaacaagaggctggagaaggagctggatgtgatgacagctgaccacctgcgggagaagaacatcatgagagctgacttcaacaagaccaatgagctgctgaaggagatcaatgctgccctgcaggtgtccctggaggagatggaggagaagtacctgatgagggagagcaagccagaggacatccagatgatcacagagctgaaggccatgctgacagagcgggaccagatcatcaagaagctgattgaggacaacaagttctaccagctggagctggtgaaccgggagaccaacttcaacaaggtgttcaacagcagccccaccgtgggcgtcatcaaccccctggccaagcagaagaagaagaatgacaagagccccaccaacagatttgtgtctgtgcccaacctgagcgccctggagagcggcggcgtgggcaatggccaccccaaccggctggaccccatccccaacagccctgtgcatgacatcgagttcaacagcagcaagcccctgccccagcctgtgccccccaagggccccaagaccttcctgagccctgcccagagcgaggccagccctgtggccagcccagacccccagaggcaggagtggtttgcccgctacttcaccttctag

SEQ ID NO: 215810 - DNA, 3423 bp, Artificial Sequence
  derived and/or modified sequence
atggccacccccggcatgagctggcagcagcactactacggcggctctgccgcaaaattcgccccttcaccagccactgcccagctcgcaggtcactcaatggactactctcaggaaatgcacctgaagatgtctaagaaaatcgcccagctgactaaagtcatttacgccttgaacactaagaatgacgaacatgagtccgctatacaggcgctgaaggacgcacacgaagaagagatacaacagatcctggcagaaaccagggagaaaattctgcagtacaagtccaaggtcactgaggaactggaccttaggcggaaaattcaagtactggagtcttctctggaggaccatatcaaaatgaaacagcaggccctgactgagttcgaggcttacaagcatagggtcgaggacatgcagctgtgtgctgaggcacagcacgtgcagcggattgtgacaatgagtagggaggttgaggagattcgccggaagtttgaggagaagttaagaagctttggtcagctgcaggtgcagtttgagaaagacaaacgcctagcccttgaggacctgcaagccgcacaccgcagagagatacaagagctgctgaagagccagcaggatcactctgccagtgttaataagggtcaggagaaagctgaagaactacatagaatggaggtcgaaagcctgaacaagatgctggaggaattaaggcttgagcgcaagaagctaatcgaggattatgaaggaaaactcaataaggcgcagtctttctacgagagagagctcgataccctgaagagaagtcagctcttcactgccgagtccttacaggccagtaaagagaaggaggctgatttgcgaaaagagttccagggacaagaggccatcctccgaaaaacaatcgggaagctgaagactgaattacaaatggtgcaggacgaggctggctctctactggataaatgtcagaagctccaaaccgcgctggcaatagctgagaacaacgttcaggttttacagaagcagctggatgatgctaaagaaggggaaatggctcttctgtcaaaacacaaagaagtggaaagcgagctggccgccgcaagggagcggctccaacagcaggctagtgacctcgtgttgaaagccagccatatagggatgcttcaggccacccagatgacccaagaagtgacaattaaggacttagagtccgaaaagtctagggtaaacgagcgtctgtcgcagctggaggaggaacgggcctttctgcggtccaagactcaaagtttggatgaagagcaaaagcagcagatcctggagctagagaaaaaggtgaacgaggctaagaggactcagcaggagtactatgaaagggaactcaagaatctgcagagccggctggaagaggaggttacccagctgaatgaagcacatagtaagacgctagaggaactggcgtggaagcatcacatggctatcgaggctgtgcattcaaatgcaatcagggataaaaagaaactgcaaatggacctggaggaacagcataataaggacaagcttaacctggaggaggataagaaccagctgcagcaggagctggagaacctcaaggaagttctggaggacaagttgaatacggctaaccaagagatcggccacttacaggatatggttagaaaaagtgagcagggccttggaagcgctgagggactcatcgcctctctgcaggactctcaggaaaggcttcagaacgaactggatctgactaaagactctctgaaggaaaccaaggatgccctgctgaatgtcgagggggaactggagcaggaacggcagcagcatgaagagacaatagccgctatgaaagaagaagaaaagctgaaggtcgataagatggcccatgacctggagatcaagtggacggaaaatcttcggcaggagtgcagcaaactgcgcgaggagctaaggctgcagcatgaagaagacaagaaaagcgccatgtcgcaactattgcaacttaaggacagagaaaaaaacgcggcccgcgattcttggcagaagaaggtcgaggacctgctgaaccagataagcctgctgaaacagaatctcgagattcaactgagccaaagccaaaccagcttgcagcaactccaagctcagttcacacaggaaagacagagattgacacaagaactcgaagaacttgaggagcagcaccagcagcgtcacaagtctttaaaagaagctcacgtcctcgctttccaaactatggaggaggagaaagagaaagaacagagagcacttgaaaatcacctgcagcagaagcactccgccgaacttcagtcactgaaggacgctcatagggaaagcatggaggggttcaggatagagatggaacaggagctgcaaactctgaggttcgagctggaggacgagggtaaagcaatgctagcctctttaagaagtgagttgaaccaccagcacgctgctgccatcgatttactacgtcacaaccaccaccaagagttggctgctgccaagatggagctagaaagaagcatcgatatctcgcggaggcagagtaaggagcacatttgccgtatcacggatctgcaagaagagctgcgtcaccgggaacaccacatttcggaacttgacaaagaggtccagcatctgcatgaaaacatcagcgcacttaccaaagagttggagttcaaaggcaaggagattctgagaatccgtagcgagagcaatcagcagatccggttgcatgaacaggacctgaataagaggctagaaaaggaactggacgtcatgacggctgaccatctccgcgagaaaaatattatgcgtgccgacttcaacaaaactaacgagctcctcaaggaaataaatgccgccttgcaggtgagtctcgaggaaatggaggagaagtacctgatgagggaatccaaaccagaagatattcaaatgatcacggagctcaaggccatgctgacagaacgagatcagattataaagaagctaatcgaggacaacaagttctaccagctcgagctggtcaatcgtgaaaccaacttcaacaaagtattcaatagcagcccaaccgtcggcgtaatcaatccactggccaaacaaaagaaaaaaaatgataaaagtccaacaaatagatttgtgtctgtgccgaacttatctgctctggaatctgggggggtcgggaacgggcatcccaatcgtttggacccaattcctaatagcccagttcacgacatcgagtttaacagttctaaaccacttccacagccagttcctcccaaaggccccaaaacctttctctctcccgctcagtctgaagcaagtcctgtggccagcccagacccacaacgccaggagtggtttgctcgatatttcaccttttag

SEQ ID NO: 215811 - DNA, 3423 bp, Artificial Sequence
  derived and/or modified sequence
atggcgacaccgggtatgtcgtggcagcagcattattacggcggaagtgctgctaaatttgctccctctcctgccaccgctcagctggcaggccactccatggactactcccaggagatgcacttgaagatgtctaagaagatcgcccagctcactaaagtgatttatgctctaaacacaaagaacgacgagcacgaatctgctatccaggctttgaaagatgcccacgaggaggagatccagcagatcttagctgaaactagggagaaaattctgcagtataaatcaaaagttaccgaggagctagatttaagacgcaaaattcaggtactcgagtctagtttagaggaccatatcaagatgaagcagcaagcgctgacggaattcgaggcgtataagcacagggtcgaggacatgcagctgtgtgccgaggcccagcatgtgcagaggatcgtgacgatgtctagagaagtggaggagattcgacgcaaatttgaggagaagctgcgcagcttcggccagctacaggtccagttcgagaaggataagagactcgctctcgaggacctgcaggcagcccatcgccgagagatacaggaactgctgaagagccaacaggatcactccgctagcgtgaacaaggggcaagaaaaagcagaggaattgcacaggatggaggtggagtcactgaataaaatgctcgaagagctaagattggagcgtaagaagctcatagaagactacgaaggaaaactcaacaaggcgcaaagtttttacgagagagagttggacactctgaagcgctctcagctgtttaccgctgagtctctgcaggcttccaaagaaaaagaggcggatctccgcaaagagtttcagggccaggaagcaatcttgaggaaaactattgggaagctgaagacagaactccaaatggtacaagacgaggccggttccttgctcgataaatgccagaagcttcaaacggccttagctatcgccgaaaacaatgtgcaggtgctacagaaacaactggatgatgcaaaggaaggcgagatggccctgctctccaagcacaaggaagttgaatcagagctggcggctgccagggagaggctgcagcagcaggcgagcgatctcgtcctcaaggctagtcacataggaatgctgcaagccacacagatgacccaggaggttaccatcaaggacctcgaatcagaaaagagtagagtgaatgagcgtctgagtcagttagaggaagagcgggcatttctacgctctaagactcagtcccttgatgaggagcagaaacaacaaattctggagctcgaaaagaaggtgaacgaggctaaaaggacacagcaggaatattacgagcgggaacttaagaatttacagtccagattggaggaagaggtcacacagctcaacgaagcacattccaaaactctagaagagctggcttggaaacaccacatggcaatcgaggctgtgcacagcaacgccatcagggacaagaaaaaactccagatggatctggaggagcaacataataaagacaagctgaatctcgaagaagacaagaatcagctgcaacaggaattagagaatctcaaggaagtccttgaggataagcttaataccgctaatcaggagattggtcaccttcaggatatggtacggaagagcgagcaaggtttgggaagtgccgaaggactcattgccagcctccaggactctcaggaacggctccaaaacgagttggatctgaccaaggattcactgaaggagaccaaggatgccctactgaacgtagagggggagcttgagcaggagcgacagcaacatgaggagactatcgctgccatgaaagaagaggagaagctaaaggttgacaaaatggcccatgatttagagataaagtggacagagaacttgcgacaagaatgctccaagcttagggaggagcttcgtttgcaacacgaagaggataagaagtctgcaatgagtcaactgttacaactgaaagacagggaaaagaacgccgcaagggattcttggcaaaaaaaggtcgaagatcttctaaaccaaatcagcctgctaaaacagaatctggaaattcagctgtctcagtcccaaacttctttgcagcagctgcaagcccaattcactcaagagcgccagcgacttacgcaggaactcgaagaactggaagaacagcaccaacaacggcataaatccttaaaggaggcacatgtcctggccttccaaaccatggaggaagagaaggagaaggaacagcgcgcactggagaaccatctccaacagaagcattctgcggaactccagtctctcaaagatgctcatagagaaagcatggaaggttttaggatagagatggaacaggagcttcaaaccctgcgattcgaattggaggatgagggcaaggcaatgttggccagcctgcggtccgaattgaatcatcaacacgccgcagccatagaccttctgagacacaaccatcaccaggaactcgccgctgcaaagatggaactggagcgatcaattgacatatccagacggcagtcaaaggaacacatctgcagaataaccgatctgcaggaggagctgcggcaccgggagcatcacattagtgaactggacaaagaagtgcagcatctgcatgagaatattagtgccctaacaaaagaactggagtttaagggtaaagagattctgcgaatcagaagtgagtcaaatcaacaaattcgtctgcatgagcaggacctcaataaacggctcgagaaggaattagatgtgatgactgccgaccatctgagagagaaaaatatcatgcgagctgattttaataaaaccaacgaacttctcaaggaaattaacgccgcattgcaagtgtcccttgaagaaatggaagagaaatatctcatgagggagtctaaaccagaggacatccaaatgataacagagctgaaagcgatgttgactgaaagggatcagattatcaagaagttgatagaagataacaagttttatcaactcgagcttgtgaacagagaaacaaattttaataaggtgttcaacagttcacccacagtcggtgtcattaacccccttgccaaacagaagaaaaagaacgacaagagccctacaaatcgattcgtgagcgttccgaacctgtctgccctagaatcaggcggagtcgggaatggccaccccaatagactggaccctattcccaattcgcccgtgcacgacatagagttcaattcctccaaaccattgccacagcccgttcctcccaaaggccctaaaacattcctcagtcctgcccagagcgaggctagccctgtggcttccccagacccgcagcgccaggagtggtttgctaggtattttacattttag

SEQ ID NO: 215812 - protein, 3222 aa, Artificial Sequence
  derived and/or modified sequence
MVTTVVAVGDTLAQPLAAAEVFIVEITLQDINDNPPVFPTDMLDLTVEENIGDGSKIMQLTAMDADEGANALVTYTIISGADDSFRIDPESGDLIATRRLDRERRSKYSLLVRADDGLQSSDMRINITVSDVNDHTPKFSRPVYSFDIPEDTIPGSLVAAILATDDDSGVNGEITYIVNEDDEDGIFFLNPITGVFNLTRLLDYEVQQYYILTVRAEDGGGQFTTIRVYFNILDVNDNPPIFSLNSYSTSLMENLPVGSTVLVFNVTDADDGINSQLTYSIASGDSLGQFTVDKNGVLKVLKALDRESQSFYNLVVQVHDLPQIPASRFTSTAQVSIILLDVNDNPPTFLSPKLTYIPENTPIDTVVFKAQATDPDSGPNSYIEYTLLNPLGNKFSIGTIDGEVRLTGELDREEVSNYTLTVVATDKGQPSLSSSTEVVVMVLDINDNNPIFAQALYKVEINENTLTGTDIIQVFAADGDEGTNGQVRYGIVNGNTNQEFRIDSVTGAITVAKPLDREKTPTYHLTVQATDRGSTPRTDTSTVSIVLLDINDFVPVFELSPYSVNVPENLGTLPRTILQVVARDDDRGSNSKLSYVLFGGNEDNAFTLSASGELGVTQSLDRETKERFVLMITATDSGSPALTGTGTINVIVDDVNDNVPTFASKAYFTTIPEDAPTGTDVLLVNASDADASKNAVIRIIGGNSQFTINPSTGQIITSALLDRETKDNYTLVVVCSDAGSPEPLSSSTSVLVTVTDVNDNPPRFQHHPYVTHIPSPTLPGSFVFAVTVTDADIGPNSELHYSLSGRNSEKFHIDPLRGAIMAAGPLNGASEVTFSVHVKDGGSFPKTDSTTVTVRFVNKADFPKVRAKEQTFMFPENQPVSSLVTTITGSSLRGEPMSYYIASGNLGNTFQIDQLTGQVSISQPLDFEKIQKYVVWIEARDGGFPPFSSYEKLDITVLDVNDNAPIFKEDPFISEILENLSPRKILTVSAMDKDSGPNGQLDYEIVNGNMENSFSINHATGEIRSVRPLDREKVSHYVLTIKSSDKGSPSQSTSVKVMINILDENDNAPRFSQIFSAHVPENSPLGYTVTRVTTSDEDIGINAISRYSIMDASLPFTINPSTGDIVISRPLNREDTDRYRIRVSAHDSGWTVSTDVTIFVTDINDNAPRFSRTSYYLDCPELTEIGSKVTQVFATDPDEGSNGQVFYFIKSQSEYFRINATTGEIFNKQILKYQNVTGFSNVNINRHSFIVTSSDRGKPSLISETTVTINIVDSNDNAPQFLKSKYFTPVTKNVKVGTKLIRVTAIDDKDFGLNSEVEYFISNDNHLGKFKLDNDTGWISVASSLISDLNQNFFITVTAKDKGNPPLSSQATVHITVTEENYHTPEFSQSHMSATIPESHSIGSIVRTVSARDRDAAMNGLIKYSISSGNEEGIFAINSSTGILTLAKALDYELCQKHEMTISAIDGGWVARTGYCSVTVNVIDVNDNSPVFLSDDYFPTVLENAPSGTTVIHLNATDADSGTNAVIAYTVQSSDSDLFVIDPNTGVITTQGFLDFETKQSYHLTVKAFNVPDEERCSFATVNIQLKGTNEYVPRFVSKLYYFEISEAAPKGTIVGEVFASDRDLGTDGEVHYLIFGNSRKKGFQINKKTGQIYVSGILDREKEERVSLKVLAKNFGSIRGADIDEVTVNVTVLDANDPPIFTLNIYSVQISEGVPIGTHVTFVSAFDSDSIPSWSRFSYFIGSGNENGAFSINPQTGQITVTAELDRETLPIYNLSVLAVDSGTPSATGSASLLVTLEDINDNGPMLTVSEGEVMENKRPGTLVMTLQSTDPDLPPNQGPFTYYLLSTGPATSYFSLSTAGVLSTTREIDREQIADFYLSVVTKDSGVPQMSSTGTVHITVIDQNDNPSQSRTVEIFVNYYGNLFPGGILGSVKPQDPDVLDSFHCSLTSGVTSLFSIPGGTCDLNSQPRSTDGTFDLTVLSNDGVHSTVTSNIRVFFAGFSNATVDNSILLRLGVPTVKDFLTNHYLHFLRIASSQLTGLGTAVQLYSAYEENNRTFLLAAVKRNHNQYVNPSGVATFFESIKEILLRQSGVKVESVDHDSCVHGPCQNGGSCLRRLAVSSVLKSRESLPVIIVANEPLQPFLCKCLPGYAGSWCEIDIDECLPSPCHSGGTCHNLVGGFSCSCPDGFTGRACERDINECLQSPCKNGAICQNFPGSFNCVCKTGYTGVFGKHCELNSYGFEELSYMEFPSLDPNNNYIYVKFATIKSHALLLYNYDNQTGDRAEFLALEIAEERLRFSYNLGSGTYKLTTMKKVSDGHFHTVIARRAGMAASLTVDSCSENQEPGYCTVSNVAVSDDWTLDVQPNRVTVGGIRSLEPILQRRGHVESHDFVGCIMEFAVNGRPLEPSQALAAQGILDQYGDFISYCFKEKKCKKVCFTVTPDTALSLEGKGRLDYHMSQNEKREYLLRQSLRGAMLEPFGVNSLEVKFRTRSENGVLIHIQESSNYTTVKIKNGKVYFTSDAGIAGKVERNIPEVYVADGHWHTFLIGKNGTATVLSVDRIYNRDIIHPTQDFGGLDVLTISLGGIPPNQAHRDAQTAGFDGCIASMWYGGESLPFSGKHSLASISKTDPSVKIGCRGPNICASNPCWGDLLCINQWYAYRCVPPGDCASHPCQNGGSCEPGLHSGFTCSCPDSHTGRTCEMVVACLGVLCPQGKVCKAGSPAGHVCVLSQGPEEISLPLWAVPAIVGSCATVLALLVLSLILCNQCRGKKAKNPKEEKKPKEKKKKGSENVAFDDPDNIPPYGDDMTVRKQPEGNPKPDIIERENPYLIYDETDIPHNSETIPSAPLASPEQEIEHYDIDNASSIAPSDADIIQHYKQFRSHTPKFSIQRHSPLGFARQSPMPLGASSLTYQPSYGQGLRTSSLSHSACPTPNPLSRHSPAPFSKSSTFYRNSPARELHLPIRDGNTLEMHGDTCQPGIFNYATRLGRRSKSPQAMASHGSRPGSRLKQPIGQIPLESSPPVGLSIEEVERLNTPRPRNPSICSADHGRSSSEEDCRRPLSRTRNPADGIPAPESSSDSDSHESFTCSEMEYDREKPMVYTSRMPKLSQVNESDADDEDNYGARLKPRRYHGRRAEGGPVGTQAAAPGTADNTLPMKLGQQAGTFNWDNLLNWGPGFGHYVDVFKDLASLPEKAAANEEGKAGTTKPVPKDGEAEQYV

SEQ ID NO: 215813 - protein, 4981 aa, Artificial Sequence
  derived and/or modified sequence
MDLAPDRATGRPWLPLHTLSVSQLLRVFWLLSLLPGQAWVHGAEPRQVFQVLEEQPPGTLVGTIQTRPGFTYRLSESHALFAINSSTGALYTTSTIDRESLPSDVINLVVLSSAPTYPTEVRVLVRDLNDNAPVFPDPSIVVTFKEDSSSGRQVILDTATDSDIGSNGVDHRSYRIIRGNEAGRFRLDITLNPSGEGAFLHLVSKGGLDREVTPQYQLLVEVEDKGEPKRRGYLQVNVTVQDINDNPPVFGSSHYQAGVPEDAVVGSSVLQVAAADADEGTNADIRYRLQDEGTPFQMDPETGLITVREPLDFEARRQYSLTVQAMDRGVPSLTGRAEALIQLLDVNDNDPVVKFRYFPATSRYASVDENAQVGTVVALLTVTDADSPAANGNISVQILGGNEQRHFEVQSSKVPNLSLIKVASALDRERIPSYNLTVSVSDNYGAPPGAAVQARSSVASLVIFVNDINDHPPVFSQQVYRVNLSEEAPPGSYVSGISATDGDSGLNANLRYSIVSGNGLGWFHISEHSGLVTTGSSGGLDRELASQIVLNISARDQGVHPKVSYAQLVVTLLDVNDEKPVFSQPEGYDVSVVENAPTGTELLMLRATDGDLGDNGTVRFSLQEAETDRRSFRLDPVSGRLSTISSLDREEQAFYSLLVLATDLGSPPQSSMARINVSLLDINDNSPVFYPVQYFAHIKENEPGGSYITTVSATDPDLGTNGTVKYSISAGDRSRFQVNAQSGVISTRMALDREEKTAYQLQIVATDGGNLQSPNQAIVTITVLDTQDNPPVFSQVAYSFVVFENVALGYHVGSVSASTMDLNSNISYLITTGDQKGMFAINQVTGQLTTANVIDREEQSFYQLKVVASGGTVTGDTMVNITVKDLNDNSPHFLQAIESVNVVENWQAGHSIFQAKAVDPDEGVNGMVLYSLKQNPKNLFAINEKNGTISLLGPLDVHAGSYQIEILASDMGVPQLSSSVILTVYVHDVNDNSPVFDQLSYEVTLSESEPVNSRFFKVQASDKDSGANGEIAYTIAEGNTGDAFGIFPDGQLYIKSELDRELQDRYVLMVVASDRAVEPLSATVNVTVILEDVNDNRPLFNSTNYTFYFEEEQRAGSFVGKVSAVDKDFGPNGEVRYSFEMVQPDFELHAISGEITNTHQFDRESLMRRRGTAVFSFTVIATDQGIPQPLKDQATVHVYMKDINDNAPKFLKDFYQATISESAANLTQVLRVSASDVDEGNNGLIHYSIIKGNEERQFAIDSTSGQVTLIGKLDYEATPAYSLVIQAVDSGTIPLNSTCTLNIDILDENDNTPSFPKSTLFVDVLENMRIGELVSSVTATDSDSGDNADLYYSITGTNNHGTFSISPNTGSIFLAKKLDFETQSLYKLNITAKDQGRPPRSSTMSVVIHVRDFNDNPPSFPPGDIFKSIVENIPIGTSVISVTAHDPDADINGQLSYTIIQQMPRGNHFTIDEVKGTIYTNAEIDREFANLFELTVKANDQAVPIETRRYALKNVTILVTDLNDNVPMFISQNALAADPSAVIGSVLTTIMAADPDEGANGEIEYEIINGDTDTFIVDRYSGDLRVASALVPSQLIYNLIVSATDLGPERRKSTTELTIILQGLDGPVFTQPKYITILKEGEPIGTNVISIEAASPRGSEAPVEYYIVSVRCEEKTVGRLFTIGRHTGIIQTAAILDREQGACLYLVDVYAIEKSTAFPRTQRAEVEITLQDINDNPPVFPTDMLDLTVEENIGDGSKIMQLTAMDADEGANALVTYTIISGADDSFRIDPESGDLIATRRLDRERRSKYSLLVRADDGLQSSDMRINITVSDVNDHTPKFSRPVYSFDIPEDTIPGSLVAAILATDDDSGVNGEITYIVNEDDEDGIFFLNPITGVFNLTRLLDYEVQQYYILTVRAEDGGGQFTTIRVYFNILDVNDNPPIFSLNSYSTSLMENLPVGSTVLVFNVTDADDGINSQLTYSIASGDSLGQFTVDKNGVLKVLKALDRESQSFYNLVVQVHDLPQIPASRFTSTAQVSIILLDVNDNPPTFLSPKLTYIPENTPIDTVVFKAQATDPDSGPNSYIEYTLLNPLGNKFSIGTIDGEVRLTGELDREEVSNYTLTVVATDKGQPSLSSSTEVVVMVLDINDNNPIFAQALYKVEINENTLTGTDIIQVFAADGDEGTNGQVRYGIVNGNTNQEFRIDSVTGAITVAKPLDREKTPTYHLTVQATDRGSTPRTDTSTVSIVLLDINDFVPVFELSPYSVNVPENLGTLPRTILQVVARDDDRGSNSKLSYVLFGGNEDNAFTLSASGELGVTQSLDRETKERFVLMITATDSGSPALTGTGTINVIVDDVNDNVPTFASKAYFTTIPEDAPTGTDVLLVNASDADASKNAVIRIIGGNSQFTINPSTGQIITSALLDRETKDNYTLVVVCSDAGSPEPLSSSTSVLVTVTDVNDNPPRFQHHPYVTHIPSPTLPGSFVFAVTVTDADIGPNSELHYSLSGRNSEKFHIDPLRGAIMAAGPLNGASEVTFSVHVKDGGSFPKTDSTTVTVRFVNKADFPKVRAKEQTFMFPENQPVSSLVTTITGSSLRGEPMSYYIASGNLGNTFQIDQLTGQVSISQPLDFEKIQKYVVWIEARDGGFPPFSSYEKLDITVLDVNDNAPIFKEDPFISEILENLSPRKILTVSAMDKDSGPNGQLDYEIVNGNMENSFSINHATGEIRSVRPLDREKVSHYVLTIKSSDKGSPSQSTSVKVMINILDENDNAPRFSQIFSAHVPENSPLGYTVTRVTTSDEDIGINAISRYSIMDASLPFTINPSTGDIVISRPLNREDTDRYRIRVSAHDSGWTVSTDVTIFVTDINDNAPRFSRTSYYLDCPELTEIGSKVTQVFATDPDEGSNGQVFYFIKSQSEYFRINATTGEIFNKQILKYQNVTGFSNVNINRHSFIVTSSDRGKPSLISETTVTINIVDSNDNAPQFLKSKYFTPVTKNVKVGTKLIRVTAIDDKDFGLNSEVEYFISNDNHLGKFKLDNDTGWISVASSLISDLNQNFFITVTAKDKGNPPLSSQATVHITVTEENYHTPEFSQSHMSATIPESHSIGSIVRTVSARDRDAAMNGLIKYSISSGNEEGIFAINSSTGILTLAKALDYELCQKHEMTISAIDGGWVARTGYCSVTVNVIDVNDNSPVFLSDDYFPTVLENAPSGTTVIHLNATDADSGTNAVIAYTVQSSDSDLFVIDPNTGVITTQGFLDFETKQSYHLTVKAFNVPDEERCSFATVNIQLKGTNEYVPRFVSKLYYFEISEAAPKGTIVGEVFASDRDLGTDGEVHYLIFGNSRKKGFQINKKTGQIYVSGILDREKEERVSLKVLAKNFGSIRGADIDEVTVNVTVLDANDPPIFTLNIYSVQISEGVPIGTHVTFVSAFDSDSIPSWSRFSYFIGSGNENGAFSINPQTGQITVTAELDRETLPIYNLSVLAVDSGTPSATGSASLLVTLEDINDNGPMLTVSEGEVMENKRPGTLVMTLQSTDPDLPPNQGPFTYYLLSTGPATSYFSLSTAGVLSTTREIDREQIADFYLSVVTKDSGVPQMSSTGTVHITVIDQNDNPSQSRTVEIFVNYYGNLFPGGILGSVKPQDPDVLDSFHCSLTSGVTSLFSIPGGTCDLNSQPRSTDGTFDLTVLSNDGVHSTVTSNIRVFFAGFSNATVDNSILLRLGVPTVKDFLTNHYLHFLRIASSQLTGLGTAVQLYSAYEENNRTFLLAAVKRNHNQYVNPSGVATFFESIKEILLRQSGVKVESVDHDSCVHGPCQNGGSCLRRLAVSSVLKSRESLPVIIVANEPLQPFLCKCLPGYAGSWCEIDIDECLPSPCHSGGTCHNLVGGFSCSCPDGFTGRACERDINECLQSPCKNGAICQNFPGSFNCVCKTGYTGKMCESSVNYCECNPCFNGGSCQSGVDSYYCHCPFGVFGKHCELNSYGFEELSYMEFPSLDPNNNYIYVKFATIKSHALLLYNYDNQTGDRAEFLALEIAEERLRFSYNLGSGTYKLTTMKKVSDGHFHTVIARRAGMAASLTVDSCSENQEPGYCTVSNVAVSDDWTLDVQPNRVTVGGIRSLEPILQRRGHVESHDFVGCIMEFAVNGRPLEPSQALAAQGILDQCPRLEGACTRSPCQHGGTCMDYWSWQQCHCKEGLTGKYCEKSVTPDTALSLEGKGRLDYHMSQNEKREYLLRQSLRGAMLEPFGVNSLEVKFRTRSENGVLIHIQESSNYTTVKIKNGKVYFTSDAGIAGKVERNIPEVYVADGHWHTFLIGKNGTATVLSVDRIYNRDIIHPTQDFGGLDVLTISLGGIPPNQAHRDAQTAGFDGCIASMWYGGESLPFSGKHSLASISKTDPSVKIGCRGPNICASNPCWGDLLCINQWYAYRCVPPGDCASHPCQNGGSCEPGLHSGFTCSCPDSHTGRTCEMVVACLGVLCPQGKVCKAGSPAGHVCVLSQGPEEISLPLWAVPAIVGSCATVLALLVLSLILCNQCRGKKAKNPKEEKKPKEKKKKGSENVAFDDPDNIPPYGDDMTVRKQPEGNPKPDIIERENPYLIYDETDIPHNSETIPSAPLASPEQEIEHYDIDNASSIAPSDADIIQHYKQFRSHTPKFSIQRHSPLGFARQSPMPLGASSLTYQPSYGQGLRTSSLSHSACPTPNPLSRHSPAPFSKSSTFYRNSPARELHLPIRDGNTLEMHGDTCQPGIFNYATRLGRRSKSPQAMASHGSRPGSRLKQPIGQIPLESSPPVGLSIEEVERLNTPRPRNPSICSADHGRSSSEEDCRRPLSRTRNPADGIPAPESSSDSDSHESFTCSEMEYDREKPMVYTSRMPKLSQVNESDADDEDNYGARLKPRRYHGRRAEGGPVGTQAAAPGTADNTLPMKLGQQAGTFNWDNLLNWGPGFGHYVDVFKDLASLPEKAAANEEGKAGTTKPVPKDGEAEQYV

SEQ ID NO: 215814 - DNA, 9669 bp, Artificial Sequence
  derived and/or modified sequence
atggtaacaacggtagtggcagtgggtgataccttagctcaaccattagctgcagctgaagtgtttattgtagaaataacacttcaggatatcaatgacaatccaccagtatttccaacggacatgctggatctcacggtagaggagaacattggagatggctctaagattatgcagctgacagccatggatgctgatgagggtgcaaatgctctcgtcacatacactatcattagtggagctgatgatagttttcgcatcgacccagaatccggagatctgatagcaaccaggcggttggacagggaacgccgctccaaatattcactgctagttcgtgctgatgatggtcttcagtcctcggatatgagaattaatatcactgtcagtgatgtgaatgaccatacacccaaattttccagacccgtgtactcttttgacattcctgaggacacaatccctggttctttggtagcagccattttagccacggatgatgactctggtgtgaatggagaaattacatatattgtgaatgaagatgatgaagatggcatctttttcctgaatcctattactggggtctttaatttgactcgattattagattatgaagtacagcaatattatatcctcactgttcgagcagaagatggtgggggacaatttactaccatcagagtttatttcaatattctagatgtaaatgataatccacctattttcagcttgaattcatacagcacatctttaatggagaatctacctgtgggatctactgttcttgtgtttaatgttactgatgcagatgatggcatcaactctcaattgacttatagcattgcttcaggtgatagccttgggcagtttactgttgacaagaatggtgtactcaaagtcctaaaagctttggatcgggaaagtcagtccttctacaacttggttgttcaagtgcatgacctgccacagattccagcctccagattcacaagcactgctcaagtctccattattttgttggatgtaaatgataacccaccgacatttctttcccctaaattgacatacattccagaaaatacacctattgatactgttgttttcaaagctcaagcaactgacccagatagtggcccaaacagctatattgagtacactctgctgaaccctttgggaaacaagttcagtattgggaccattgatggtgaagtgaggctcactggagaactggacagagaagaagtttctaattatactctaacagtggtggctacagacaaaggtcaaccatctctctcttcatctacagaggttgtagttatggtacttgacatcaatgataacaaccccatctttgcacaagctttgtataaagtggagattaatgaaaacacacttactggaacagatataatacaagtgttcgcagcagatggagatgaaggcacaaatggacaggttcgctatggcattgttaatggtaataccaatcaggaatttcggatagactctgtcacaggtgccatcactgtcgctaaacctttggatagagaaaagacccctacctaccatttaactgttcaggcaacagatcgaggcagcacacccagaactgatacctccacggtcagcattgttctactggatattaatgactttgttcctgtatttgagctatctccatattctgtaaatgtccctgagaatttagggacactacccagaacaattcttcaggtggtggcaagagatgatgatcgaggatctaacagcaaactctcatatgttctgtttggtggtaatgaagacaatgcttttactctctcagccagtggagaacttggagtaacacagagtctggatcgggaaacaaaagagcgctttgtcttaatgattacagctacagattcaggatcccctgccttgactggaactggaacaatcaacgtcatagtagatgatgtcaatgacaatgtccccacatttgccagtaaagcgtatttcacaacaattcctgaggatgcaccaactggaacagatgttttattggtaaatgcctcagatgctgatgcttcaaagaatgcagttataaggatcatcggtggaaactctcagttcacgatcaacccatcgacaggacaaatcatcaccagcgcattgttagatagggaaacaaaagataattatactttggtagtggtctgcagtgatgcgggatccccagagcctctttccagttccaccagtgtgcttgtcactgtgactgatgtcaatgacaatccaccaagatttcagcatcacccatatgtcactcacatcccatctcctactcttccaggttcctttgtctttgcggttacagtcacagatgctgatattggaccaaattctgaactgcattattctctttcgggtagaaattctgaaaaatttcacattgacccactgaggggagccattatggccgccggaccactaaacggagcttcagaagtgacattttctgtgcatgtaaaagatggtggctcatttccaaagacagattctacaacagtgactgttagattcgtgaataaggccgatttccctaaagtgagagccaaagaacaaacgttcatgtttcctgaaaaccaaccagtcagctctcttgtcaccaccatcacaggatcctctttaagaggagaacctatgtcatattatatcgcaagtgggaatcttggcaatactttccagattgatcagttaacagggcaggtgtctattagtcaacctctggattttgaaaagatacaaaaatatgttgtatggatagaggccagagacggtggtttccctcctttctcctcttacgagaaacttgatataacagtattagatgtcaatgataatgccccaatttttaaggaagacccatttatatctgaaatattggaaaacctttcccctcgaaaaatacttactgtttcggcaatggacaaggacagtggacccaatggacagttagattatgaaattgttaatggcaacatggaaaatagtttcagtatcaatcatgctactggtgaaattagaagcgttagacctttggacagggaaaaagtatctcattatgtcctaaccataaaatcatcagacaaagggtccccgtctcagagtacttcagtaaaagtcatgattaacattttagatgaaaatgataatgcccctaggttttctcagatatttagtgcccatgttcctgaaaattcccccttaggatacacagttacccgtgtcacaacttctgatgaagacattgggatcaatgcaattagtagatattctataatggatgcaagtcttccatttacaattaatcccagcacaggggatattgtcataagcagacctttaaatagggaagatacagaccgttacagaattcgagtttccgcacatgattctgggtggactgtaagtacagatgtcacaatatttgtgacagacatcaatgacaatgctccaagatttagcagaacttcctattatttagattgccctgaacttactgagattggctccaaagtaactcaggtatttgcaacagatcctgatgagggatcaaatggacaagtgttttatttcataaaatcccaatcagaatatttcaggattaatgccaccactggagagattttcaataaacagatcttaaaataccaaaatgtcactggcttcagtaatgtgaatatcaacaggcatagttttatagtgacatcttcagatcgaggtaaaccttccttaattagtgagacaacagttaccatcaatatagtggacagtaatgacaatgcacctcaatttcttaaaagtaaatatttcactccagtcaccaaaaatgttaaggttggtacgaagttaatcagagttacagcaatagatgacaaagattttggactgaattcagaagtggagtatttcatttctaatgataaccatttaggaaaatttaagttggacaatgatacggggtggatttcagtagcatcctccctgatttctgacttgaaccaaaacttttttatcacagtcactgcaaaggataagggaaaccctccactttcttcccaagcaactgttcacataactgtcactgaggaaaactaccatacacctgaattctctcaaagccacatgagtgcaaccatccctgagagccatagcattgggtccattgtcagaactgtttctgcaagagatagagatgcagcgatgaatggcttgattaagtacagcatttcttcaggaaatgaagaaggcatttttgcaatcaattcttctacaggtatattaacactagccaaagctcttgattatgagctatgccagaaacacgaaatgacgattagtgctatagatggaggatgggttgcaagaactggttactgcagtgtgaccgtaaatgtgattgatgtgaatgataattctccagtattcctctctgatgactatttccctactgttttggaaaatgccccaagtggaacaacagttatccacctaaatgcaacagatgctgactctggaacaaatgctgtgattgcgtatactgtacagtcatctgacagtgacctctttgtcattgaccctaacacaggagtcataaccactcaaggcttcttggattttgaaaccaagcagagctaccatcttactgtgaaagccttcaatgtccccgatgaggaaaggtgtagctttgccactgttaatatacaattaaaagggacaaatgaatatgtgccccgttttgtttccaaactttactattttgaaatctcagaagcagctcctaaaggtactattgttggagaagtgtttgctagcgaccgtgatttgggcactgatggggaggtacactatttgatttttggtaatagtcgaaagaagggtttccagatcaataagaagactggacagatttatgtttctggaattcttgatcgagaaaaagaagaaagggtgtctttgaaggtattggccaagaactttggcagcattagaggtgcagatatagatgaggtcactgtaaatgtcaccgtgcttgatgcaaatgacccacccatttttactctaaacatctacagtgtgcagatcagtgaaggggtcccaataggaactcatgtgacctttgtcagtgcctttgactcagactccatccccagctggagcaggttttcttacttcatcggatcagggaatgaaaatggtgccttttctattaatccgcagacaggacagatcaccgttactgcagaattagatcgagaaacccttcccatctataatctctcagttttggctgttgattcagggaccccctcagctacaggtagtgcctctttattagtcaccctggaagatataaatgataacgggcccatgctgactgtcagtgaaggagaagtcatggaaaacaaacggccaggcactttggtgatgacccttcagtccactgaccctgatctccctccaaatcaaggtccctttacttattacttgctgagcacaggtcctgccaccagttatttcagtctgagcactgctggagttctgagcacaaccagagagattgacagagagcagattgcagacttctatctgtctgtggttaccaaggattctggtgttcctcaaatgtcttccacaggaactgtgcatatcacagttatagaccaaaatgacaatccttcacagtctcggacggtggagatatttgttaattattatggtaacttgtttcccggtgggattttaggctctgtgaagccacaggatccagatgtgttagacagcttccactgctcccttacttcaggagttaccagcctcttcagtattccagggggtacttgtgatctgaattcccagccaaggtccacagatggcacgtttgatctgactgtccttagcaatgatggagttcacagcacagtcacgagcaacatccgagttttctttgctggattttccaatgccacagtggataacagcatcttacttcgtctcggcgtaccaacagtaaaggacttcttgaccaaccactatcttcattttttacgcattgccagctcacagctgacaggcttagggactgctgtgcaactgtacagtgcatatgaagagaacaatagaacgtttcttttggcagctgtgaagcgaaatcataatcagtatgtgaatcccagtggcgtagccaccttctttgaaagcatcaaagagatccttctccggcagagtggagtaaaggtggaatctgtggatcatgactcctgtgtgcatggcccatgtcagaatggagggagctgtctacgaagattggctgtgagctccgtattaaaaagccgtgagagtcttccagtcatcatcgtggcaaatgaacctctgcagcctttcttatgcaagtgtctgccaggatatgcgggtagctggtgtgaaatagatatagatgaatgtcttccatcaccttgccacagtggtggaacctgtcacaatttagtgggaggattttcatgcagctgcccagatggcttcactggtagggcgtgtgagagagatatcaatgagtgcctgcagagtccttgcaagaatggtgccatctgccagaattttccaggaagcttcaactgtgtttgcaaaactggatacacaggtgtctttggaaaacactgcgagttgaacagttatggatttgaggagttatcatacatggaatttccaagcttggaccccaataacaactatatttatgtcaaatttgccacgattaaaagtcatgccttattgctttacaactatgacaaccagacaggcgaccgggctgagtttttggcccttgaaattgccgaagaaagactaagattctcttataatttaggcagtggtacatataagctcaccaccatgaagaaggtgtcagatggacattttcacactgtgattgccaggagagcaggaatggcagcctccttaactgtggactcctgttctgagaaccaagagccaggatattgtactgtcagtaatgtggcagtttcagatgactggactcttgatgttcagccaaatagagttacagttggaggtatcagatctctagaaccaatccttcagagaagaggacacgtggaaagccatgattttgttgggtgtataatggagtttgcagtcaatggaaggcctctggaacccagccaagctttggcagcacaaggcatcctagatcagtatggcgattttatttcttactgttttaaagaaaaaaaatgcaaaaaagtatgcttcactgttactcctgacactgccttatcattagaaggcaaagggcgcttggactaccacatgagtcagaatgagaagcgggaatatttgttaaggcaaagcttacgaggtgccatgttggagccttttggtgtgaacagtctggaagtaaaatttaggaccagaagcgagaatggcgttttaatccatatccaagaaagcagcaattacactactgtgaagattaagaatggcaaagtatattttacatccgatgcaggaattgctgggaaagtggagagaaatattcctgaagtatatgttgcagacggccactggcacacttttctaattgggaaaaatggaacagcaacagtattgtctgttgacagaatatataacagagatattatccaccctactcaggacttcggtggccttgatgtgcttactatatcacttggaggaattccacccaatcaagcacatcgagatgcccaaacagcaggttttgatggctgcattgcttctatgtggtatggtggagaaagtcttcctttcagcgggaagcatagcttggcctccatctcaaaaacagatccctcagtgaagattggctgccgtggcccgaacatttgtgccagcaacccctgctggggtgatttgctgtgcattaatcagtggtatgcctacaggtgtgtccctcctggggactgtgcctcccacccgtgccagaatggtggcagctgtgagccaggcctgcactccggcttcacctgtagctgcccagactcgcacacgggaaggacctgtgagatggtggtggcctgtcttggcgtcctctgtcctcaggggaaggtgtgcaaagctggaagtcctgcggggcatgtctgtgttctgagtcagggccctgaagagatctctctgcctttgtgggctgtgcctgccatcgtgggcagctgcgcaaccgtcttggccctcctggtccttagcctgatcctgtgtaaccagtgcagggggaagaaggccaaaaatcccaaagaggagaagaaaccgaaggagaagaagaaaaagggaagtgagaacgttgcttttgatgaccctgacaatatccctccctatggggatgacatgactgtgaggaagcagcctgaagggaacccaaaaccagatatcattgaaagggaaaacccctaccttatctatgatgaaactgatattcctcacaactcagaaaccatccccagcgcccctttggcatctccagagcaggagatagagcactatgacattgacaacgccagcagcatcgccccttcggatgcagacatcattcaacactacaagcagttccgcagccacacaccaaaattttcaatccagaggcacagtcccctaggctttgcaaggcaatcccccatgcccttaggagcaagcagtttgacttaccagccttcatatggtcaaggtttgagaaccagctccctaagccactcagcatgcccaactcccaaccctctgtctcgacacagtccagcccctttctccaaatcttctacgttctatagaaacagcccagcaagggaattgcatcttcctataagggatggtaatactttggaaatgcatggtgacacctgccaacctggcattttcaactatgccacaaggctgggaaggagaagcaagagtcctcaggccatggcatcacatggttctagaccagggagtcgcctaaagcagccgattgggcagattccactggaatcttctcctccagtcggactttctattgaagaagtggagaggctcaacacacctcgccctagaaacccaagtatctgcagtgcagaccatgggaggtcttcttcagaggaggactgcagaaggccactgtctagaacaaggaatccagcggatggcattccagctccagaatcctcttctgatagtgactcccatgaatctttcacttgctcagaaatggaatatgacagggagaagccaatggtatatacttccagaatgcccaaattatctcaagtcaatgaatctgatgcagatgatgaagataattatggagccagactgaagcctcgaaggtaccacggtcgcagggccgagggaggacctgtgggcacccaggcagcagcaccaggcactgctgacaacacactgcccatgaagctagggcagcaagcagggactttcaactgggacaaccttttgaactggggccctggctttggccattatgtagatgtttttaaagatttggcatctcttccagaaaaagcagcagcaaatgaagaaggcaaagctgggacaactaaaccagtccccaaagatggggaagcagaacagtatgtgtga

SEQ ID NO: 215815 - DNA, 16123 bp, Artificial Sequence
  derived and/or modified sequence
gggagccaggaccatggacttagcaccagacagggctactggccgcccgtggctcccgttgcacactctatcagtatctcagctccttcgagtgttttggctactgtcattgcttccggggcaggcctgggtccacggggccgagccgcgccaggtgttccaagtgctggaagagcaacctccaggcactctggtaggcaccatccagacgcgccccggcttcacctacaggctcagcgaaagccacgccctgtttgccataaacagtagcaccggagccctgtacaccacctccaccatcgaccgcgagagcctgcccagcgacgtgatcaacctggtggtcctttccagcgcgcccacctaccccaccgaagtgcgagtgctggtgcgggacctcaatgacaacgcccccgttttcccggacccctctatcgtggtcactttcaaggaagacagtagcagcggacgccaagtcatcttagacaccgccaccgactcggacatcggctcaaacggtgtggaccaccgctcctaccgcatcatccgcggcaatgaggcggggcgcttccgtctggacatcaccctgaacccgagcggcgagggagcgttcctgcatctggtgtccaagggcggactggaccgtgaggtcactccgcagtaccagctcctggttgaggtggaggacaagggtgagcctaagcggcggggctaccttcaggtaaacgtgactgtgcaagacattaatgacaaccccccggtttttggcagttctcactaccaggcgggggtgcctgaggacgcggttgtgggttccagcgtcctccaggtggcggcggcggacgcggacgagggcaccaacgcggacatccgctatcgcctgcaggacgaggggacccccttccaaatggaccctgagacgggacttatcacggtgcgggagcccctggacttcgaagctcggcgccaatactcgcttacggtgcaggcgatggacagaggcgtgccttccctcactgggcgcgccgaggcgctgattcagctgctggacgtgaatgacaatgacccggtagtgaagttccgctacttcccggccacctcgcgctacgcctcggtagatgagaatgctcaagtgggcaccgtggtggctctgctcaccgtgacggacgcagattctcccgcggccaacgggaacatctccgtgcaaattctcgggggcaatgagcagcgccactttgaagtgcaaagcagcaaagtgccgaacctgagcctaatcaaggtggccagcgccttggaccgcgagcgcatcccttcctacaacctcacagtttccgtctctgataactacggggcgccccctggcgcagcagtccaggcgcgctcttctgtggcaagcctggtgatttttgttaatgacatcaatgaccatcctcctgtcttttcacagcaagtgtacagagtgaacctgagcgaggaggcgcctccgggaagctatgtgagtgggatatctgccactgatggcgactctggtctcaatgctaatctgcgttacagcattgtctctggcaatggactgggatggttccatatcagtgaacatagcggcctcgtgaccactgggtcctctgggggcctggaccgtgaacttgcttcccagattgttctgaatataagtgcccgggaccagggagttcaccccaaggtgtcctatgcccagcttgtagtaactctcctagatgtgaatgatgaaaagccagtatttagccagccagaagggtatgatgtgtctgtggttgagaatgccccaacagggacagaactgttgatgctcagggcaactgacggggacctgggtgacaacggaacagtgcgcttctccttacaagaggcagagactgaccggaggtccttccgtctggatcctgtgtctgggaggttgagtactatttcctccttggacagagaagagcaagccttctactccctgttggttctggccacagatctgggctcccctccccagtcatcaatggctcgcataaatgtgagtcttctggatataaatgataacagccctgtcttctacccggtccaatactttgctcacattaaggagaatgagcctggaggtagctacatcaccactgtgtctgccactgacccagacttgggtaccaatggtactgtcaaatatagcatatctgctggggacaggtctcggtttcaggtcaatgctcagagtggggttatttctacaagaatggccctagacagagaagaaaaaacagcttatcagttgcaaatagtagctactgatggtggcaatttacaatctcccaaccaggcaatagtaaccatcactgtattggacactcaagacaacccacctgtattcagtcaggttgcctacagctttgtggtttttgagaacgtggcgctgggatatcatgtgggtagtgtgtctgcatccaccatggatctcaattccaacatcagttatctcattactactggggatcagaaaggtatgtttgctatcaaccaggtcactgggcagcttaccacagcaaatgtgattgatagagaagagcaatccttttatcagctgaaggtagtggccagtgggggcacagtgactggagacactatggttaacataacagttaaggatttgaatgacaactctccccatttccttcaggcaatagagagtgtaaatgtggtggagaattggcaggcaggtcacagcattttccaggccaaagctgtggaccctgatgaaggtgtcaatggcatggtactctatagtctgaagcaaaaccccaagaacctgtttgctatcaatgaaaagaatggcactattagtctgcttgggcccctggatgttcatgctggctcctaccaaatagagatcttggcatctgacatgggtgtcccacagctctcctctagtgtcatcttaacagtttatgtccatgatgtaaatgacaattcaccagtgtttgaccaactctcttatgaagtcaccctttctgagtcagaacctgtgaattctcgattctttaaagtacaagcttctgataaggattcaggagcaaatggtgaaattgcatacaccattgctgaaggaaatacaggggatgcttttggcatattcccagatggtcaattgtatataaaaagtgaactggaccgtgaacttcaagacagatatgttttaatggttgttgcttctgacagagcagtggaaccccttagtgctactgtgaatgttactgtaattttagaagatgtaaatgataacagacctctttttaacagtaccaattacacattttacttcgaagaagagcagagggctgggtcgtttgtgggcaaagtaagtgctgtagataaagactttgggccaaatggagaagtaaggtattcttttgaaatggtgcagccagattttgagttgcatgccatcagtggggaaattacaaatactcatcagtttgacagggagtctcttatgaggcggagagggactgctgtgtttagctttacagtcatagcaacagatcaggggatccctcagcctctcaaggatcaggccactgtacatgtttacatgaaggatataaatgataatgctcccaaatttttaaaagacttttaccaagctacaatatcagaatcagcagccaatctgacacaagtgttaagagtatctgcctcagatgttgatgaaggtaataatggacttattcactattctataataaaaggaaatgaagaaagacagtttgctatagacagtacctctggtcaggtaacactaattggcaaattagactatgaagcaacacctgcctattcccttgtaattcaagcagtggattcagggacaatccccctcaattcaacgtgtactttaaatattgatattttagatgaaaatgacaataccccttctttccctaaatcaacactctttgttgatgttttggaaaacatgagaattggtgaactcgtgtcctctgttactgcaactgattccgattcaggtgacaatgctgatttatattacagtattactgggactaacaaccacggaacttttagcattagcccaaacactgggagtatttttcttgccaaaaaactggactttgaaacacagtctttgtataaattaaatataacagcaaaagaccaaggaagacctcctcgttcatctacaatgtcagtggttattcacgtgagggactttaatgacaatcctcctagctttcctcctggagatattttcaagtctattgttgagaacattcccatcggtacatctgtcatttcagtgactgcacatgaccctgatgcagacattaatggtcaactatcctacacaatcattcaacagatgccaagaggcaaccactttaccatagatgaagtcaaagggactatatatactaatgctgaaatagatcgggaatttgctaatctctttgagttgactgtaaaagccaatgatcaagctgtgccaatagaaactagacggtatgctttgaagaacgtgaccattttggttacagacctcaatgacaatgtcccaatgtttatatcacaaaacgcccttgctgcagacccatcagctgtgattggttccgttctgacaacaattatggctgctgacccagatgaaggtgctaatggagaaatagagtatgagatcatcaatggggacacagacaccttcattgttgatcgttatagtggagacctgagagtggcttcagcgttggtgccttcacagttgatctacaatctcatagtttcagcaacagaccttgggcctgaaaggaggaaatcgaccactgaattgaccatcattcttcagggccttgatggacctgtttttactcaacccaaatatataactattttgaaggaaggagaacccattggcacaaacgtgatatcaatagaagcagctagccccagaggatctgaggccccagtggagtattatattgtttcagttcgttgtgaagaaaaaactgttggacgcctctttactattggacgacatactggtataattcagaccgcagccattctggaccgggagcaaggagcatgtctttacctggtggatgtttatgccatagaaaaatcaactgcttttcccagaacacagagagcagaggtagaaataacacttcaggatatcaatgacaatccaccagtatttccaacggacatgctggatctcacggtagaggagaacattggagatggctctaagattatgcagctgacagccatggatgctgatgagggtgcaaatgctctcgtcacatacactatcattagtggagctgatgatagttttcgcatcgacccagaatccggagatctgatagcaaccaggcggttggacagggaacgccgctccaaatattcactgctagttcgtgctgatgatggtcttcagtcctcggatatgagaattaatatcactgtcagtgatgtgaatgaccatacacccaaattttccagacccgtgtactcttttgacattcctgaggacacaatccctggttctttggtagcagccattttagccacggatgatgactctggtgtgaatggagaaattacatatattgtgaatgaagatgatgaagatggcatctttttcctgaatcctattactggggtctttaatttgactcgattattagattatgaagtacagcaatattatatcctcactgttcgagcagaagatggtgggggacaatttactaccatcagagtttatttcaatattctagatgtaaatgataatccacctattttcagcttgaattcatacagcacatctttaatggagaatctacctgtgggatctactgttcttgtgtttaatgttactgatgcagatgatggcatcaactctcaattgacttatagcattgcttcaggtgatagccttgggcagtttactgttgacaagaatggtgtactcaaagtcctaaaagctttggatcgggaaagtcagtccttctacaacttggttgttcaagtgcatgacctgccacagattccagcctccagattcacaagcactgctcaagtctccattattttgttggatgtaaatgataacccaccgacatttctttcccctaaattgacatacattccagaaaatacacctattgatactgttgttttcaaagctcaagcaactgacccagatagtggcccaaacagctatattgagtacactctgctgaaccctttgggaaacaagttcagtattgggaccattgatggtgaagtgaggctcactggagaactggacagagaagaagtttctaattatactctaacagtggtggctacagacaaaggtcaaccatctctctcttcatctacagaggttgtagttatggtacttgacatcaatgataacaaccccatctttgcacaagctttgtataaagtggagattaatgaaaacacacttactggaacagatataatacaagtgttcgcagcagatggagatgaaggcacaaatggacaggttcgctatggcattgttaatggtaataccaatcaggaatttcggatagactctgtcacaggtgccatcactgtcgctaaacctttggatagagaaaagacccctacctaccatttaactgttcaggcaacagatcgaggcagcacacccagaactgatacctccacggtcagcattgttctactggatattaatgactttgttcctgtatttgagctatctccatattctgtaaatgtccctgagaatttagggacactacccagaacaattcttcaggtggtggcaagagatgatgatcgaggatctaacagcaaactctcatatgttctgtttggtggtaatgaagacaatgcttttactctctcagccagtggagaacttggagtaacacagagtctggatcgggaaacaaaagagcgctttgtcttaatgattacagctacagattcaggatcccctgccttgactggaactggaacaatcaacgtcatagtagatgatgtcaatgacaatgtccccacatttgccagtaaagcgtatttcacaacaattcctgaggatgcaccaactggaacagatgttttattggtaaatgcctcagatgctgatgcttcaaagaatgcagttataaggatcatcggtggaaactctcagttcacgatcaacccatcgacaggacaaatcatcaccagcgcattgttagatagggaaacaaaagataattatactttggtagtggtctgcagtgatgcgggatccccagagcctctttccagttccaccagtgtgcttgtcactgtgactgatgtcaatgacaatccaccaagatttcagcatcacccatatgtcactcacatcccatctcctactcttccaggttcctttgtctttgcggttacagtcacagatgctgatattggaccaaattctgaactgcattattctctttcgggtagaaattctgaaaaatttcacattgacccactgaggggagccattatggccgccggaccactaaacggagcttcagaagtgacattttctgtgcatgtaaaagatggtggctcatttccaaagacagattctacaacagtgactgttagattcgtgaataaggccgatttccctaaagtgagagccaaagaacaaacgttcatgtttcctgaaaaccaaccagtcagctctcttgtcaccaccatcacaggatcctctttaagaggagaacctatgtcatattatatcgcaagtgggaatcttggcaatactttccagattgatcagttaacagggcaggtgtctattagtcaacctctggattttgaaaagatacaaaaatatgttgtatggatagaggccagagacggtggtttccctcctttctcctcttacgagaaacttgatataacagtattagatgtcaatgataatgccccaatttttaaggaagacccatttatatctgaaatattggaaaacctttcccctcgaaaaatacttactgtttcggcaatggacaaggacagtggacccaatggacagttagattatgaaattgttaatggcaacatggaaaatagtttcagtatcaatcatgctactggtgaaattagaagcgttagacctttggacagggaaaaagtatctcattatgtcctaaccataaaatcatcagacaaagggtccccgtctcagagtacttcagtaaaagtcatgattaacattttagatgaaaatgataatgcccctaggttttctcagatatttagtgcccatgttcctgaaaattcccccttaggatacacagttacccgtgtcacaacttctgatgaagacattgggatcaatgcaattagtagatattctataatggatgcaagtcttccatttacaattaatcccagcacaggggatattgtcataagcagacctttaaatagggaagatacagaccgttacagaattcgagtttccgcacatgattctgggtggactgtaagtacagatgtcacaatatttgtgacagacatcaatgacaatgctccaagatttagcagaacttcctattatttagattgccctgaacttactgagattggctccaaagtaactcaggtatttgcaacagatcctgatgagggatcaaatggacaagtgttttatttcataaaatcccaatcagaatatttcaggattaatgccaccactggagagattttcaataaacagatcttaaaataccaaaatgtcactggcttcagtaatgtgaatatcaacaggcatagttttatagtgacatcttcagatcgaggtaaaccttccttaattagtgagacaacagttaccatcaatatagtggacagtaatgacaatgcacctcaatttcttaaaagtaaatatttcactccagtcaccaaaaatgttaaggttggtacgaagttaatcagagttacagcaatagatgacaaagattttggactgaattcagaagtggagtatttcatttctaatgataaccatttaggaaaatttaagttggacaatgatacggggtggatttcagtagcatcctccctgatttctgacttgaaccaaaacttttttatcacagtcactgcaaaggataagggaaaccctccactttcttcccaagcaactgttcacataactgtcactgaggaaaactaccatacacctgaattctctcaaagccacatgagtgcaaccatccctgagagccatagcattgggtccattgtcagaactgtttctgcaagagatagagatgcagcgatgaatggcttgattaagtacagcatttcttcaggaaatgaagaaggcatttttgcaatcaattcttctacaggtatattaacactagccaaagctcttgattatgagctatgccagaaacacgaaatgacgattagtgctatagatggaggatgggttgcaagaactggttactgcagtgtgaccgtaaatgtgattgatgtgaatgataattctccagtattcctctctgatgactatttccctactgttttggaaaatgccccaagtggaacaacagttatccacctaaatgcaacagatgctgactctggaacaaatgctgtgattgcgtatactgtacagtcatctgacagtgacctctttgtcattgaccctaacacaggagtcataaccactcaaggcttcttggattttgaaaccaagcagagctaccatcttactgtgaaagccttcaatgtccccgatgaggaaaggtgtagctttgccactgttaatatacaattaaaagggacaaatgaatatgtgccccgttttgtttccaaactttactattttgaaatctcagaagcagctcctaaaggtactattgttggagaagtgtttgctagcgaccgtgatttgggcactgatggggaggtacactatttgatttttggtaatagtcgaaagaagggtttccagatcaataagaagactggacagatttatgtttctggaattcttgatcgagaaaaagaagaaagggtgtctttgaaggtattggccaagaactttggcagcattagaggtgcagatatagatgaggtcactgtaaatgtcaccgtgcttgatgcaaatgacccacccatttttactctaaacatctacagtgtgcagatcagtgaaggggtcccaataggaactcatgtgacctttgtcagtgcctttgactcagactccatccccagctggagcaggttttcttacttcatcggatcagggaatgaaaatggtgccttttctattaatccgcagacaggacagatcaccgttactgcagaattagatcgagaaacccttcccatctataatctctcagttttggctgttgattcagggaccccctcagctacaggtagtgcctctttattagtcaccctggaagatataaatgataacgggcccatgctgactgtcagtgaaggagaagtcatggaaaacaaacggccaggcactttggtgatgacccttcagtccactgaccctgatctccctccaaatcaaggtccctttacttattacttgctgagcacaggtcctgccaccagttatttcagtctgagcactgctggagttctgagcacaaccagagagattgacagagagcagattgcagacttctatctgtctgtggttaccaaggattctggtgttcctcaaatgtcttccacaggaactgtgcatatcacagttatagaccaaaatgacaatccttcacagtctcggacggtggagatatttgttaattattatggtaacttgtttcccggtgggattttaggctctgtgaagccacaggatccagatgtgttagacagcttccactgctcccttacttcaggagttaccagcctcttcagtattccagggggtacttgtgatctgaattcccagccaaggtccacagatggcacgtttgatctgactgtccttagcaatgatggagttcacagcacagtcacgagcaacatccgagttttctttgctggattttccaatgccacagtggataacagcatcttacttcgtctcggcgtaccaacagtaaaggacttcttgaccaaccactatcttcattttttacgcattgccagctcacagctgacaggcttagggactgctgtgcaactgtacagtgcatatgaagagaacaatagaacgtttcttttggcagctgtgaagcgaaatcataatcagtatgtgaatcccagtggcgtagccaccttctttgaaagcatcaaagagatccttctccggcagagtggagtaaaggtggaatctgtggatcatgactcctgtgtgcatggcccatgtcagaatggagggagctgtctacgaagattggctgtgagctccgtattaaaaagccgtgagagtcttccagtcatcatcgtggcaaatgaacctctgcagcctttcttatgcaagtgtctgccaggatatgcgggtagctggtgtgaaatagatatagatgaatgtcttccatcaccttgccacagtggtggaacctgtcacaatttagtgggaggattttcatgcagctgcccagatggcttcactggtagggcgtgtgagagagatatcaatgagtgcctgcagagtccttgcaagaatggtgccatctgccagaattttccaggaagcttcaactgtgtttgcaaaactggatacacagggaaaatgtgtgaatcttcagtcaattactgtgaatgcaacccctgctttaatggtggttcctgccaaagtggtgtggattcttattattgtcattgtccatttggtgtctttggaaaacactgcgagttgaacagttatggatttgaggagttatcatacatggaatttccaagcttggaccccaataacaactatatttatgtcaaatttgccacgattaaaagtcatgccttattgctttacaactatgacaaccagacaggcgaccgggctgagtttttggcccttgaaattgccgaagaaagactaagattctcttataatttaggcagtggtacatataagctcaccaccatgaagaaggtgtcagatggacattttcacactgtgattgccaggagagcaggaatggcagcctccttaactgtggactcctgttctgagaaccaagagccaggatattgtactgtcagtaatgtggcagtttcagatgactggactcttgatgttcagccaaatagagttacagttggaggtatcagatctctagaaccaatccttcagagaagaggacacgtggaaagccatgattttgttgggtgtataatggagtttgcagtcaatggaaggcctctggaacccagccaagctttggcagcacaaggcatcctagatcaatgccctaggctggaaggcgcttgtactcgcagcccatgccaacatggtggcacatgtatggattactggtcatggcagcagtgtcattgcaaagagggactcactgggaaatactgtgaaaaatctgttactcctgacactgccttatcattagaaggcaaagggcgcttggactaccacatgagtcagaatgagaagcgggaatatttgttaaggcaaagcttacgaggtgccatgttggagccttttggtgtgaacagtctggaagtaaaatttaggaccagaagcgagaatggcgttttaatccatatccaagaaagcagcaattacactactgtgaagattaagaatggcaaagtatattttacatccgatgcaggaattgctgggaaagtggagagaaatattcctgaagtatatgttgcagacggccactggcacacttttctaattgggaaaaatggaacagcaacagtattgtctgttgacagaatatataacagagatattatccaccctactcaggacttcggtggccttgatgtgcttactatatcacttggaggaattccacccaatcaagcacatcgagatgcccaaacagcaggttttgatggctgcattgcttctatgtggtatggtggagaaagtcttcctttcagcgggaagcatagcttggcctccatctcaaaaacagatccctcagtgaagattggctgccgtggcccgaacatttgtgccagcaacccctgctggggtgatttgctgtgcattaatcagtggtatgcctacaggtgtgtccctcctggggactgtgcctcccacccgtgccagaatggtggcagctgtgagccaggcctgcactccggcttcacctgtagctgcccagactcgcacacgggaaggacctgtgagatggtggtggcctgtcttggcgtcctctgtcctcaggggaaggtgtgcaaagctggaagtcctgcggggcatgtctgtgttctgagtcagggccctgaagagatctctctgcctttgtgggctgtgcctgccatcgtgggcagctgcgcaaccgtcttggccctcctggtccttagcctgatcctgtgtaaccagtgcagggggaagaaggccaaaaatcccaaagaggagaagaaaccgaaggagaagaagaaaaagggaagtgagaacgttgcttttgatgaccctgacaatatccctccctatggggatgacatgactgtgaggaagcagcctgaagggaacccaaaaccagatatcattgaaagggaaaacccctaccttatctatgatgaaactgatattcctcacaactcagaaaccatccccagcgcccctttggcatctccagagcaggagatagagcactatgacattgacaacgccagcagcatcgccccttcggatgcagacatcattcaacactacaagcagttccgcagccacacaccaaaattttcaatccagaggcacagtcccctaggctttgcaaggcaatcccccatgcccttaggagcaagcagtttgacttaccagccttcatatggtcaaggtttgagaaccagctccctaagccactcagcatgcccaactcccaaccctctgtctcgacacagtccagcccctttctccaaatcttctacgttctatagaaacagcccagcaagggaattgcatcttcctataagggatggtaatactttggaaatgcatggtgacacctgccaacctggcattttcaactatgccacaaggctgggaaggagaagcaagagtcctcaggccatggcatcacatggttctagaccagggagtcgcctaaagcagccgattgggcagattccactggaatcttctcctccagtcggactttctattgaagaagtggagaggctcaacacacctcgccctagaaacccaagtatctgcagtgcagaccatgggaggtcttcttcagaggaggactgcagaaggccactgtctagaacaaggaatccagcggatggcattccagctccagaatcctcttctgatagtgactcccatgaatctttcacttgctcagaaatggaatatgacagggagaagccaatggtatatacttccagaatgcccaaattatctcaagtcaatgaatctgatgcagatgatgaagataattatggagccagactgaagcctcgaaggtaccacggtcgcagggccgagggaggacctgtgggcacccaggcagcagcaccaggcactgctgacaacacactgcccatgaagctagggcagcaagcagggactttcaactgggacaaccttttgaactggggccctggctttggccattatgtagatgtttttaaagatttggcatctcttccagaaaaagcagcagcaaatgaagaaggcaaagctgggacaactaaaccagtccccaaagatggggaagcagaacagtatgtgtgaagtttatgtactggcactataaaatataaaaacaagaaataatactcaaaccattgtaaagttgctgactaggttgggtcacatttgaaaaacaggccagtatggactagtggtggagggaaaactttaaaaataataaccacaatgctgctgaaacagactcacaacaactcttaatttaaacatgtgtggttgaatttatttccctgcatgcattgtgttttgtaactagttatgtggcatgcagcatttggaaaatttttcttatttaccagtgtttgatttgtgatttttaaaaattgatacctttaccattgcagaaaagaacttgtgctttcccagtggcgtatgtgtattgtttcaactgtattattataattatattttgcattgcaagattcttgatgttaaaccaatccttgtaaagtgtaaaaaggaaccctcctatcgtggaatgaaagattaagtatattaacacttttcagaatgatagtttctgtatttgatgttgctcagaaatgtctcagtatttgagtaagttttacatgacagtgggtactgaaattaagtcattttgttcagcactttaacgctttcttatagaattgtcttaaaacttctggatccttgagcaaatgattatagtctcctgactttcatgaggcttccattaggaacagaatgattgcatgttgtccccagaacactgccaccttgctatgcgaatgatgttctcagcagcacttctaagaaacactcttaaaagttatttattgaaaatttttcgtatgcttttaatattttaaagaattgacctaaggaaagcttatgattggacttattttccaaccagataacatttactctaagtacccagtttttataatttatatgaaatcagatttcaacacttactttgtcattttgtagatcatttttttaaaatactgtgtaaaaactttttttacacctaagctgtgtttttgatactgatattttcctatgctgaatagttttcttactttcagggaaggtaagaaaatactttttttatatttgttacttatgtaacattcatatttttctcattttgatatttgtaacatactgtatgctttctacttgtaaatgtcaacaatagaattaaaatatttatttaaaata

SEQ ID NO: 215816 - DNA, 9669 bp, Artificial Sequence
  derived and/or modified sequence
atggtcaccaccgtcgtggctgttggggacaccttagcacagcccttagcggcagcagaggtatttatcgtggagattaccctgcaggatatcaatgacaatcctccggtcttccctacagacatgctggatctgacagtggaggagaacatcggagacggcagcaagataatgcagctgacagcaatggatgccgacgagggcgccaatgcacttgtgacttatacgataatatctggagcggatgactctttcaggatcgaccctgagtctggagacctgatcgcaacacgcagactggaccgcgagaggcgtagtaagtactccctgctcgtgcgcgctgacgacggtcttcagagctctgacatgagaattaatatcacggtgtccgacgttaatgaccacacgcccaagtttagtcggcccgtgtactccttcgacattccagaggacacaatccccggtagcttggttgccgcaatcttggcaaccgacgacgactctggggtaaacggagagataacatatatcgtgaatgaggacgacgaggatggtatttttttcctgaacccaatcacaggagttttcaacctgacccgtctgctggattatgaggtgcagcaatactacattctgactgtgcgagccgaagatggcggtggacaattcacaactatccgcgtctattttaacatcctggatgtcaacgacaacccgccaatctttagtctgaatagttactctacatcgttaatggagaatctgcctgtcggctcaaccgttctggtgttcaatgtgacagacgcagacgacggcatcaattctcagctcacttactccatagcttctggtgacagcctgggccagtttactgtcgataagaacggagttctcaaagttctaaaagccctggacagagagtcccaatccttctacaatctcgtcgtacaggtgcacgatctcccccagatccctgcctctagattcactagtactgcccaagtgtctattatcctgctcgacgttaacgacaacccccccacattcctgagtccaaagctcacctacatcccagaaaacacccctatcgacactgtggtgtttaaggcccaggctactgaccccgattccgggcccaacagctacatcgaatacacccttctgaatcctctcggtaacaaattttctattggtactatcgatggtgaggtgagattgaccggagaactggaccgagaggaggtcagcaactacacactgactgtggttgctaccgataaggggcaaccaagtttgagcagctctacagaggtcgtggtcatggttttagatattaacgacaataaccccatttttgctcaggccctgtacaaggtggagattaatgagaacacgctgaccggtacggatattatccaggtgttcgcagccgatggtgacgaaggtactaatggccaggtgagatacggcattgtgaatggcaacacaaatcaggaattccggatcgattctgtgactggagcaattacagttgcaaagcctctggaccgagaaaagacacccacctatcacctgacagttcaagccaccgatagggggtcaaccccaaggacagacaccagcaccgtgtctatagtgctattagatatcaacgattttgtgcccgtctttgagctcagtccctacagcgtcaatgttccagaaaatctgggaactcttccccggacaattctgcaggtcgtggcacgagacgatgatcgtggctcgaatagcaaattatcatacgtgttgtttggtggcaatgaagacaacgccttcactctgtctgcctctggagaattaggcgtgacacaaagcctcgatagagagaccaaggagagattcgtcctcatgatcaccgccaccgactccggctctcccgctctcactggcactggaacaataaatgtcatagtcgacgacgtgaacgacaacgtgcctacgtttgctagcaaagcctactttaccacaattcccgaggacgcccccaccggaaccgacgttttactggtcaacgcgtctgacgctgacgcgagtaaaaatgcagttatcaggattatcggcggtaattctcagttcaccattaacccatccaccgggcagatcattacgagtgccttgctggaccgagaaactaaagataactacactctggtggtggtgtgcagtgatgcaggttctcccgaaccactcagcagtagcactagtgttctcgtaaccgtgacggatgtcaatgacaaccccccacggtttcagcaccacccctacgtgactcacataccctcccctaccttgcctggttcctttgtgttcgctgttactgtgaccgacgccgacatcgggcccaacagcgagctccattattctctcagcgggcgcaacagcgaaaagtttcacatagacccattaagaggtgccatcatggcagctggccccctgaacggggcatccgaagtgaccttttcggtacacgtcaaggacggaggatcatttccgaagacagattcaaccaccgtcacggtgcggtttgttaataaagccgacttccctaaagtgagggccaaggaacaaacatttatgttccccgaaaaccaacctgtttcatccctcgttaccaccataactgggagctcactgcggggagaacccatgagttattacatcgcgtccgggaacctcggtaatacattccagatcgaccagttgaccggccaggtgtcaatttctcaacctctcgattttgaaaagatccagaaatatgtggtttggattgaggccagagacggaggatttccccctttctcaagttatgagaaactggatatcactgtccttgacgtcaacgacaacgcccctatctttaaggaggacccctttatttccgagatactcgagaatctgagcccaagaaagattctgaccgtctcagctatggataaggattcaggtcccaatgggcagctggattatgagatcgtgaacggtaatatggaaaatagctttagcattaaccacgccaccggagagataagaagcgtgcgccccttggatcgcgaaaaagtgtcacactacgttctgaccattaagagctctgataaaggttctccctcccagagtaccagtgtgaaagtcatgatcaatattctagacgaaaacgacaatgcgcccagattcagccaaattttctccgctcacgttccagaaaattctccattgggttacacagtgactcgcgtcacaacttctgatgaggacatcggaatcaatgccattagccgctactctataatggatgccagtctgcccttcaccatcaatccctcaaccggtgatatcgttatatcacgcccactgaacagagaggacaccgatcgttataggatcagagtcagcgctcatgattccggctggaccgtgagcaccgatgtaacaattttcgtgactgatatcaacgataatgcccctcgcttcagcaggactagctactacctggactgtccagagctgaccgaaatagggtcaaaagtcacgcaggtcttcgccaccgatccagatgagggcagtaatggtcaagtgttctacttcatcaaaagccaatccgaatattttcgcataaatgccaccaccggagaaatcttcaacaagcagatcctgaagtatcagaacgtcaccggcttttcaaatgtgaacatcaatcgtcactcttttatcgttacaagctccgaccgggggaaacctagcctgatcagcgagacaaccgtaaccataaatattgtggattctaatgataacgcaccgcagttcctgaagtccaagtatttcaccccggtgaccaaaaacgtcaaagtgggcactaagctgatacgcgtgactgcaatagacgacaaagactttggcctaaattccgaggtcgaatatttcatcagtaacgacaatcatctcggcaaatttaaacttgataatgacacggggtggatcagcgttgcgtcctccctgatctccgacctcaaccagaacttttttattacggtgacagctaaggacaagggtaatccaccattgagttctcaggctacagtccacattactgttactgaggaaaattaccacaccccagagttttctcagtctcatatgtctgctacaatcccagaatcacacagcatcggctcaatcgtgaggaccgtgagcgcccgggacagagacgctgctatgaatggactgattaaatactctattagttcaggcaatgaggaaggcatcttcgcaattaactcctccactgggattttgacactggccaaggccctggactatgaactttgtcagaagcatgaaatgaccatttctgccatagacggtgggtgggtcgccaggactggttattgcagtgtaacagtaaatgttatagatgtcaacgataacagtcccgtattcttgtccgacgactacttccccaccgtgctcgagaatgccccttccggcacaactgtaatccatctgaatgccacagatgctgactctggcacgaatgcagtcatcgcctatacagtccagagcagcgacagcgacctgtttgtaatcgatccgaacactggggtgattacgacacagggcttcttggattttgagactaagcagagctaccacctcaccgtgaaagccttcaacgtaccagacgaagagcggtgctcattcgccaccgtcaatattcagctaaaaggtaccaatgaatatgtgccccggttcgttagtaaactttattacttcgagatcagcgaggctgctccaaagggtacgatcgttggtgaggtttttgcatcagacagggacctggggactgatggtgaagttcattaccttattttcggcaattctcgcaagaagggctttcaaataaacaaaaagactggccaaatctacgtgtctggtatactcgacagggagaaggaagagcgcgtgtcattgaaggtgcttgccaagaactttggtagcatccgtggcgccgacatcgatgaggtgaccgtaaatgtcaccgtcctcgatgccaatgacccccctatctttaccctgaacatatactcagtgcaaatcagtgagggcgtgcctataggaacacatgttactttcgtgagcgcttttgatagcgacagcataccctcttggtcacggttctcatatttcatcggatctgggaacgaaaacggcgctttttctataaacccccaaactgggcagattaccgtgaccgctgaactagatagagagactctcccaatttataacctgtccgtcttggcggttgactccgggaccccatctgccaccggctctgcttccctactagttacactggaagatattaacgacaatggacccatgctaacagtaagcgagggcgaagtcatggaaaataaaaggccgggcacactggtcatgactcttcagtcaaccgatcctgatctgcctcccaatcagggccctttcacttattatctgttgagtacaggcccagccacttcctactttagcctgagcaccgctggtgtgctgtctactacacgggaaatcgacagggagcagattgctgacttttacctgtctgtcgtgactaaagacagtggagtgccccagatgtcgtcaacaggcaccgtccatataaccgtaatcgatcagaatgataatcctagccagtctcgcactgtggaaatcttcgtgaattattacgggaacttatttccaggcggtatcctgggatctgtgaagccacaagatccagatgtgctggactcattccactgtagcctgacatctggagtcacctctctctttagtatcccaggcggcacatgcgacttaaactctcaacctcgctccacggatggcactttcgacctcaccgttctctctaatgacggtgtgcattcaaccgttacaagcaatatcagagtatttttcgctgggttcagcaatgccacagtcgacaacagcatcctgctcaggttgggcgtgcccacagtgaaagactttctcaccaaccactatctccacttcctgagaatagcctcttcccagctgacaggcctcggtacagctgttcagctttattctgcttatgaggaaaataatcggacattccttttggctgctgtgaaacggaatcataaccagtacgtgaacccaagcggcgtggctactttctttgagtccatcaaagagatccttctcagacaatctggagtgaaggtggagtctgtggatcatgactcctgcgtccatggcccttgtcagaacggcggctcttgtttgcgaaggctcgccgtcagttcagttctaaagagcagagaatcactcccagtgatcatcgtggctaacgaacccctgcagccgttcctttgtaaatgtctgccaggatacgccggatcttggtgcgagatcgatatcgatgaatgtctccctagcccttgccactctggaggcacctgtcacaacttggtcgggggcttttcatgcagctgtcccgatgggtttactgggcgggcttgcgagcgcgacatcaacgagtgtctgcagtccccttgcaagaatggcgccatctgtcagaactttcccggctccttcaactgcgtgtgcaagaccggttacactggcgtctttggtaaacattgtgagttgaacagctatgggtttgaggagctgtcatacatggagtttccctctttagatcctaacaataattacatttacgtgaaattcgccacaattaagtctcacgctctgcttctctataactacgataaccagacaggagaccgggcagagttcttggcattggaaatcgcggaggaacgcttacgatttagctacaacctgggcagtggaacctataaactcacgacgatgaagaaggttagtgacggtcactttcacaccgtgatcgcccggcgggctggaatggctgcctctctgaccgtcgacagctgtagcgaaaaccaggaacccggctactgcacagtttcaaacgtggcagtttccgatgactggacgctggacgtccaaccaaatcgcgtgaccgttggtggcatacgaagcctagaaccaatcctgcagcgccgaggtcatgtggagtcccacgactttgtcgggtgcatcatggagtttgctgtgaatggacggcccctggagccgtcacaggcccttgccgcccaggggatcttggatcaatatggagatttcatatcttattgctttaaagaaaagaaatgtaaaaaggtgtgctttaccgttacccctgataccgctctctccttggaaggtaaaggacggttggactatcacatgtcacagaacgaaaagagggagtatctgcttaggcagtctcttcggggagccatgttggagccgttcggggtcaactccttagaggtgaagtttcggaccagatccgagaacggcgtgctgatccatattcaggagtcatctaattatactacagtgaagatcaaaaatgggaaggtgtacttcacatctgatgccggtattgcaggcaaggtggagaggaacatccctgaggtctatgtagcagatggccattggcatacctttctcattggtaagaacggcacagctacggtgctctccgtggatcggatttataacagggacatcatccatcctacacaagatttcggggggctcgacgtactgaccatctcactgggtgggattcccccaaatcaggcccaccgagatgcccagacagccggcttcgatggatgtatagcttctatgtggtatgggggtgagtctttacctttcagcggaaaacatagtctggcctccatttctaagaccgacccaagtgtgaaaataggctgtcggggccccaatatctgtgcttcaaacccttgttggggtgatctcctctgtattaaccagtggtatgcataccgctgtgtcccgcctggagactgtgccagccacccttgtcaaaacggtgggtcttgcgagcctggactacacagcggtttcacttgctcctgcccagacagccataccggacgcacctgcgagatggtcgtggcctgcctcggggtgctgtgtcctcagggaaaagtgtgtaaagccggcagcccagccggccacgtgtgtgtgctctcccaaggacctgaagaaatttcactgccgctgtgggccgtacctgctattgtgggatcttgtgcgactgttcttgcgctgttggtgctttctctgatcctctgtaaccagtgtaggggcaaaaaggcaaaaaacccaaaggaagagaaaaagccaaaagagaagaagaagaaaggcagtgagaacgtggccttcgatgatcccgacaacatcccgccttatggcgatgacatgacggttagaaaacagcctgagggcaatcctaagccggacattattgaacgggagaatccctatctgatctacgacgagactgatattcctcataacagcgagacaatcccctcagccccactggcctcacccgagcaggagatcgaacactacgacattgataatgctagctcaatagccccatctgacgcggacattatccaacattataaacaattcagaagccacactccaaaattctccatccagcgccactctcccttgggcttcgctagacaaagccctatgcccttgggcgcttcgtctttgacctatcagcctagttacggacagggtctaagaacctcttctctgtcccactcggcttgtcccacgcctaacccgctctcccgacatagccctgctccatttagcaagagtagcactttctacaggaactcccccgcgcgtgagctacatctgccgatcagagatgggaatacgttagagatgcacggggatacgtgccagcccgggatcttcaactacgctacccggctgggaagaagatcaaaatcgccacaggcaatggcctctcatggatctcgcccaggttcacgcctcaaacagcctataggtcagattcctctggaatcctccccccctgtcgggctgtccatcgaggaggtggaacgcctgaatactccacgccccaggaacccatccatttgcagtgccgaccatggacggtccagcagcgaggaagactgccgcagacccctgtctcggaccagaaatcccgcagatggcataccggcccccgaatcctcctcggatagcgatagccatgagtcattcacatgctccgagatggaatacgatagggaaaagcccatggtctatacatctcgtatgcccaagctatcccaggttaacgagagtgacgcagatgatgaagacaattacggtgctagattaaaaccccgcaggtatcacggcaggagagccgagggggggccagtcggtacccaggcggcagccccaggaacagccgacaacactctgcctatgaagctaggacagcaggcggggacattcaattgggataacctcctgaactggggccccggttttggccactatgtagacgtttttaaagacctcgcctctttaccagaaaaagccgccgccaacgaagaggggaaggcgggcactacgaagccagttcctaaagacggtgaggctgaacagtacgtttag

SEQ ID NO: 215817 - DNA, 14946 bp, Artificial Sequence
  derived and/or modified sequence
atggacttagctcccgatcgggccaccggaaggccatggctccctctccacacactgtcagtcagccagctactccgcgtgttttggttattatcactactgcccgggcaggcgtgggtgcatggagcagaaccccggcaagtgttccaggtgctggaagaacagcctcctggtactctggtcggaaccatacagacgcgaccaggtttcacctatcggctttctgaatctcacgctttgtttgctataaatagctcgactggcgctctgtatacaacatctactattgaccgcgagtccctcccatctgatgtgatcaatcttgttgtcttatctagtgcacccacataccccacagaggtgagggtactcgtcagagatctgaacgataatgccccagtgtttccggacccctcgatagttgtcacttttaaagaagattcaagttctggcaggcaggtgattctggacaccgcgaccgactccgatatcggcagcaacggggtcgatcacaggtcatatcgaatcattcgaggaaacgaagccggccggttcaggttggatattaccctgaatccctccggtgagggtgctttcctgcatctcgtgtcaaagggggggttggatcgggaagtcacacctcagtatcagctcctggtggaggtggaggataaaggcgaaccaaaaagacgcggatacctccaagtaaacgtaaccgtccaggatattaacgataatccaccagtgttcggctccagtcattaccaggctggagttccggaggacgccgtggtcggtagtagcgtcctacaagtcgcagcggccgatgcagatgaagggaccaacgcagatatcagatacaggctgcaagacgaaggaacacctttccagatggatcccgaaactggcttgattactgtcagggagcccctcgattttgaggctcggcgtcagtactctctcactgttcaggccatggacaggggcgtgcctagcctgactgggagagcagaagcattgattcaattgttggacgtaaacgacaacgacccagtggtgaaatttagatactttcctgcaacgtccaggtacgctagtgtggacgagaatgcgcaggtggggacggtggtggctttattgaccgtaactgacgccgactcccccgccgccaatggcaacatttcagtgcaaatactgggcgggaacgagcagcgtcactttgaagtacaaagctccaaagtccctaatctgtccctgatcaaggtagccagtgccctggatagagagcgcataccctcttacaatctcacggtgtctgtctctgataattacggagcgccgcccggtgcagcagtgcaggctaggtcatcggttgcttcgctggttatatttgtaaatgatataaacgaccaccctcctgtattctctcaacaggtgtaccgcgtaaacctgtccgaagaggcaccacctggttcctatgtgagcggaattagtgctacggatggagactccggtctgaatgccaatttacgctactcaatcgtttcgggaaacggtcttggttggttccacattagcgagcatagtggtctggttacaaccggtagtagcggcggtcttgatcgggaactggctagccaaatcgtgctcaacattagtgcccgagaccagggcgtgcatcctaaagtaagctatgcccagctggttgttaccctactggacgtcaacgatgagaaacccgtgttcagtcaaccagagggctatgatgtgtccgttgtagaaaacgctcccactgggactgagctcctgatgctgcgggccacagacggcgacctcggcgataatggaaccgtgaggttttccctgcaggaggccgagaccgacaggcgcagttttcgcctcgacccagtgagcggtcgcctttcaacaataagctctttggatagggaagagcaggcattctacagtctcctggtcctagcgactgacctcggaagtccaccccaatcatctatggctagaatcaacgtctctctgctggacatcaatgacaactcccctgtgttctaccccgtccagtattttgcacacataaaagagaacgaacctggaggtagctatatcaccaccgtgtccgcaacagatccagacctggggaccaacggaacggtaaagtattccatcagtgccggcgacaggagcaggtttcaggtgaacgcacaatctggagtgatttcgactcggatggccctggaccgtgaggagaagactgcctaccagctccaaatagtggcaactgatggcggaaacctgcaaagtccgaaccaagccatcgtcacaataactgtactggatacgcaggataatccaccggtgttttcgcaagtcgcctactcctttgtggtgtttgaaaacgtggccctggggtatcacgttggcagtgtgtcagccagcaccatggacctaaattcaaacatctcctacctcattacaacaggggatcagaaagggatgttcgcaataaaccaagtgaccggccagcttacaaccgccaatgttattgaccgggaagaacagtccttctatcaactgaaggtggtggcatccgggggcacagttaccggcgataccatggttaacattaccgtcaaggatctgaatgacaacagtccccattttctacaggccatcgagagcgttaatgtcgtcgaaaactggcaggctggccactctatctttcaggcaaaggccgtcgatcctgacgaaggggtgaacggtatggtgctgtactcactgaagcagaatcctaagaatctgttcgccatcaatgagaaaaatggcaccatcagcctgctaggccctcttgatgtgcatgccggaagctatcagatcgagattctggctagtgacatgggggtgccgcaactatcatcaagcgtcattctgacagtttacgtgcatgacgtgaatgacaacagccctgtattcgatcagctgtcatacgaggtgactctgtccgagagcgaaccagtgaactcgaggttcttcaaagtgcaggcctctgacaaggatagcggcgctaacggggaaattgcctatactatcgcggaagggaatactggcgacgctttcggaatttttccagacggacagctgtacattaagagcgaacttgacagagagctgcaggataggtacgtgcttatggtggttgcttccgatagagccgtggagccactcagcgctactgtaaacgtgaccgttattttagaagacgtgaatgataaccgccctctttttaacagcacaaactatactttctatttcgaagaggagcaacgggctggttccttcgtggggaaggtgtcagctgtcgataaagactttggacccaacggcgaggtacggtacagtttcgaaatggttcaacccgacttcgagttacacgcaatttccggcgagatcacaaatacacaccagtttgatagggagagtctgatgagacgcaggggcaccgctgtctttagcttcaccgtgatcgctactgatcagggaattcctcaacccctgaaagatcaggccacagttcacgtctatatgaaagacataaacgataacgcccctaaatttttaaaggacttttatcaggccaccatatctgaaagtgctgcaaatctgacccaggtactccgcgtgtccgctagcgacgtggacgagggcaacaatggcctgatccactactccataatcaaggggaacgaagagaggcaatttgccatcgattcaacctctggccaagtgaccctcatcggcaaactggactatgaggccactcccgcatatagcctggtcattcaggccgtggacagcggcacaatccctctaaatagtacatgcacgctgaatattgatattctggatgagaatgataatacaccctccttccctaaatccacactgttcgtcgacgtcttggaaaatatgcgtattggcgagctggtctcatctgtgaccgcaacggactctgattctggagacaacgccgacctttactatagtataacaggcaccaacaaccacggtaccttttctatcagtccaaacacaggtagtatcttcctcgcaaaaaaattagactttgagactcagtcactgtataagctgaacataacagcgaaggaccaggggcggcctccccggtctagcaccatgtcggtcgtaatacacgtgagagatttcaacgataacccacctagcttccccccaggcgacatattcaaatccattgtagagaatatcccgatcgggacttctgtcatcagtgtaacagcacatgaccctgacgccgatatcaatggacagctatcctatactatcattcagcagatgccacggggcaaccattttacaatcgatgaggtgaagggaaccatttataccaacgccgaaatagatagagagtttgccaacttgttcgagcttacagttaaagctaatgaccaagccgtgcccatagagacaaggcgttacgcgctgaagaacgtgacgatactggtaaccgacttgaatgataatgtccccatgtttattagtcagaatgcgctggccgctgatcctagcgcagtgattgggtccgtcctaaccaccatcatggccgctgaccctgatgaaggggccaacggcgagatcgaatacgagatcattaacggtgacacggacacattcatcgtcgatcggtatagtggcgatttacgcgtcgctagcgcactggtgccttcacagctgatttacaatctaattgtgtctgctactgaccttggaccagagaggcggaagtctactacagagcttaccatcattctccaagggctggacggacctgtgttcactcagcccaaatacatcactatcctgaaggagggtgagcctatcggcaccaatgtgatctctattgaggcggctagtccccgagggtcagaggcacccgtcgaatactacattgtcagcgtcagatgtgaagaaaagaccgtggggaggcttttcaccatcgggcggcataccgggattattcagaccgccgcaattctcgatagagagcagggtgcctgtctttatctggttgacgtatacgcgatagaaaagtccactgccttcccccggacccagagagctgaagtggagatcaccctgcaggatattaatgacaacccccccgttttccctacagatatgctcgacctaaccgtcgaagagaatattggagacggcagtaagatcatgcagcttacagcaatggacgctgacgaaggggctaacgcacttgtgacttatactattatctctggcgcagacgacagttttcggatcgatcctgagtcaggagatctgattgccacccgaagactcgaccgggagcgccggagtaaatactcactcctagtgagagctgacgacggacttcaatcttcggatatgcggatcaacatcacagtaagcgatgttaacgatcacactcccaagttctcccgtccagtctactctttcgatattcctgaagacactattcctgggagcttggtggctgctatccttgccacagatgatgatagcggagtgaacggggaaatcacctatatagtgaacgaagatgacgaggacggcatcttctttcttaacccaatcaccggcgtgttcaacctgaccaggctgctggattacgaggtgcagcagtactatatcctgacggtgcgcgccgaggacgggggcggacagttcacaacgatccgggtctacttcaacatcttagacgtgaacgataatccgccgatcttcagtcttaattcatacagcaccagtctcatggaaaaccttccagtgggcagtacggtactggtatttaatgtgaccgatgcagacgatgggataaatagtcaactcacttacagcatcgcttcaggggatagtctggggcagtttaccgtggataagaacggtgtactaaaggtgctcaaagctctggacagggagagccaatcattttacaacttggtggtgcaggtgcatgacctgccccaaatccctgcatcacgttttacgtcaaccgctcaggtgagtatcattctgcttgatgttaatgataacccccctacctttctatcgcccaaacttacttatatcccagagaatactcctatagacactgtggtgtttaaggctcaggccaccgatcctgatagtgggccaaacagctatatcgaatacacactcctcaacccgctgggcaacaaattttccattggaacgatcgatggagaggtgaggctgaccggggagctggatcgggaagaagtctctaattacactctaacagtggttgcaactgacaagggtcagccctctttgtcttcctctacagaagttgtggtgatggtgctagatattaacgataataaccctattttcgcccaggctttgtacaaggtcgagattaatgagaacacactgacagggaccgacatcatccaggtgtttgccgcagatggagacgagggaaccaatggccaggtgcgttacggaatcgtgaatggcaataccaaccaggaattccgcattgattcagtgaccggagccatcaccgtcgccaaaccactggatagggaaaaaacgcccacttatcacctcacagtgcaagcaactgatagaggctctactcctcgcactgataccagtaccgtctccattgtccttttggacattaatgattttgtgcctgtctttgaactgtcaccgtatagcgtgaacgttccagagaacctggggaccctcccccggacaatcctacaggtcgtggcaagggatgacgataggggctccaattccaagctgtcctatgtgctgttcggtggcaacgaggacaacgccttcacgctgagcgcctctggggaattgggcgtaacacagtccctcgatagggaaacaaaggagcggtttgtcttaatgatcaccgccacagattcaggcagtcctgctctgacaggtactgggactatcaatgtgatcgtagacgatgtgaacgataacgtgcctaccttcgcatcaaaggcttattttaccacgatcccggaggacgctcctacgggcacagatgtccttctggtcaacgcctctgatgcggacgcctcaaagaacgccgtgatccggattattgggggaaatagccagtttaccataaaccctagtaccggccagatcatcacctcggccctattggacagggagacaaaagacaattatactctggtcgtcgtgtgctctgatgcaggctctccagagcccttatcatcaagcacctcggtgctggtaactgtcactgacgtcaatgataaccccccccgattccaacatcacccctacgttacccatattcctagtcccacccttccaggatcttttgtatttgccgtgaccgttacagatgcggacatcggtccgaactccgaactgcactattcactgagcgggaggaatagtgagaagtttcacattgaccctctacggggtgccattatggccgccggtcccctgaatggagcaagcgaagttaccttctctgtgcacgtcaaggatggaggctcattcccaaagactgatagtaccacagttacggttcgctttgtcaataaagctgactttccaaaagtcagggctaaggaacaaacattcatgtttcccgagaaccaacctgtgagttcgctggtcaccaccatcacgggatcgagccttagaggcgaaccaatgtcttactacatcgccagtgggaacctggggaataccttccagattgatcagctcacaggccaggtttcaatcagtcagccactggacttcgaaaaaatccagaaatacgtggtctggatcgaagcacgagatgggggctttccacctttttcaagctacgaaaagctggatattaccgtgctggacgttaacgataacgcccccatctttaaagaggacccctttatttccgaaatcttggagaacctcagtcccagaaaaattctgactgtgtctgctatggacaaggattctggtccaaatggccagttggattacgagatagtgaacggtaatatggaaaacagcttctcaatcaatcatgcaaccggggagatccgttccgtcagaccattggaccgcgagaaggtgtcgcattacgtgttgacaatcaaaagctccgacaagggatcaccttcacagtcaaccagcgttaaagtcatgatcaacattctcgacgagaatgacaatgccccccgctttagccagattttctccgcccatgtccccgagaacagccctttggggtacactgtgaccagagtcaccacatctgatgaagacattggcatcaatgccatctcccggtactcgatcatggatgcctcgcttcccttcacgatcaatccttcaacgggcgatatagtgatctcaagacctctcaaccgtgaggacaccgaccggtatcggattagagtcagcgcgcacgactccggatggactgtgtcgaccgacgtaactatcttcgtgacggatatcaacgataacgctccacgcttttcacggacaagctactacctggattgccctgagttaaccgagattggctccaaggtgacacaagtattcgctactgaccctgacgagggcagtaacggccaagtgttttactttattaagtctcagtctgagtatttcaggatcaatgctactactggtgagatcttcaataagcagatactgaagtaccagaatgtgactggctttagcaatgtgaatatcaacaggcacagttttattgtaacatcttctgatcgcgggaaaccgtccctgataagtgagactaccgtgactataaatattgtcgattcgaacgacaacgctccacagtttctaaaaagcaagtatttcacaccagttactaaaaacgttaaggtagggactaagctcatcagggtgaccgccatcgacgacaaggatttcggcctcaattccgaggtggagtactttatttcaaatgataaccacctggggaaattcaagcttgataatgacaccggatggatcagcgttgcctcttcgttaatcagcgacctgaatcagaacttttttatcaccgttacagccaaagataagggcaatcccccgctgtcgtctcaggccactgtccacatcactgtcacagaggaaaattaccacaccccggagttctcgcaatcccacatgtctgccacgattccagagtcccatagtataggaagtatcgtgcgcaccgtttctgccagagaccgtgatgcggcaatgaatgggttaatcaaatactccatctcctccggcaatgaggaggggatttttgcgattaattccagcactgggattctcacacttgcaaaagcactggattatgagttgtgtcagaagcacgagatgacgattagtgccatagatggaggctgggtcgctagaaccggttattgtagcgtgactgtcaacgtgatcgacgttaacgacaactctcccgtgtttctgtccgacgattactttccaacggttctggagaatgctccatcagggacaactgtgatccacttgaacgccaccgatgccgattctggcacaaacgctgtgattgcctacacagttcaaagttctgacagcgacctgtttgtgattgatccaaatactggcgtgataacaacccagggattcctggattttgaaaccaaacaaagttaccatcttaccgtgaaggcattcaacgtcccagacgaagagcgctgtagcttcgctaccgtgaacatccagttgaaagggaccaatgagtatgttccaaggtttgtgtccaaactgtactacttcgagatctcagaagctgcccccaaaggcaccattgtcggtgaggtgtttgcatcggaccgcgatctgggcaccgacggagaggtacactatctgatcttcgggaactcaaggaagaagggattccagatcaataagaagacaggccagatatatgtgagcggaattttggatagggaaaaggaagagcgcgtgtcactgaaagttctcgccaagaattttggaagcatccgaggggccgacatcgacgaggtgacagtcaacgtcacggtgctggatgcgaacgaccctccaatttttaccctgaacatctattcagtccagatctccgaaggtgtgcctattggtacccatgtgacattcgtgtcagccttcgattccgactctattccctcttggtctcgtttcagttactttatagggtccggaaatgagaacggcgcctttagcataaacccccagaccgggcagattacagtcaccgccgagttggatcgtgagaccctgcccatatacaacctaagcgtgttggctgtagacagtggtactccatcagcaactgggagtgcttcccttttggtgacacttgaggacatcaacgacaatggtccaatgcttaccgtaagtgaaggagaggtgatggaaaataagaggcctgggacattggttatgacccttcagagcacagatccagaccttcctcctaatcaggggccatttacatattatcttttaagcaccgggcctgcaaccagctatttctccctgtcaactgcaggcgtactgtctaccacgcgtgaaatcgatcgggaacagatagccgatttctacctgtctgtggtaaccaaagattctggagtgccccagatgtcgagcactggcactgtgcatatcacagtgatcgaccagaacgacaaccccagtcagtctagaaccgtggaaattttcgtcaactactacggcaacctgtttcccggtggcatcctcggctctgttaaaccacaggaccctgacgtgcttgactctttccattgttctctgaccagcggggtgacctcacttttctctattcccggtggcacctgcgacctaaattctcagccccgaagcactgatggtacatttgacctgactgtcctttccaacgatggtgtccatagcacagtgacctccaacattcgcgtgttctttgccggcttctctaacgctacagtggacaacagcatcctgcttcgattgggggtgcccacagtgaaagacttcttaactaatcattacctgcacttcctgagaatcgcaagcagtcagctaacaggcctggggaccgcagtacagctgtacagtgcctatgaggaaaataaccgaacctttttgctggcggcagttaaacgaaaccataaccagtacgtgaaccccagtggcgtggccacttttttcgagagtattaaagaaatcctcctcaggcaatccggcgtcaaggtcgagagtgtcgatcatgattcctgtgtccacggtccgtgtcagaatgggggaagctgtcttcgaagactagccgtctctagcgtgctgaaatctagggagtctttacctgtgattattgtggctaatgagcccttgcagcccttcttatgcaagtgccttcccggttatgctgggtcctggtgtgaaatagatatcgatgaatgcctgccctccccttgtcactcagggggcacgtgtcacaatttagttggcggtttcagttgttcgtgtcctgacgggttcaccgggcgggcttgcgaaagggatattaatgaatgtcttcaatctccttgcaagaatggcgccatctgccagaacttccccgggtcattcaattgtgtttgcaaaaccggctatacaggcaagatgtgcgaatcgtctgtgaactactgcgagtgcaatccttgctttaacggcgggagttgccagtccggagttgatagttactattgccattgtccatttggcgtgtttgggaagcactgtgaactgaactcctatggcttcgaagaattgtcttacatggaattcccttctttggatcctaacaataattatatctacgttaaattcgctactatcaaatcacatgccctgctgctgtataattacgacaatcaaacaggcgaccgcgctgaatttctggccttggagattgcggaggaaagactccgttttagctacaacctgggcagcggcacatacaagctcaccactatgaagaaggtcagcgatggacattttcacaccgtgatcgcgagacgtgctggaatggctgcttccctgactgtggattcttgtagcgagaaccaggagcctggctactgcaccgtgagtaacgtcgcagttagcgacgattggacactcgacgtgcagccaaatcgcgtaacagtgggcggcatccgaagcctcgaacctattctacaaagaagaggccacgtagagagccatgactttgtaggatgtattatggaatttgccgttaatgggcggcccctggagccaagtcaggctctagcagcgcaggggatcctggaccagtgtcctcgccttgaaggggcctgtaccaggagcccttgccaacacggcggaacgtgtatggactactggtcatggcagcagtgtcactgcaaggagggtcttacagggaaatattgtgaaaaatccgtgactcccgatactgccctgtccctggagggcaagggccgcctggactatcacatgtcccagaatgagaagcgcgaatacctgcttcgacagtccctgcggggagcgatgctggaaccatttggagtcaactcactcgaagtgaaatttaggacaagaagtgagaacggtgttctcatacatatacaggagtcatcaaattatactaccgtcaagattaaaaatggtaaagtgtactttacatcggacgccggcatcgctggcaaagtggagcggaatattcctgaggtgtatgtggctgacggtcactggcatacctttctaattgggaagaatggcaccgccactgtcctgtccgtggaccgaatctacaatcgggatataatccacccaactcaggattttggaggtctcgacgtgctgactattagcttgggtggaatcccacccaaccaggcacaccgcgacgcccaaacagccggcttcgatggatgcatcgcaagcatgtggtatggtggcgaatccctgcccttctctggaaaacactctctcgcgtcaatatctaaaacggatccgtcagtgaagatcggttgccggggtccaaacatttgcgcatctaatccttgttggggggatttgctgtgcatcaatcagtggtacgcttaccggtgcgtccctccgggagactgcgccagccacccgtgccagaacggcgggtcttgcgagcctggactacacagcgggtttacctgctcatgtcctgacagccacaccgggagaacctgcgaaatggtcgtggcttgtctgggggtcctctgtccacaaggcaaggtgtgcaaggctgggagcccagctgggcacgtgtgcgtcttaagccagggtccagaggagatctcactcccactatgggccgttcccgctatagtgggttcatgcgccacagtgctggccctcctggtactgagtctgatactctgcaatcagtgccggggtaagaaggccaaaaatcctaaggaggagaaaaagccgaaggagaagaaaaaaaaggggtctgagaacgtcgcgttcgacgatcctgataatatccccccctacggtgacgatatgaccgttcggaagcagccagaagggaaccccaagccagatattattgaacgggagaatccttacttaatctatgacgaaacagacatccctcataacagcgaaacaatccccagcgcccctttagcgagcccagaacaagagatcgagcactacgacatcgacaatgcgtcgagtatcgcaccttccgacgccgatattatccagcactataaacaatttaggtctcatactccaaaattcagcattcaacggcattctcctctgggcttcgctaggcaatctccaatgcccctcggagccagtagcctgacataccaaccctcctatggacaaggactaaggacaagcagcctcagccattcagcgtgcccaacacctaatccactatctagacattctccagcacctttttccaagagcagcactttttaccgaaattcccctgctcgcgagctgcaccttcccattagagatggcaatactttggaaatgcacggtgacacatgccagcctgggatattcaattacgctacccgcctggggcgtcggagcaagagtccacaggctatggcatcccacgggagccggcctggaagtcgactcaagcagcctatcggacaaataccactcgaatcgtccccaccggtgggcttatccatcgaagaagtggaacggctgaatactcccagacctagaaatccctctatttgttccgcagatcatgggaggtctagctcagaagaagactgtcgaagacctctgtctagaacccggaatccagccgacggtattccagctccagaatctagcagcgatagcgactcgcacgagtctttcacctgctctgagatggaatacgaccgagagaagccaatggtatacacatcccggatgcccaagctgagccaggttaatgaatccgacgctgatgatgaagacaactacggggctagactaaagcctcggcgctaccatggcagaagagcggagggaggccccgtcggcactcaggcagctgcacctggcacagctgacaacacactgccaatgaaactcggccagcaggccggcacattcaactgggataatttgctgaactggggaccaggtttcggtcattacgtggacgtgtttaaggacctagccagtctgccagagaaagctgctgccaacgaagaaggcaaagccggcactacaaaaccggtccccaaggatggtgaagccgagcagtatgtgtag

SEQ ID NO: 215818 - DNA, 9669 bp, Artificial Sequence
  derived and/or modified sequence
atggtgaccaccgtggtggccgtgggggacaccctggcccagcccctggccgctgctgaggtgttcatcgtggagatcaccctgcaggacatcaatgacaacccccctgtgttccccacagacatgctggacctgactgtggaggagaacattggagatggcagcaagatcatgcagctgacagccatggatgctgatgagggcgccaatgccctggtgacctacaccatcatctctggagcagatgacagcttcagaattgatcctgagagcggggacctgattgccacccggcggctggaccgggagcggcgcagcaagtacagcctgctggtgcgggcagatgatggcctgcagagcagtgacatgaggatcaacatcaccgtgtctgatgtgaatgaccacacccccaagttcagcaggcctgtgtacagctttgacatccctgaggacaccatccctggcagcctggtggccgccatcctggccacagatgatgacagcggcgtgaatggagagatcacctacatcgtgaatgaagatgatgaagatggcatcttcttcctgaaccccatcactggagtcttcaacctgacccggctgctggactatgaggtgcagcagtactacatcctgactgtgcgggcagaagatggcggcggccagttcaccaccatccgggtgtacttcaacatcctggatgtgaatgacaacccccccatcttcagcctgaacagctacagcaccagcctgatggagaacctgcctgtgggcagcacagtgctggtgttcaacgtgacagatgctgatgatggcatcaacagccagctgacctacagcatcgccagcggggacagcctgggccagttcaccgtggacaagaatggagtgctgaaggtgctgaaggccctggaccgggagagccagagcttctacaacctggtggtgcaggtgcatgacctgccccagatcccagccagccgcttcaccagcacagcccaggtgtccatcatcctgctggatgtgaatgacaacccccccaccttcctgagccccaagctgacctacatccctgagaacacccccatcgacacagtggtgttcaaggcccaggccacagatcctgattctggccccaacagctacatcgagtacaccctgctgaaccccctgggcaacaagttcagcatcggcaccattgatggagaggtgcggctgactggagagctggaccgggaggaggtgagcaactacaccctgactgtggtggccacagacaagggccagcccagcctgagcagcagcacagaggtggtggtgatggtgctggacatcaatgacaacaaccccatctttgcccaggccctgtacaaggtggagatcaatgaaaacaccctgactggaacagacatcatccaggtgtttgctgctgatggagatgagggcaccaacggccaggtgcgctatggaattgtgaatggaaacaccaaccaggagttcagaattgacagcgtgactggagccatcaccgtggccaagcccctggaccgggagaagacccccacctaccacctgactgtgcaggccacagaccggggcagcacccccaggacagacaccagcacagtgtccatcgtgctgctggacatcaatgactttgtgcctgtgtttgagctgagcccctacagcgtgaatgtgcctgagaacctgggcaccctgcccaggaccatcctgcaggtggtggccagagatgatgaccggggcagcaacagcaagctgtcctatgtgctgtttggaggaaatgaagataatgccttcaccctgagcgccagcggggagctgggcgtgacccagagcctggaccgggagaccaaggagagatttgtgctgatgatcacagccacagattctggcagccctgccctgactggaacaggcaccatcaacgtgattgtggatgatgtgaatgacaacgtgcccacctttgccagcaaggcctacttcaccaccatcccagaagatgcccccactggaacagatgtgctgctggtgaatgccagtgatgctgatgccagcaagaatgctgtgatccgcatcatcggcggcaacagccagttcaccatcaaccccagcacaggccagatcatcaccagcgccctgctggaccgggagaccaaggacaactacaccctggtggtggtgtgcagtgatgctggcagccctgagcccctgagcagcagcacctctgtgctggtgacagtgacagatgtgaatgacaaccccccacgcttccagcaccacccctacgtgacccacatccccagccccaccctgcccggcagctttgtgtttgctgtgacagtgacagatgctgacatcggccccaacagcgagctgcactacagcctgagcggcaggaacagcgagaagttccacatcgaccccctgcggggggccatcatggctgctggccccctgaatggagccagcgaggtgaccttctctgtgcacgtgaaggatggcggcagcttccccaagacagacagcaccaccgtgacagtgcgctttgtgaacaaggctgacttccccaaggtgcgggccaaggagcagaccttcatgtttcctgagaaccagcctgtgagcagcctggtgaccaccatcaccggcagcagcctgcggggggagcccatgagctactacatcgccagcggcaacctgggcaacaccttccagattgaccagctgaccggccaggtgtccatcagccagcccctggactttgagaagatccagaagtatgtggtgtggattgaggccagagatggcggcttcccccccttcagcagctatgagaagctggacatcaccgtgctggatgtgaatgacaatgcccccatcttcaaggaggaccccttcatcagcgagatcctggagaacctgagccccaggaagatcctgactgtgtctgccatggacaaggacagcggccccaacggccagctggactatgaaattgtgaatggaaacatggagaacagcttcagcatcaaccacgccaccggggagatccgctctgtgcggcccctggaccgggagaaggtgagccactacgtgctgaccatcaagagcagtgacaagggcagccccagccagagcacctctgtgaaggtgatgatcaacatcctggatgaaaatgacaatgccccccgcttcagccagatcttcagcgcccacgtgcctgagaacagccccctgggctacacagtgaccagggtgaccaccagtgatgaagatattggcatcaatgccatcagccgctacagcatcatggatgccagcctgcccttcaccatcaaccccagcactggagacatcgtcatcagccggcccctgaaccgggaggacacagaccgctaccgcatccgggtgtctgcccatgacagcggctggacagtgtccacagatgtgaccatctttgtgacagacatcaatgacaatgccccccgcttcagcaggaccagctactacctggactgcccagagctgacagaaattggcagcaaggtgacccaggtgtttgccacagatcctgatgagggcagcaatggccaggtgttctacttcatcaagagccagagcgagtacttccgcatcaatgccaccaccggggagatcttcaacaagcagatcctgaagtaccagaatgtgacaggcttcagcaatgtgaacatcaacagacacagcttcatcgtgaccagcagtgaccggggcaagcccagcctcatcagcgagaccaccgtgaccatcaacatcgtggacagcaatgacaatgccccccagttcctgaagagcaagtacttcacccctgtgaccaagaatgtgaaggtgggcaccaagctgatccgggtgacagccattgatgacaaggactttggcctgaacagcgaggtggagtacttcatcagcaatgacaaccacctgggcaagttcaagctggacaatgacaccggctggatctctgtggccagcagcctcatcagtgacctgaaccagaacttcttcatcaccgtgacagccaaggacaagggcaacccccccctgagcagccaggccaccgtgcacatcaccgtgacagaggagaactaccacaccccagagttcagccagagccacatgtctgccaccatccctgagagccacagcatcggcagcatcgtgaggacagtgtctgcccgggacagagatgctgccatgaatggcctcatcaagtacagcatcagcagtggaaatgaggagggcatctttgccatcaacagcagcacaggcatcctgaccctggccaaggccctggactatgagctgtgccagaagcatgagatgaccatcagcgccattgatggcggctgggtggccaggacaggctactgcagcgtgacagtgaatgtgattgatgtgaatgacaacagccctgtgttcctgagtgatgactacttccccaccgtgctggagaatgcccccagcggcaccaccgtcatccacctgaatgccacagatgctgacagcggcaccaatgctgtgattgcctacacagtgcagagcagtgacagcgacctgtttgtgattgaccccaacacaggagtcatcaccacccagggcttcctggactttgagaccaagcagagctaccacctgactgtgaaggccttcaacgtgcctgatgaggagcgctgcagctttgccaccgtgaacatccagctgaagggcaccaatgaatatgtgcccaggtttgtgtccaagctgtactactttgagatcagcgaggccgcccccaagggcaccatcgtgggggaggtgtttgccagtgaccgggacctgggcacagatggagaggtgcactacctgatcttcggcaacagcaggaagaagggcttccagatcaacaagaagacaggccagatctacgtgtctggcatcctggaccgggagaaggaggagcgggtgtccctgaaggtgctggccaagaactttggcagcatcagaggagctgacattgatgaggtgacagtgaatgtgacagtgctggatgccaatgacccccccatcttcaccctgaacatctacagcgtgcagatcagcgagggcgtgcccatcggcacccacgtgacctttgtgtctgcctttgacagcgacagcatccccagctggagccgcttctcctacttcatcggcagcggaaatgaaaatggagccttcagcatcaacccccagacaggccagatcaccgtgacagctgagctggaccgggagaccctgcccatctacaacctgtctgtgctggccgtggacagcggcaccccatctgccactggaagtgccagcctgctggtgaccctggaggacatcaatgacaatggccccatgctgactgtgtctgagggggaggtgatggagaacaagaggcctggcaccctggtgatgaccctgcagagcacagatcctgacctgccccccaaccagggccccttcacctactacctgctgagcactggacctgccaccagctacttcagcctgagcacagctggggtgctgagcaccacccgggagattgaccgggagcagattgctgacttctacctgtctgtggtgaccaaggacagcggcgtgccccagatgagcagcactggaacagtgcacatcaccgtgattgaccagaatgacaaccccagccagagcaggacagtggagatctttgtgaactactacggcaacctcttccctgggggcatcctgggctctgtgaagccccaggaccctgatgtgctggacagcttccactgcagcctgaccagcggcgtgaccagcctcttcagcatccctgggggcacctgtgacctgaacagccagcccaggagcacagatggcacctttgacctgactgtgctgagcaatgatggagtgcacagcacagtgaccagcaacatccgggtcttctttgctggcttcagcaatgccaccgtggacaacagcatcctgctgcggctgggcgtgcccaccgtgaaggacttcctgaccaaccactacctgcacttcctgcgcatcgccagcagccagctgaccggcctgggcacagctgtgcagctgtacagcgcctatgaggagaacaacagaaccttcctgctggccgctgtgaagaggaaccacaaccagtatgtgaaccccagcggcgtggccaccttctttgagagcatcaaggagatcctgctgcggcagagcggcgtgaaggtggagagcgtggaccatgacagctgtgtgcacggcccctgccagaatggaggcagctgcctgcggcggctggccgtgtcctctgtgctgaagagccgggagagcctgcccgtcatcatcgtggccaatgagcccctgcagcccttcctgtgcaagtgcctgcccggctacgccggctcctggtgtgaaattgatattgatgaatgtctgcccagcccctgccacagcggcggcacctgccacaacctggtgggcggcttcagctgcagctgcccagatggcttcaccggccgggcctgtgagcgggacatcaatgaatgtctgcagagcccctgcaagaatggagccatctgccagaacttccctggcagcttcaactgtgtgtgcaagacaggctacacaggagtgtttgggaagcactgtgagctgaacagctatggctttgaggagctgagctacatggagttccccagcctggaccccaacaacaactacatctacgtgaagtttgccaccatcaagagccacgccctgctgctgtacaactatgacaaccagacaggagacagagctgagttcctggccctggagattgctgaggagcggctgcgcttctcctacaacctgggcagcggcacctacaagctgaccaccatgaagaaggtgtctgatggccacttccacacagtcatcgcccggcgggccggcatggccgccagcctgactgtggacagctgcagcgagaaccaggagcccggctactgcaccgtgtccaatgtggccgtgtctgatgactggaccctggatgtgcagcccaacagagtgacagtgggcggcatccgcagcctggagcccatcctgcagaggcggggccacgtggagagccatgactttgtgggctgcatcatggagtttgctgtgaatggccggcccctggagcccagccaggccctggccgcccagggcatcctggaccagtacggggacttcatctcctactgcttcaaggagaagaagtgcaagaaggtgtgcttcaccgtgaccccagacacagccctgagcctggagggcaagggccgcctggactaccacatgagccagaatgagaagcgggagtacctgctgcggcagagcctgcggggggccatgctggagcccttcggcgtgaacagcctggaggtgaagttccgcaccaggagtgaaaatggagtgctgatccacatccaggagagcagcaactacaccaccgtgaagatcaagaatggcaaggtgtacttcaccagtgatgctggcattgctgggaaggtggagaggaacatccctgaggtgtatgtggctgatggccactggcacaccttcctgattggcaagaatggaacagccaccgtgctgtctgtggaccgcatctacaacagagacatcatccaccccacccaggactttggaggcctggatgtgctgaccatcagcctgggcggcatcccccccaaccaggcccacagagatgcccagacagctggctttgatggctgcatcgcctccatgtggtacggcggggagagcctgcccttcagcggcaagcacagcctggccagcatcagcaagacagaccccagcgtgaagattggctgccggggccccaacatctgtgccagcaacccctgctggggagacctgctgtgcatcaaccagtggtacgcctaccgctgtgtgcccccaggggactgtgccagccacccctgccagaatggaggcagctgtgagcccggcctgcacagcggcttcacctgcagctgcccagacagccacactggaagaacctgtgagatggtggtggcctgcctgggcgtgctgtgcccccagggcaaggtgtgcaaggccggcagccctgctggccacgtgtgtgtgctgagccagggccctgaggagatcagcctgcccctgtgggccgtgcctgccatcgtgggcagctgtgccaccgtgctggccctgctggtgctgagcctcatcctgtgcaaccagtgccggggcaagaaggccaagaaccccaaggaggagaagaagcccaaggagaagaagaagaagggctctgaaaatgtggcctttgatgatcctgacaacatccccccctatggagatgacatgacagtgaggaagcagcctgagggcaaccccaagccagacatcatcgagcgggagaacccctacctgatctatgatgaaacagacatcccccacaacagcgagaccatccccagcgcccccctggccagccctgagcaggagattgagcactatgacatcgacaatgccagcagcatcgcccccagtgatgctgacatcatccagcactacaagcagttccgcagccacacccccaagttcagcatccagaggcacagccccctgggctttgcccggcagagccccatgcccctgggcgccagcagcctgacctaccagcccagctatggccagggcctgcggaccagcagcctgagccacagcgcctgccccacccccaaccccctgagccgccacagccctgcccccttcagcaagagcagcaccttctacagaaacagccctgcccgggagctgcacctgcccatcagagatggcaacaccctggagatgcatggagacacctgccagcccggcatcttcaactatgccacccggctgggccgccgcagcaagagcccccaggccatggccagccacggcagcaggcctggcagccggctgaagcagcccatcggccagatccccctggagagcagcccccctgtgggcctgagcattgaggaggtggagcggctgaacaccccccggcccaggaaccccagcatctgcagcgctgaccacggccgcagcagcagcgaggaggactgcagaagacccctgagcaggaccaggaacccagcagatggcatcccagcccctgagagcagcagtgacagcgacagccatgagagcttcacctgcagcgagatggagtatgaccgggagaagcccatggtgtacaccagcaggatgcccaagctgagccaggtgaatgaaagtgatgctgatgatgaggacaactatggagcccggctgaagccccggcgctaccatggaagaagagctgagggcggccctgtgggcacccaggccgccgcccctggaacagctgacaacaccctgcccatgaagctgggccagcaggccggcaccttcaactgggacaacctgctgaactggggccctggcttcggccactacgtggatgtgttcaaggacctggccagcctgcctgagaaggctgctgccaatgaggagggcaaggccggcaccaccaagcctgtgcccaaggatggagaggccgagcagtatgtgtag

SEQ ID NO: 215819 - DNA, 14946 bp, Artificial Sequence
  derived and/or modified sequence
atggacctggccccagaccgggccaccggccggccctggctgcccctgcacaccctgtctgtgtcccagctgctgcgggtcttctggctgctgagcctgctgcccggccaggcctgggtgcatggagctgagccccggcaggtgttccaggtgctggaggagcagcccccaggcaccctggtgggcaccatccagacccggcccggcttcacctaccgcctgtctgagagccacgccctgtttgccatcaacagcagcactggagccctgtacaccaccagcaccatcgaccgggagagcctgcccagtgatgtgatcaacctggtggtgctgagcagcgcccccacctaccccacagaggtgcgggtgctggtgcgggacctgaatgacaatgcccctgtgtttcctgaccccagcatcgtggtgaccttcaaggaggacagcagcagcggccggcaggtgatcctggacacagccacagacagcgacatcggcagcaatggagtggaccacaggagctaccgcatcatcagaggaaatgaggccggccgcttccggctggacatcaccctgaaccccagcggggagggcgccttcctgcacctggtgtccaaaggaggcctggaccgggaggtgaccccccagtaccagctgctggtggaggtggaggacaagggggagcccaagaggcggggctacctgcaggtgaatgtgacagtgcaggacatcaatgacaacccccctgtgtttggcagcagccactaccaggccggcgtgcctgaagatgctgtggtgggcagctctgtgctgcaggtggccgctgctgatgctgatgagggcaccaatgctgacatccgctaccgcctgcaggatgagggcacccccttccagatggaccctgagaccggcctcatcaccgtgcgggagcccctggactttgaggcccggcggcagtacagcctgactgtgcaggccatggacagaggagtgcccagcctgaccggccgggcagaggccctgatccagctgctggatgtgaatgacaatgaccctgtggtgaagttccgctacttccctgccaccagccgctatgcctctgtggatgaaaatgcccaggtgggcaccgtggtggccctgctgactgtgacagatgctgacagccctgctgccaatggaaacatctctgtgcagatcctgggcggcaatgagcagaggcactttgaggtgcagagcagcaaggtgcccaacctgagcctcatcaaggtggccagcgccctggaccgggagcgcatccccagctacaacctgactgtgtctgtgtctgacaactacggggcccctcctggagctgctgtgcaggcccggagctctgtggccagcctggtgatctttgtgaatgacatcaatgaccacccccctgtgttcagccagcaggtgtacagagtgaacctgtctgaggaggcccctcctggcagctatgtgtctggcatcagcgccacagatggagacagcggcctgaatgccaacctgcgctacagcatcgtgtctggaaatggcctgggctggttccacatcagcgagcacagcggcctggtgaccaccggcagcagcggcggcctggaccgggagctggccagccagatcgtgctgaacatcagcgcccgggaccagggcgtgcaccccaaggtgtcctatgcccagctggtggtgaccctgctggatgtgaatgatgagaagcctgtgttcagccagcctgagggctatgatgtgtctgtggtggagaatgcccccaccggcacagagctgctgatgctgcgggccacagatggagacctgggggacaatggaacagtgcgcttcagcctgcaggaggccgagacagacagaagaagcttccggctggaccctgtgtctggccgcctgagcaccatcagcagcctggaccgggaggagcaggccttctacagcctgctggtgctggccacagacctgggcagccccccccagagctccatggcccgcatcaacgtgtccctgctggacatcaatgacaacagccctgtgttctaccctgtgcagtactttgcccacatcaaggaaaatgaacctgggggcagctacatcaccaccgtgtctgccacagatcctgacctgggcaccaatggaacagtgaagtacagcatctctgctggggacaggagccgcttccaggtgaatgcccagagcggggtcatcagcaccaggatggccctggaccgggaggagaagacagcctaccagctgcagatcgtggccacagatggcggcaacctgcagagccccaaccaggccatcgtgaccatcaccgtgctggacacccaggacaacccccctgtgttcagccaggtggcctacagctttgtggtgtttgaaaatgtggccctgggctaccacgtgggctctgtgtctgccagcaccatggacctgaacagcaacatctcctacctgatcaccaccggggaccagaagggcatgtttgccatcaaccaggtgacaggccagctgaccacagccaacgtcatcgaccgggaggagcagagcttctaccagctgaaggtggtggccagcggcggcaccgtgactggagacaccatggtgaacatcaccgtgaaggacctgaatgacaacagcccccacttcctgcaggccattgaatctgtgaatgtggtggagaactggcaggccggccacagcatcttccaggccaaggctgtggaccctgatgaaggagtgaatggcatggtgctgtacagcctgaagcagaaccccaagaacctgtttgccatcaatgagaagaatggcaccatcagcctgctgggccccctggatgtgcatgctggcagctaccagatcgagatcctggccagtgacatgggcgtgccccagctgagcagcagcgtcatcctgactgtgtatgtgcatgatgtgaatgacaacagccctgtgtttgaccagctgtcctatgaggtgaccctgtctgagagcgagcctgtgaacagccgcttcttcaaggtgcaggccagtgacaaggacagcggggccaacggggagatcgcctacaccatcgccgagggcaacacaggagatgccttcggcatcttcccagatggccagctgtacatcaagtctgagctggaccgggagctgcaggaccgctacgtgctgatggtggtggccagtgacagagctgtggagcccctgagcgccaccgtgaatgtgaccgtcatcctggaggatgtgaatgacaaccggcccctcttcaacagcaccaactacaccttctactttgaggaggagcagagagctggcagctttgtgggcaaggtgtctgctgtggacaaggactttggccccaacggggaggtgcgctacagctttgagatggtgcagcctgactttgagctgcacgccatcagcggggagatcaccaacacccaccagtttgaccgggagagcctgatgagaagaagaggaacagctgtgttctccttcaccgtcatcgccacagaccagggcatcccccagcccctgaaggaccaggccaccgtgcacgtgtacatgaaggacatcaatgacaatgcccccaagttcctgaaggacttctaccaggccaccatcagcgagagcgctgccaacctgacccaggtgctgcgggtgtctgccagtgatgtggatgagggcaacaacggcctcatccactacagcatcatcaagggaaatgaggagcggcagtttgccatcgacagcaccagcggccaggtgaccctcatcggcaagctggactatgaggccaccccagcctacagcctggtgatccaggccgtggacagcggcaccatccccctgaacagcacctgcaccctgaacatcgacatcctggatgaaaatgacaacacccccagcttccccaagagcaccctgtttgtggatgtgctggagaacatgagaattggagagctggtgtcctctgtgacagccacagacagcgacagcggggacaatgctgacctgtactacagcatcaccggcaccaacaaccacggcaccttcagcatcagccccaacacaggcagcatcttcctggccaagaagctggactttgagacccagagcctgtacaagctgaacatcacagccaaggaccagggccggccccccaggagcagcaccatgtctgtggtgattcatgtgcgggacttcaatgacaaccccccatccttccccccaggggacatcttcaagagcatcgtggagaacatccccatcggcaccagcgtcatctctgtgacagcccatgaccctgatgctgacatcaatggccagctgagctacaccatcatccagcagatgccccggggcaaccacttcaccattgatgaggtgaagggcaccatctacaccaatgctgagattgaccgggagtttgccaacctgtttgagctgactgtgaaggccaatgaccaggccgtgcccatcgagacccggcgctatgccctgaagaatgtgaccatcctggtgacagacctgaatgacaacgtgcccatgttcatcagccagaatgccctggccgctgaccccagcgctgtgattggctctgtgctgaccaccatcatggctgctgaccctgatgagggcgccaacggggagattgaatatgagatcatcaatggagacacagacaccttcatcgtggaccgctacagcggggacctgcgggtggccagcgccctggtgcccagccagctgatctacaacctgattgtgtctgccacagacctgggccctgagaggaggaagagcaccacagagctgaccatcatcctgcagggcctggatggccctgtgttcacccagcccaagtacatcaccatcctgaaggagggggagcccatcggcaccaacgtcatcagcattgaagctgccagcccccggggcagcgaggcccctgtggagtactacatcgtgtctgtgcgctgtgaggagaagacagtgggccgcctcttcaccatcggccgccacacaggcatcatccagacagctgccatcctggaccgggagcagggcgcctgcctgtacctggtggatgtgtatgccatcgagaagagcacagccttccccaggacccagagagctgaggtggagatcaccctgcaggacatcaatgacaacccccctgtgttccccacagacatgctggacctgactgtggaggagaacattggagatggcagcaagatcatgcagctgacagccatggatgctgatgagggcgccaatgccctggtgacctacaccatcatctctggagcagatgacagcttcagaattgatcctgagagcggggacctgattgccacccggcggctggaccgggagcggcgcagcaagtacagcctgctggtgcgggcagatgatggcctgcagagcagtgacatgaggatcaacatcaccgtgtctgatgtgaatgaccacacccccaagttcagcaggcctgtgtacagctttgacatccctgaggacaccatccctggcagcctggtggccgccatcctggccacagatgatgacagcggcgtgaatggagagatcacctacatcgtgaatgaagatgatgaagatggcatcttcttcctgaaccccatcactggagtcttcaacctgacccggctgctggactatgaggtgcagcagtactacatcctgactgtgcgggcagaagatggcggcggccagttcaccaccatccgggtgtacttcaacatcctggatgtgaatgacaacccccccatcttcagcctgaacagctacagcaccagcctgatggagaacctgcctgtgggcagcacagtgctggtgttcaacgtgacagatgctgatgatggcatcaacagccagctgacctacagcatcgccagcggggacagcctgggccagttcaccgtggacaagaatggagtgctgaaggtgctgaaggccctggaccgggagagccagagcttctacaacctggtggtgcaggtgcatgacctgccccagatcccagccagccgcttcaccagcacagcccaggtgtccatcatcctgctggatgtgaatgacaacccccccaccttcctgagccccaagctgacctacatccctgagaacacccccatcgacacagtggtgttcaaggcccaggccacagatcctgattctggccccaacagctacatcgagtacaccctgctgaaccccctgggcaacaagttcagcatcggcaccattgatggagaggtgcggctgactggagagctggaccgggaggaggtgagcaactacaccctgactgtggtggccacagacaagggccagcccagcctgagcagcagcacagaggtggtggtgatggtgctggacatcaatgacaacaaccccatctttgcccaggccctgtacaaggtggagatcaatgaaaacaccctgactggaacagacatcatccaggtgtttgctgctgatggagatgagggcaccaacggccaggtgcgctatggaattgtgaatggaaacaccaaccaggagttcagaattgacagcgtgactggagccatcaccgtggccaagcccctggaccgggagaagacccccacctaccacctgactgtgcaggccacagaccggggcagcacccccaggacagacaccagcacagtgtccatcgtgctgctggacatcaatgactttgtgcctgtgtttgagctgagcccctacagcgtgaatgtgcctgagaacctgggcaccctgcccaggaccatcctgcaggtggtggccagagatgatgaccggggcagcaacagcaagctgtcctatgtgctgtttggaggaaatgaagataatgccttcaccctgagcgccagcggggagctgggcgtgacccagagcctggaccgggagaccaaggagagatttgtgctgatgatcacagccacagattctggcagccctgccctgactggaacaggcaccatcaacgtgattgtggatgatgtgaatgacaacgtgcccacctttgccagcaaggcctacttcaccaccatcccagaagatgcccccactggaacagatgtgctgctggtgaatgccagtgatgctgatgccagcaagaatgctgtgatccgcatcatcggcggcaacagccagttcaccatcaaccccagcacaggccagatcatcaccagcgccctgctggaccgggagaccaaggacaactacaccctggtggtggtgtgcagtgatgctggcagccctgagcccctgagcagcagcacctctgtgctggtgacagtgacagatgtgaatgacaaccccccacgcttccagcaccacccctacgtgacccacatccccagccccaccctgcccggcagctttgtgtttgctgtgacagtgacagatgctgacatcggccccaacagcgagctgcactacagcctgagcggcaggaacagcgagaagttccacatcgaccccctgcggggggccatcatggctgctggccccctgaatggagccagcgaggtgaccttctctgtgcacgtgaaggatggcggcagcttccccaagacagacagcaccaccgtgacagtgcgctttgtgaacaaggctgacttccccaaggtgcgggccaaggagcagaccttcatgtttcctgagaaccagcctgtgagcagcctggtgaccaccatcaccggcagcagcctgcggggggagcccatgagctactacatcgccagcggcaacctgggcaacaccttccagattgaccagctgaccggccaggtgtccatcagccagcccctggactttgagaagatccagaagtatgtggtgtggattgaggccagagatggcggcttcccccccttcagcagctatgagaagctggacatcaccgtgctggatgtgaatgacaatgcccccatcttcaaggaggaccccttcatcagcgagatcctggagaacctgagccccaggaagatcctgactgtgtctgccatggacaaggacagcggccccaacggccagctggactatgaaattgtgaatggaaacatggagaacagcttcagcatcaaccacgccaccggggagatccgctctgtgcggcccctggaccgggagaaggtgagccactacgtgctgaccatcaagagcagtgacaagggcagccccagccagagcacctctgtgaaggtgatgatcaacatcctggatgaaaatgacaatgccccccgcttcagccagatcttcagcgcccacgtgcctgagaacagccccctgggctacacagtgaccagggtgaccaccagtgatgaagatattggcatcaatgccatcagccgctacagcatcatggatgccagcctgcccttcaccatcaaccccagcactggagacatcgtcatcagccggcccctgaaccgggaggacacagaccgctaccgcatccgggtgtctgcccatgacagcggctggacagtgtccacagatgtgaccatctttgtgacagacatcaatgacaatgccccccgcttcagcaggaccagctactacctggactgcccagagctgacagaaattggcagcaaggtgacccaggtgtttgccacagatcctgatgagggcagcaatggccaggtgttctacttcatcaagagccagagcgagtacttccgcatcaatgccaccaccggggagatcttcaacaagcagatcctgaagtaccagaatgtgacaggcttcagcaatgtgaacatcaacagacacagcttcatcgtgaccagcagtgaccggggcaagcccagcctcatcagcgagaccaccgtgaccatcaacatcgtggacagcaatgacaatgccccccagttcctgaagagcaagtacttcacccctgtgaccaagaatgtgaaggtgggcaccaagctgatccgggtgacagccattgatgacaaggactttggcctgaacagcgaggtggagtacttcatcagcaatgacaaccacctgggcaagttcaagctggacaatgacaccggctggatctctgtggccagcagcctcatcagtgacctgaaccagaacttcttcatcaccgtgacagccaaggacaagggcaacccccccctgagcagccaggccaccgtgcacatcaccgtgacagaggagaactaccacaccccagagttcagccagagccacatgtctgccaccatccctgagagccacagcatcggcagcatcgtgaggacagtgtctgcccgggacagagatgctgccatgaatggcctcatcaagtacagcatcagcagtggaaatgaggagggcatctttgccatcaacagcagcacaggcatcctgaccctggccaaggccctggactatgagctgtgccagaagcatgagatgaccatcagcgccattgatggcggctgggtggccaggacaggctactgcagcgtgacagtgaatgtgattgatgtgaatgacaacagccctgtgttcctgagtgatgactacttccccaccgtgctggagaatgcccccagcggcaccaccgtcatccacctgaatgccacagatgctgacagcggcaccaatgctgtgattgcctacacagtgcagagcagtgacagcgacctgtttgtgattgaccccaacacaggagtcatcaccacccagggcttcctggactttgagaccaagcagagctaccacctgactgtgaaggccttcaacgtgcctgatgaggagcgctgcagctttgccaccgtgaacatccagctgaagggcaccaatgaatatgtgcccaggtttgtgtccaagctgtactactttgagatcagcgaggccgcccccaagggcaccatcgtgggggaggtgtttgccagtgaccgggacctgggcacagatggagaggtgcactacctgatcttcggcaacagcaggaagaagggcttccagatcaacaagaagacaggccagatctacgtgtctggcatcctggaccgggagaaggaggagcgggtgtccctgaaggtgctggccaagaactttggcagcatcagaggagctgacattgatgaggtgacagtgaatgtgacagtgctggatgccaatgacccccccatcttcaccctgaacatctacagcgtgcagatcagcgagggcgtgcccatcggcacccacgtgacctttgtgtctgcctttgacagcgacagcatccccagctggagccgcttctcctacttcatcggcagcggaaatgaaaatggagccttcagcatcaacccccagacaggccagatcaccgtgacagctgagctggaccgggagaccctgcccatctacaacctgtctgtgctggccgtggacagcggcaccccatctgccactggaagtgccagcctgctggtgaccctggaggacatcaatgacaatggccccatgctgactgtgtctgagggggaggtgatggagaacaagaggcctggcaccctggtgatgaccctgcagagcacagatcctgacctgccccccaaccagggccccttcacctactacctgctgagcactggacctgccaccagctacttcagcctgagcacagctggggtgctgagcaccacccgggagattgaccgggagcagattgctgacttctacctgtctgtggtgaccaaggacagcggcgtgccccagatgagcagcactggaacagtgcacatcaccgtgattgaccagaatgacaaccccagccagagcaggacagtggagatctttgtgaactactacggcaacctcttccctgggggcatcctgggctctgtgaagccccaggaccctgatgtgctggacagcttccactgcagcctgaccagcggcgtgaccagcctcttcagcatccctgggggcacctgtgacctgaacagccagcccaggagcacagatggcacctttgacctgactgtgctgagcaatgatggagtgcacagcacagtgaccagcaacatccgggtcttctttgctggcttcagcaatgccaccgtggacaacagcatcctgctgcggctgggcgtgcccaccgtgaaggacttcctgaccaaccactacctgcacttcctgcgcatcgccagcagccagctgaccggcctgggcacagctgtgcagctgtacagcgcctatgaggagaacaacagaaccttcctgctggccgctgtgaagaggaaccacaaccagtatgtgaaccccagcggcgtggccaccttctttgagagcatcaaggagatcctgctgcggcagagcggcgtgaaggtggagagcgtggaccatgacagctgtgtgcacggcccctgccagaatggaggcagctgcctgcggcggctggccgtgtcctctgtgctgaagagccgggagagcctgcccgtcatcatcgtggccaatgagcccctgcagcccttcctgtgcaagtgcctgcccggctacgccggctcctggtgtgaaattgatattgatgaatgtctgcccagcccctgccacagcggcggcacctgccacaacctggtgggcggcttcagctgcagctgcccagatggcttcaccggccgggcctgtgagcgggacatcaatgaatgtctgcagagcccctgcaagaatggagccatctgccagaacttccctggcagcttcaactgtgtgtgcaagacaggctacacaggcaagatgtgtgagagctctgtgaactactgtgagtgcaacccctgcttcaatggaggcagctgccagagcggcgtggacagctactactgccactgccccttcggcgtgtttgggaagcactgtgagctgaacagctatggctttgaggagctgagctacatggagttccccagcctggaccccaacaacaactacatctacgtgaagtttgccaccatcaagagccacgccctgctgctgtacaactatgacaaccagacaggagacagagctgagttcctggccctggagattgctgaggagcggctgcgcttctcctacaacctgggcagcggcacctacaagctgaccaccatgaagaaggtgtctgatggccacttccacacagtgattgccaggagagctggcatggccgccagcctgactgtggacagctgcagcgagaaccaggagcccggctactgcaccgtgtccaatgtggccgtgtctgatgactggaccctggatgtgcagcccaacagagtgacagtgggcggcatccgcagcctggagcccatcctgcagaggcggggccacgtggagagccatgactttgtgggctgcatcatggagtttgctgtgaatggccggcccctggagcccagccaggccctggccgcccagggcatcctggaccagtgcccccggctggagggcgcctgcaccaggagcccctgccagcacggcggcacctgcatggactactggagctggcagcagtgccactgcaaggagggcctgaccgggaagtactgtgagaagtctgtgaccccagacacagccctgagcctggagggcaagggccgcctggactaccacatgagccagaatgagaagcgggagtacctgctgcggcagagcctgcggggggccatgctggagccctttggagtgaacagcctggaggtgaagttccgcaccaggagtgaaaatggagtgctgatccacatccaggagagcagcaactacaccaccgtgaagatcaagaatggcaaggtgtacttcaccagtgatgctggcattgctgggaaggtggagaggaacatccctgaggtgtatgtggctgatggccactggcacaccttcctgattggcaagaatggaacagccaccgtgctgtctgtggaccgcatctacaacagagacatcatccaccccacccaggactttggaggcctggatgtgctgaccatcagcctgggcggcatcccccccaaccaggcccacagagatgcccagacagctggctttgatggctgcatcgcctccatgtggtatggaggagagagcctgcccttcagcggcaagcacagcctggccagcatcagcaagacagaccccagcgtgaagattggctgccggggccccaacatctgtgccagcaacccctgctggggagacctgctgtgcatcaaccagtggtacgcctaccgctgtgtgcccccaggggactgtgccagccacccctgccagaatggaggcagctgtgagcccggcctgcacagcggcttcacctgcagctgcccagacagccacacaggccgcacctgtgagatggtggtggcctgcctgggcgtgctgtgcccccagggcaaggtgtgcaaggccggcagccctgctggccacgtgtgtgtgctgagccagggccctgaggagatcagcctgcccctgtgggccgtgcctgccatcgtgggcagctgtgccaccgtgctggccctgctggtgctgagcctcatcctgtgcaaccagtgccggggcaagaaggccaagaaccccaaggaggagaagaagcccaaggagaagaagaagaagggctctgaaaatgtggcctttgatgatcctgacaacatccccccctatggagatgacatgacagtgaggaagcagcctgagggcaaccccaagccagacatcatcgagcgggagaacccctacctgatctatgatgaaacagacatcccccacaacagcgagaccatccccagcgcccccctggccagccctgagcaggagattgagcactatgacatcgacaatgccagcagcatcgcccccagtgatgctgacatcatccagcactacaagcagttccgcagccacacccccaagttcagcatccagaggcacagccccctgggctttgcccggcagagccccatgcccctgggcgccagcagcctgacctaccagcccagctatggccagggcctgcggaccagcagcctgagccacagcgcctgccccacccccaaccccctgagccgccacagccctgcccccttcagcaagagcagcaccttctacagaaacagccctgcccgggagctgcacctgcccatcagagatggcaacaccctggagatgcacggggacacctgccagcccggcatcttcaactatgccacccggctgggcagaagaagcaagagcccccaggccatggccagccacggcagccggcccggcagccggctgaagcagcccatcggccagatccccctggagagcagcccccctgtgggcctgagcattgaggaggtggagcggctgaacaccccccggcccaggaaccccagcatctgcagcgctgaccacggccgcagcagcagcgaggaggactgccggcggcccctgagcaggaccagaaatccagcagatggcatcccagcccctgagagcagcagtgacagcgacagccatgagagcttcacctgcagcgagatggagtatgaccgggagaagcccatggtgtacaccagcaggatgcccaagctgagccaggtgaatgaaagtgatgctgatgatgaggacaactacggggcccggctgaagccccggcgctaccacggccggcgggcagagggcggccctgtgggcacccaggccgccgcccctggaacagctgacaacaccctgcccatgaagctgggccagcaggccggcaccttcaactgggacaacctgctgaactggggccctggcttcggccactacgtggatgtgttcaaggacctggccagcctgcctgagaaggccgccgccaatgaggagggcaaggccggcaccaccaagcctgtgcccaaggatggagaggccgagcagtatgtgtag

SEQ ID NO: 215820 - DNA, 9669 bp, Artificial Sequence
  derived and/or modified sequence
atggtgaccaccgtggtggccgtgggcgacaccctggcccagcccttagccgccgctgaggttttcatagtggaaattacccttcaagatataaatgacaaccctcctgtgtttcccacagacatgttggatctgacagtggaggaaaatatcggagacggaagcaaaatcatgcagttgaccgccatggatgccgacgagggcgcaaacgcacttgtcacttatacaatcatcagcggcgcagacgattctttccgcatcgaccccgaatccggagacctcatcgccactagacggctagaccgggaacgacggagcaaatatagcttactggtgagagccgatgacggactgcagagctccgatatgcgcattaacatcactgtttctgacgttaacgatcatactcctaagtttagccggcctgtttattcctttgacatccccgaagatacgatccccgggtcactggtggccgccatactggctacagacgacgactctggcgttaatggagaaattacttacatcgtcaatgaggatgacgaggacggaatcttcttcctgaatcctattacaggcgtatttaatctaaccaggctgctggattatgaggtgcagcagtactatattcttacagtccgcgcagaggatggggggggtcagttcacaacaatacgggtgtatttcaacatattggatgtgaacgacaaccctccaatattcagcttaaacagttacagtacgtccttgatggagaatctccctgtcgggtccaccgtacttgtcttcaacgtgactgacgcagacgatgggatcaattcccagctgacatactccatagcgtcaggggattctttaggccagttcacggttgacaagaatggtgtgctgaaggttctaaaggctctggaccgggaatcccagtctttctacaacttggtcgtacaagtgcatgatctgcctcagatccctgccagtcggtttaccagcacggcgcaagtcagtattatccttctggatgtcaacgacaaccctcctacttttctttcccctaagctgacatatattccagaaaatacccctattgacactgtggtctttaaggcgcaagccacagaccccgatagcggccccaatagctatattgaatacaccctcctgaacccactcggtaacaagtttagcatcggcaccatagatggggaagtgagactgaccggagaactggaccgggaggaagtgagtaattacaccctcaccgtggtggcaactgataagggacaaccctccctctccagctctaccgaggtggtcgtcatggtgctggacatcaacgacaataatcccattttcgcccaggccttatacaaagttgagataaacgagaatacgctaaccgggacagacatcattcaggtgttcgctgcggacggcgacgagggaacaaacgggcaggtccgctatggaatagtgaacgggaacactaatcaagagtttagaatcgactctgtgacaggcgcaatcaccgtcgcaaagcctctggatcgcgagaaaacccctacctatcatctcaccgtgcaggccacagaccgcggatctacaccaaggaccgacacttctacggtgtccatcgtactgctggacatcaatgattttgtgcctgtttttgagctctcaccttactccgttaacgtgccagagaatcttggaacacttccccgaacaattttgcaggttgtggctcgtgatgacgatcggggaagtaacagcaagctgtcttacgtgctgttcggggggaacgaggataacgcattcacactctccgcctcaggcgaactgggagtgacccagagcttggatcgcgaaacaaaggagaggtttgttttgatgatcacagcgaccgattctgggagtccagccttgaccggaacaggcacaatcaatgtgatcgtggatgacgtaaacgataacgtccccactttcgctagtaaggcctatttcacaacgattccagaagatgctcccacgggtacggatgttttgctggtcaacgctagcgacgctgacgcctccaagaatgccgtcatcaggatcatcggggggaactcacagtttacaataaaccccagcaccggacagatcatcaccagcgcgctgctggacagggaaactaaggacaattataccctggtcgttgtctgtagcgacgccggcagtccagagcccctctctagcagtacatccgtcttggttacggttacggatgttaacgacaaccctccccggtttcaacaccatccctacgtgacacacatcccgagccctaccctgcctggcagcttcgtgttcgctgtgaccgtgacggacgccgacatcggccctaactctgagctacactatagtctgtctggtaggaactctgagaagtttcacattgatcctctccgtggtgcaattatggccgccggcccccttaacggagcaagcgaagtgacgttctcagtgcacgttaaagatgggggctcgttccccaagactgacagtacaaccgtgaccgtgaggttcgtgaataaggccgacttccctaaagtgagagccaaggagcagacattcatgtttccagaaaatcaaccggtgtctagccttgtgaccacaatcacgggcagcagcctgcgcggcgagcccatgagctattatatcgcgtccgggaatctgggtaacacattccagatcgatcagctcaccggacaggtctccatctcccaacccttggattttgaaaaaatccagaagtatgtggtttggattgaagcacgtgatggcggatttccccccttctccagctacgaaaagctagatatcacagtgttggatgtgaacgacaatgcccctatcttcaaggaagatccgtttatctcagagattctggagaacttgtccccgcgcaagattctcacggtatctgctatggacaaagatagtggaccaaatggccagctagattatgaaattgtgaacggcaacatggagaactcattctcaatcaaccatgccactggagagataaggagtgttcggccacttgatcgagaaaaagtgagtcactacgtgctcactataaaatcaagtgataaagggagtccatcccaaagcacaagcgtgaaggtcatgattaatatcctggacgagaacgacaatgctcccaggttttcccagatcttttccgcacatgtccctgagaacagcccactggggtacacagtgacccgagtcacgactagcgacgaagacattggcatcaacgccatttcaagatattcaatcatggacgcctcgctgcctttcacaatcaacccatcaaccggagatatcgtcatctctcgtccgctgaatagggaggacaccgacaggtaccgcatccgggtttcagcgcacgactcggggtggactgtgagtaccgacgttaccatctttgtgacagatatcaacgataatgccccacggttctccaggacgtcctactacttggactgtccagagctcacagaaattggcagcaaggtgactcaggtgttcgccaccgacccagacgagggctctaatggacaggtgttctattttattaaatcgcaatccgagtatttcaggattaacgccacgaccggggaaatcttcaataagcagattcttaaataccagaacgttactggcttctcaaacgtgaacattaatcgtcactccttcatagtgacctcatctgaccgagggaagcccagcctcatctctgagaccaccgtgaccatcaatatcgtcgactccaacgataatgctcctcagtttctgaaaagcaaatactttacaccagtgactaaaaacgtgaaggtgggcacgaagctcatcagggtgactgcgatcgatgacaaggattttggcttgaacagcgaagtagaatactttatctccaacgataaccacctgggaaaatttaaattggacaacgacactggttggatcagcgtagcgtcatccttgattagcgacctgaaccagaatttctttataaccgtgacagctaaggataagggtaaccctcccctgtcaagccaggctacagtgcatatcactgtgaccgaagagaactaccatactcccgagtttagtcaaagccatatgtccgctacgatccccgagtctcactcaatcggttccatagtacgcacagttagtgcacgggacagggatgctgccatgaatggcctgatcaaatattccatctcatctggcaacgaggaaggcatttttgccatcaacagttctacaggcatcttgacacttgcaaaggcattggactacgagttatgccagaagcacgaaatgacaatttcagctatcgacggaggttgggtggcacgcactgggtattgctcagtgaccgtgaatgtgatcgacgtcaatgacaactcgccagtcttcctgagtgacgattacttccctaccgttttggaaaatgcaccatcaggcacaaccgtgattcatctcaacgctacagacgcagacagcggtaccaacgccgtgatcgcatatactgtccagtcaagcgatagtgacctgttcgtgatagatccgaatacaggtgtgatcacgactcaaggctttttggatttcgagactaagcaatcatatcatctgacagtcaaggcttttaatgtccctgacgaggagagatgttccttcgctacagtgaacattcagctgaaaggcaccaatgagtacgtgcctaggttcgtcagcaagctgtattattttgaaattagcgaggcagcacccaaaggaaccatagtcggggaagtgtttgcgagtgaccgagatctgggtaccgacggggaagtgcactacctcatctttggcaactctcggaaaaagggctttcaaataaacaagaagaccgggcaaatctacgtctctgggatactggatcgggaaaaggaggagcgggtctctttgaaggtgcttgccaaaaattttgggagtattcggggcgctgatattgacgaagtaactgtgaatgtgacagttctagatgctaacgatcctcccatcttcacactgaacatttacagtgttcagatctcagagggtgtgcctatcgggacgcacgtgacctttgtctccgccttcgactccgatagcattccttcttggtctcgcttctcctacttcattgggtccggaaacgagaacggagccttctccatcaacccccaaaccggacaaatcactgtgactgccgagctggaccgcgaaactcttcccatctataacttgagcgtgctagccgtggacagcggcacacctagcgccaccggttccgcaagtctgctcgttactctcgaggatataaacgacaatggccctatgctgaccgtatctgagggagaggttatggaaaacaaacgccctggtacactcgtaatgacacttcagtccaccgatcccgacttaccgccaaaccaggggcccttcacctactatctgctttccacaggtccagcgacctcatatttcagcttatccacagctggcgtgctgagtacaacgagggagatcgaccgggagcagatcgcagatttttacttgagcgtcgtcaccaaagactccggtgtgcctcaaatgagctctaccggcacagtgcatattacggtcatcgaccagaacgataacccaagtcaatcccggaccgtggaaattttcgttaattactatgggaatttatttcctggaggaatcctgggctctgtgaagccacaggaccccgacgtactggacagttttcattgttccttgaccagcggcgttacctcccttttcagcattcccggcggtacgtgtgatttgaacagccagcctcgttctactgatggtacattcgacctcacagtgctcagcaacgatggcgtacatagcaccgtcacttcgaatatcagagtgttctttgcagggttttcaaacgcaactgtggataattcaatcttgcttcggctgggagtcccaaccgtgaaggactttttaactaaccattacttacatttcctccgaatcgcctcttcacagcttacaggcctggggacggcagtacagctgtactcggcttatgaggaaaacaataggacctttctcttggcagcagtgaaacggaaccataaccagtacgttaatcctagtggtgtggctactttcttcgagagcatcaaggaaattctccttcggcagtctggggtgaaagttgaatctgttgaccatgactcatgtgtccacggcccatgccagaacggaggttcttgcctgagacggctggccgtttcctcagtgctgaaatcccgcgagagtttacctgtcatcatcgtagcgaatgagcccctgcaaccatttttgtgcaaatgtctgcctggatacgcaggcagctggtgcgagatcgacatcgatgagtgccttccttcgccctgccattccggtggaacctgtcataatctcgtagggggtttctcatgtagctgcccagatggctttacaggccgagcctgcgagagggacattaatgagtgtcttcagtccccgtgtaaaaatggggccatctgtcagaacttcccaggatctttcaattgtgtctgtaaaacagggtatactggcgtctttggcaaacattgcgagttaaacagctatgggtttgaagaactgtcttatatggagttcccctctcttgaccctaataacaactacatctacgtgaaattcgctactatcaagtcccatgctctccttctctacaattacgataaccagaccggtgatcgcgctgagttcctggccctcgagattgcggaggagaggctgagattctcctacaacctcggaagcgggacgtacaagctaacaacaatgaagaaagtttccgatggacacttccacacagtcatcgccagacgagcgggaatggccgcttcccttacagtggattcgtgctctgaaaaccaggaaccggggtattgcacagtgtccaacgtggctgtgagtgacgactggaccctggatgttcagcccaaccgtgtgactgtaggcggaatcaggagtttggagcctatactccagaggcggggtcacgtggagtctcacgattttgtgggatgcatcatggaatttgccgtaaacggacgaccgctggaacccagccaggccttagcagcacaggggatcctcgatcagtatggagatttcatcagctactgctttaaggaaaagaaatgcaagaaagtctgtttcaccgtgaccccagacacagctctatccctggaaggcaagggcagactggactaccacatgtcccagaacgagaaacgggagtacctgcttaggcagtcccttcgcggggccatgctggagccattcggggtaaattcactagaagtgaaatttcgaacccggagcgaaaacggtgtcctcattcacattcaggaatcttcaaactacacaacagtgaagattaagaatggaaaggtgtactttacaagtgatgccggaattgcgggcaaggtggaaagaaatattcctgaagtgtatgtggccgatggacattggcacactttcttgatcggaaaaaatggaactgccactgtactgtctgtggaccgcatatacaatagagacatcattcaccctacacaagactttggtgggctggatgtgttgacgatctctctaggaggaattccacctaatcaggcacacagagacgcccagactgccgggtttgacggctgtatcgcgtcaatgtggtacggcggagagtcactccccttcagtggaaagcacagcctggcctccatctccaagacggatcctagcgtgaagatcggttgcagggggcctaacatttgtgcctcaaacccctgctggggcgaccttctgtgtattaaccagtggtacgcttatcgctgtgtaccaccaggggactgtgctagccatccttgccagaatgggggaagctgcgaaccagggctgcactctggattcacctgctcatgtcccgacagccatacgggtcggacatgtgagatggtcgtggcgtgtcttggggtgctctgtccccaggggaaggtctgtaaggctgggtctccggccggccatgtgtgtgtgctatcacagggtccagaagagatttccctccccctgtgggctgtgccagcaattgtagggtcttgcgctacagtgttggcactgctcgtgctgtctcttatcctgtgcaatcagtgtcgggggaaaaaagcgaaaaaccccaaagaggagaagaagccaaaagaaaagaagaagaaaggatcggagaatgttgctttcgacgaccctgacaatatcccgccttacggtgatgacatgaccgtgcgtaagcagcccgagggaaaccctaaacctgatatcatcgagcgcgagaatccttatctaatttacgatgagactgacatcccacacaactccgagactatacccagcgcaccgctggctagccccgagcaggagatcgaacactatgacatcgataatgcatcaagtatcgctccatctgatgctgacattatccagcattacaagcagtttagatcgcacacaccaaaatttagcatccagcgccactcaccgctgggcttcgcaagacagtcacccatgcccctcggcgccagtagtttaacttatcaaccctcttacggccagggcctcaggacttcgtcgctcagtcactctgcctgtccaaccccaaaccccttaagtcggcacagtcccgcccccttctctaagtccagcacattttatcggaattcgccagctcgggagctgcacttacccatcagagacgggaataccctggagatgcatggagacacttgccagccaggaatcttcaattatgcgacacgcttgggacgcaggtctaagagcccccaggccatggcaagccatgggtcaagaccaggctctcggcttaaacagccaattggtcagattcccctggagtcaagtccccccgtgggcctatcgatcgaggaggttgagaggctgaacacccctcgcccccgtaatccttcaatctgcagcgccgatcacggcaggagctcttcagaggaggactgcaggcggccactttctcgaacacggaaccccgcagacgggatccctgcaccagagtcctcttcagacagtgatagccacgagagtttcacctgcagtgaaatggagtacgaccgggagaaacctatggtatacacttcacgaatgcccaagctgagtcaagttaatgaatcagacgctgacgatgaagataattatggggctaggttgaagcctagaaggtaccacggaagaagggccgaaggtggccctgttggcacccaggccgctgctcccggaacagcagacaacacactaccaatgaagctcggacagcaagcaggcacctttaactgggataatcttctcaattggggcccaggattcggccactacgttgacgtgttcaaggatctcgctagcctgcccgagaaagccgccgcaaacgaggaaggtaaggcagggactactaagccagtgcccaaggatggggaagccgaacagtatgtgtag

SEQ ID NO: 215821 - DNA, 14946 bp, Artificial Sequence
  derived and/or modified sequence
atggacctggcccccgaccgggccaccggccggccctggctgcccctgcacacattaagtgtgtctcagctgctccgggtgttctggctactatccctgctacccgggcaggcttgggtgcacggcgcggaaccaagacaagtctttcaggtgctggaggaacagccacccgggacgcttgtaggcactatccagacacgcccgggattcacctaccgtctcagcgagtcacatgcccttttcgccatcaacagttccactggcgcactgtatacaaccagcactatagaccgcgaatctcttccctccgatgtgatcaatctcgtcgttttgagcagcgctccgacctatcctactgaggtccgggtgctcgtaagggatcttaatgacaacgctccagtcttccctgatcccagcatcgttgtgacatttaaggaagattcaagttcagggcggcaagtgatactggacacagccactgactcagacatcggcagtaacggcgtggatcaccgcagttaccgcatcatccgaggaaatgaggctgggcgctttaggcttgacataacacttaatcccagtggagagggcgcctttctgcacctggtctccaaggggggccttgatcgcgaagttacaccgcagtatcagctgctggttgaggtggaagacaagggcgaaccgaagcgacggggttatctccaggtcaacgtgacagtacaggacatcaacgataacccccccgttttcgggtcaagtcactaccaggcaggcgttcccgaggatgccgtcgtggggtcctccgtgcttcaggtcgctgcagccgatgcagacgaaggtacgaacgcggacatccgatatcgtcttcaagacgagggcacccccttccaaatggaccccgagactggactgattacagtgcgcgaacccctggatttcgaagccagacgccaatatagtctgaccgtgcaggctatggacagaggagttcctagcctgactggtcgggctgaggcattgatccaacttctcgatgttaatgacaacgatccagtcgtgaagttcaggtatttccccgcaaccagtcgttacgcatccgttgatgagaatgctcaggtgggcactgtcgtcgccctgctgaccgtaaccgatgccgactctcctgctgctaatggcaatatctccgtccagattctaggcggtaatgagcagcgccatttcgaagtccagagttctaaggtcccaaacctcagtctcatcaaagttgcatctgctctggaccgcgagcgcatcccatcctataatctcacggtgagcgtgtcagacaactacggcgccccgcctggtgcggctgtccaggccaggagctccgtggcatcactcgttatcttcgttaatgacattaacgaccaccctcctgtgttttctcaacaggtatatcgggtgaacctgtctgaagaggccccaccgggatcatacgtttcaggaatatcagccacagatggagattccggtttgaatgccaatcttcgatattccatcgtgagtggcaacggattgggctggtttcacatttcagaacacagcgggcttgtcactactggcagttcagggggactggatagggagcttgcctcgcagattgtcctgaacatctctgccagggaccaaggggtgcatccaaaggtttcatacgcgcaacttgtcgtcaccctgcttgatgtgaacgacgagaaaccggtttttagtcagcccgaagggtatgacgtttccgttgtagaaaatgctccaactggtacagagttgctgatgctcagggccaccgacggcgacttgggcgataacgggactgtcaggttctccttgcaggaagccgagaccgatagacgttcatttagactggacccagtctcgggccggctgtccaccatctcctccctggatcgcgaagagcaagccttttactccttactggtcctggccaccgatctgggttcgcctcctcagtcgagcatggctagaattaacgtctctttgctcgatataaacgacaattccccggtgttttatcccgttcaatacttcgcccatataaaggaaaatgagcccggcggaagctacatcactaccgtgtccgccaccgatcccgatttaggtaccaatggcacagtgaagtacagcatcagcgccggagaccggtcacgcttccaagttaatgcccagtctggcgtgatcagtacacgcatggcactagacagagaagagaaaaccgcgtatcagctacagatagtggccaccgacggcggcaacctccaaagccccaaccaggctatcgtgacaatcactgtcctcgacacccaggacaatccacccgttttcagtcaagtggcctattccttcgtcgtgttcgaaaacgttgcgttaggataccacgtggggtctgtgagtgcaagcactatggatctgaattcaaacatctcttatctcattacaactggtgatcaaaagggaatgtttgctatcaaccaggtgaccggtcagttgaccacggcaaatgtgatcgacagggaggagcagagtttctaccagctcaaagtggtagcatcaggtgggaccgtgacaggggatacaatggtcaatataacagtaaaggacttaaatgataactcgccacacttcctccaggccatcgaaagcgtgaacgtggtggaaaattggcaggccggtcactccatctttcaggccaaagcagttgatccagacgagggtgttaacggcatggtcctgtactcgctgaaacagaaccccaaaaacctattcgctatcaatgagaaaaatggaaccatctcccttctaggccccctcgacgtgcacgctggtagctatcaaatcgagattctggcaagtgatatgggggtgccccagctgtcatcttccgtcattctgaccgtgtatgtgcatgatgtcaacgacaatagccctgtgttcgatcagctgagctacgaggtgaccctatctgagagtgagccagtcaactcccggtttttcaaagtgcaagcatccgacaaagattcgggagcaaatggagagattgcctacaccattgccgaaggaaatacaggcgatgcttttggaatctttcccgacgggcagctgtacataaaaagcgagttggaccgagaactccaggacagatatgtgttgatggtggttgcttcagaccgcgcagtggagccactgagcgccactgtgaatgtcaccgttatccttgaagatgtaaatgacaatcgccctctcttcaattctaccaattataccttctacttcgaagaggaacaaagggccggatcctttgtcggcaaggtgtccgccgtcgacaaagacttcggacccaacggcgaggtgcgatacagtttcgaaatggtgcaacccgatttcgagcttcacgccataagcggggaaataacaaacacacaccagtttgacagggaaagcctcatgaggcgcagaggaactgccgtctttagctttacagtcattgccaccgaccagggtattcctcagcctctgaaggatcaggccaccgtccatgtatacatgaaggatatcaacgataacgcaccaaaatttctgaaggatttctatcaagccactatcagtgaatccgcagctaatctgacacaggtgctgagagtttccgcatccgacgtggatgaaggcaacaatggcttaatccattattccatcatcaaggggaacgaggaaagacagttcgctattgattcaacaagtggacaggtgacactgattggcaagctggactacgaggcgacgcctgcctactcactagtcattcaggccgtggactctggaacaatccctctgaacagtacatgtactctgaacatagacatcttagatgagaacgataacacccccagttttccaaaatccacgctctttgtggacgtcctggaaaacatgcgaattggagaattggtgtcttctgtgacagccaccgactctgacagtggagataatgccgatctctattacagtattaccggcaccaataaccatggcaccttcagtataagtccaaataccgggtccatctttctggctaaaaaacttgactttgaaacacagagcctatacaagttgaacattaccgcaaaggaccaaggccggccgcccaggtcatccacaatgtccgtggtcatccatgttcgcgatttcaacgacaaccctccttctttcccaccgggggacatttttaagagtattgtggagaacattcctatcggaacttccgttattagcgtaactgcccacgaccccgacgctgatataaatggccagttgtcttacaccatcatacagcaaatgcctcgggggaatcacttcaccatcgatgaggtgaaaggcacaatctacaccaatgctgagatcgatcgggagttcgccaatcttttcgaactgaccgttaaggcaaatgaccaggctgttcctatcgagaccaggaggtatgcattgaaaaatgtaaccatcctcgtgacagatctaaatgacaacgtccccatgttcatctcacagaatgcacttgccgctgatccctccgctgtgatcggctcagtgctgacaaccattatggcggctgatccagacgagggcgcaaacggggaaattgaatatgagatcatcaatggcgataccgacacttttattgtcgatcgctattctggagacctgagggtggcgtccgcactggtcccatcccagttaatctacaatttgatcgtgtctgctaccgatctcggaccagagcgtagaaaaagcaccaccgaactgaccatcatattgcagggactggacggtccagtttttacccagcccaaatacattacgattctgaaagaaggagagcccatcggaacgaacgtgatcagtattgaagcggcttctccacgggggagcgaggccccagtggagtattacatagtctccgttcgttgtgaagagaagactgtggggcgcctgtttacaatcggccgacatacaggtattattcaaactgccgcaatcctagaccgcgagcaaggcgcgtgtctgtacctcgtggatgtttatgccatcgaaaagtctacagccttcccaagaacgcaacgggccgaagtggagataaccctgcaggacataaatgacaacccgcccgtcttccccacggacatgcttgacctgacagtagaagagaacattggcgatgggagtaaaatcatgcaactaacagctatggacgctgacgagggcgcaaacgccttggtcacctatacaatcatctcaggagcagatgactcatttaggatcgaccccgagtcaggtgacctgatcgcgacccgcaggttggatcgcgagaggcggagcaagtacagtctcctggtccgggcggatgacggccttcagtcatccgatatgagaataaatattactgtgagtgatgtaaacgaccacacacctaaattcagccggcctgtttacagcttcgacatacctgaggacacaatccccgggtcattagtcgcagctattctggcaactgacgacgactctggagtcaacggagaaatcacctacatagtgaacgaggacgatgaggacggaatcttcttcctcaaccctattacaggcgtctttaaccttactcgcctcctcgactatgaagtccaacagtactacatccttactgtcagagcggaggatgggggaggccagttcactaccattcgtgtctattttaacatattggacgtgaatgacaaccccccaattttctcacttaacagctattctactagcctgatggaaaatctccctgtcggttcaactgtgctggtattcaacgtgaccgatgccgatgatggcatcaatagtcagctcacatactcaatcgcttcaggggactcgctcggacagtttacggtggataagaatggagtgttgaaagtgctcaaagcactcgaccgagaatctcaaagcttttataacctcgtagttcaggtacacgaccttccacaaattcccgcatccaggtttacatctacagcccaggtgtcaatcatcctgttggacgtgaatgacaaccctccaacatttctttctcctaagctaacatacattcccgaaaatacgcctatcgatacagttgtctttaaagctcaagccacagatccagacagcggaccgaactcttacatcgaatatactctgctgaatcctctagggaataaattctccattggcacgatcgatggtgaagtccgtttgacgggggaactggatcgtgaggaagtcagcaactatacactgaccgtagttgccaccgacaaaggacagccctcattatcttcaagcactgaagttgttgtaatggtgctggatatcaatgacaacaatcctatctttgctcaggcactgtacaaggtggagatcaatgagaacacattgaccggcaccgatatcatacaggtgtttgccgctgacggcgatgaagggaccaacggtcaggtgcggtacggcattgtgaacgggaacacaaaccaggagtttaggattgacagtgtgacaggtgccattacggttgccaagccactggacagagagaaaaccccaacataccacttgacagtgcaggcgactgatagaggctcaaccccacgcacggacacctccactgttagcatcgttctgctggacatcaatgactttgtaccggtgtttgagctctcaccatatagcgtgaacgtgcccgaaaatcttgggactctacctaggacaatcctgcaggtggtggctagggatgatgatagaggatctaattcaaagctctcctacgtgctgttcggcggcaacgaggataatgcctttacgctgtctgcatccggagagctgggtgtgacccagagcctggacagggagactaaagagcggttcgtgcttatgattacagcgacagacagcggcagcccggcccttaccggcaccggcaccattaacgtaatagtcgacgatgttaacgacaacgtcccaacattcgcatcgaaggcgtactttacaacaattcccgaggacgcccccacgggaaccgacgttctactggtgaacgccagcgacgccgatgcatctaagaacgccgtcatcaggatcatcggaggaaacagtcaattcacgattaatcctagcactgggcagatcatcacttccgcgctgctggatagagaaacaaaggataactataccttggtggtcgtatgttcagacgccggctctccggagcccctcagttcctcaacaagtgtcctggttaccgtcacagacgtcaacgacaatcctcctagatttcagcaccatccatacgtaactcacataccttcaccaacactgcccggatcctttgtgtttgccgtcactgtaacggatgcagacattggccccaatagtgaactgcactactccctctccgggcggaattcagagaaatttcatatagacccgctgagaggagctattatggcggctgggccgctgaatggtgcttcggaggtaaccttctccgtgcatgtaaaggacggtggaagttttccgaagacggattccaccacagtgaccgtgcgattcgtgaataaggcagacttccctaaagtgagggctaaagagcagacattcatgtttccagagaaccagccggtcagctctctggtcacaaccattaccggcagctctctgcgaggtgaacccatgtcgtactatatcgcttccggcaacctgggtaatacttttcaaattgatcagttaacaggccaggtctccatttctcaacctctggatttcgagaagattcagaaatatgtggtatggatcgaagcaagagatggaggcttccctcccttcagctcatacgaaaagcttgacataacggtgctggacgtaaatgacaacgcccccatttttaaggaagaccccttcattagtgaaattctcgaaaacctttcccctaggaagatcctgaccgtttctgcaatggacaaagactctgggccaaacgggcagctcgactacgagatagtgaacggcaatatggagaactctttctccatcaatcatgccactggagagatccgcagcgttcggcctctggacagagagaaagtgtctcactatgtcctgaccataaaaagctctgataaaggtagtccttcccagagcaccagtgtgaaagttatgatcaatattttagatgagaacgacaatgctccacgcttttctcaaatcttttctgcgcacgtgccagagaattcccctcttggctatactgtcacccgggtcacgaccagcgacgaggatatcggcattaacgcaattagcaggtactctatcatggatgccagccttccatttaccatcaacccatccaccggcgacatcgtgatatctagaccattaaacagagaggatacggaccgttacagaattcgggtttctgctcatgacagcggctggaccgtttcaaccgacgtaacgatatttgtgacagatattaacgataacgcgccgcggttcagtcgcacttcatactatctagattgcccggagttaaccgagatcggctccaaggtgactcaggtatttgccacagaccctgatgagggcagtaacggccaggttttttatttcatcaagagccagagtgagtacttcagaattaacgcaaccactggagagatcttcaataaacagattctcaaatatcaaaatgtcactggcttctccaatgtaaatatcaacaggcatagttttattgtaactagctctgacagaggaaaaccaagtctaatttctgagacaacggttaccatcaacatcgtggatagcaacgacaacgccccacaatttctgaagtcaaaatactttacacctgtaaccaaaaacgtgaaagtgggcaccaaactgatccgggttacagctattgatgataaggacttcggcctcaactcagaggtcgagtactttatctctaacgataatcacttggggaaattcaagctagacaacgacactgggtggatttcagtagccagctctctgatctctgacctgaatcagaactttttcatcaccgtgaccgccaaggacaaaggaaatcctcctctgtcttcacaggctactgtccatatcacagtcactgaggagaattatcacacacccgaatttagccaaagccatatgtccgcaactattccagagtcacacagcattggatccatagttagaacagtttcagccagagatcgggacgccgctatgaatggtctcatcaaatacagcatctcttctggcaacgaggaaggcattttcgccataaactcctccacaggaattctcactctcgcaaaagccctggactatgaactgtgccagaagcatgagatgaccatttctgccatagatggtggttgggtagctcgcaccggctactgcagcgtgacagtaaatgtgatcgacgtaaatgataattcccctgtgttcttgagcgacgactacttccctactgtgcttgagaacgcccccagtggtactaccgtgattcacttgaatgcaacagacgccgattcgggaaccaacgcagtgatcgcttacacagtacagtcatccgacagcgacttattcgtcattgaccccaacacgggcgtgatcacgacccaaggcttcctagattttgagacaaagcagtcttaccacttgacggtaaaggcgtttaatgttccagacgaagaacgatgttctttcgctactgtcaacatccagcttaagggaaccaacgagtacgttccccgctttgttagtaagctttactactttgagattagtgaggcggcacccaaggggaccattgtcggggaggttttcgcatctgacagagatttggggaccgatggcgaagtgcactatctgatattcggtaattcacgcaagaagggatttcagattaacaagaaaacaggccagatttacgtcagcgggattctcgacagagagaaagaggaaagagtgtctctgaaagtcctcgccaaaaacttcggatccatccggggcgccgacatcgatgaggtgacagttaatgtgactgtcctcgacgctaatgacccacctatatttacactgaacatatacagcgtgcagatatcagagggtgtgcctataggcactcatgtgacatttgtgtccgccttcgattccgatagtattccctcttggagtagatttagctactttatcggaagtgggaacgaaaacggagccttcagcattaacccccagactggccagatcactgtcactgccgagctcgatcgtgagactcttccaatctataatctgagcgtcctggctgtggactccggaaccccctccgcaacaggcagcgcaagccttctcgtgactttagaggacataaacgataatggcccaatgttaaccgtgtcagaaggagaggttatggaaaacaaacgtcccggcacactcgtgatgactctgcagtccaccgaccccgaccttcccccgaaccaagggccgtttacatactaccttctttccacagggcccgccacaagctattttagcttgtcaactgccggcgtgctgtcaacaaccagagagattgatcgagagcagattgcagacttttatctatctgtggtgaccaaggatagtggcgtcccgcaaatgagctccaccggtactgtgcatattaccgttatagatcagaatgataatccctcccagtcgaggactgttgaaattttcgttaactattatggaaatctgtttcctggtggcattctgggctctgttaaaccgcaggatcctgacgtgttagactcattccactgttctcttacatcaggggtaacatccctgtttagtattccaggcggcacctgcgatctgaacagccaaccaagaagtacagacggaaccttcgatctcactgtccttagcaatgatggtgtccacagcaccgtgacttcgaatatcagggttttctttgcaggattcagtaatgcaacagtggataactcaatccttttgagactgggcgtgcctaccgttaaggattttttgacaaaccactacttacatttcctccgaattgccagttcacagctgacaggccttggcacagcagtacagctatacagtgcatatgaggagaacaatcgcacctttctgctggccgctgtaaagaggaaccacaatcagtatgtcaacccatccggcgtggccacattctttgagagcatcaaagaaatcctgctccgacaaagcggtgtaaaggtcgaaagcgtcgatcatgacagctgtgtccatgggccatgccaaaatgggggctcctgccttcgcaggctcgccgtgtctagtgtcttaaaatcacgggagagtctgcctgtgattatagtcgctaacgagcccttacagcccttcctttgcaagtgtctgcctggctatgcagggtcttggtgcgagattgatatagatgaatgtctgccttcaccctgccactctggagggacgtgtcacaatctagttgggggtttcagctgtagttgtcctgacgggtttacaggcagggcctgcgaacgcgacattaatgagtgtctccagtcgccgtgcaagaatggagcaatctgtcagaacttccccggatctttcaactgcgtttgcaaaaccggatatacgggaaagatgtgcgagagctctgtcaattattgcgaatgtaatccctgttttaacggaggctcctgtcagtcaggcgtcgactcctactactgccattgcccctttggagtgttcggcaagcattgcgagcttaattcatacggttttgaagagctctcttacatggaatttccatccctggatcccaataacaactatatctacgtgaagtttgctacgatcaaatcccatgcccttttgctgtataactacgacaatcaaacaggggatagagccgagtttcttgccctagagatcgccgaggaacgattgcgtttctcctacaatctgggttcgggtacctataagttaacaactatgaaaaaagtgagtgatggccacttccatacagtcatcgcccgacgcgctggcatggcggcctccttaaccgtggattcctgttccgagaatcaggaacccggatactgtaccgtgtccaatgtggctgtaagtgatgactggactctcgatgtccaaccaaacagggttaccgtcgggggtataaggtcgctggaacctatactccagagaaggggccatgtcgagagccatgacttcgtagggtgcatcatggagtttgccgttaatggcaggcccctggaaccttcacaagcattagccgcccaggggatcttggaccagtgtcctaggctggagggggcgtgtactaggagtccctgccagcatggtggaacgtgcatggactattggtcctggcagcaatgccactgtaaagaagggcttaccggtaaatattgcgaaaaaagtgtcacacccgatacagcactgtcgttggagggtaaaggaagactggattaccatatgagccaaaacgagaagagagaatatttgctacggcagagcctgcgcggggctatgctggagcccttcggcgttaattcactcgaggtgaagttccgcaccaggtcagagaacggagtgctcatccacatacaggagtcctcaaattacactactgtgaagattaaaaatggaaaagtttactttactagcgatgccgggattgccggaaaggtggaacgtaatatcccggaagtctatgttgcagacgggcattggcacacgttccttattgggaagaatggaactgccactgtgctgtcagtcgacagaatctacaatcgggacataattcaccctacacaagacttcgggggtctagatgtgctcaccatctcgcttggcggcatcccacccaaccaagcacatcgggacgctcaaaccgcaggctttgatgggtgcatcgcttccatgtggtacggcggcgagagtctaccttttagcggtaaacactcgctggcaagtatttctaagacggacccatctgtgaagataggttgtcggggccccaacatttgcgctagcaatccatgctggggtgatctgctctgtataaatcagtggtatgcctaccggtgtgttccccctggggactgcgcgtcacacccatgtcagaatgggggctcgtgcgagcctgggctgcacagtggtttcacttgttcttgcccggactcacacacaggaaggacatgcgaaatggtcgtcgcttgcctgggtgtgttatgccctcaggggaaggtgtgtaaggccggtagccccgcgggacacgtctgtgtgctctcccagggacccgaagagatttctctgccgttgtgggctgtccccgcaatagttggctcttgtgccaccgtcctcgccttgcttgtcctctccctgattctgtgcaaccagtgcagaggtaagaaggcaaaaaatcccaaggaggagaaaaagcctaaggaaaagaagaaaaaaggttctgagaatgtggcctttgacgatccagacaatatacccccatacggcgacgacatgacagttcgaaagcagcccgaagggaatcccaagcccgacataatcgaacgcgaaaacccttatctgatctacgacgagacagacatcccgcacaactccgaaaccattccgtcagcacctttagcgagccctgagcaggaaatcgaacattacgatatcgataacgctagttcaatcgccccgagtgacgctgatataatccagcactacaagcagtttagatctcacactcccaagttttctatccagcggcacagccctctggggtttgcgcgccagtccccaatgcccctaggggcaagctctctgacgtatcagccctcatacgggcagggtctgcgcacctcttccctctctcatagtgcctgcccgactccaaacccgctctcgaggcactcacctgccccctttagcaaaagtagtacgttctatcgaaacagccctgctcgggaactccatcttcccatcagggatggcaacacgcttgagatgcacggcgatacatgtcagcctggaattttcaactatgccactcgtctcggccgaagaagtaaatcccctcaagctatggccagccatgggagccggccgggtagcagattgaagcagcccataggacaaatccctctcgagagctcccctcctgtgggcctttctatagaggaggtggaacgcctcaataccccaagacctcgcaatccctccatttgttctgccgatcacggccgatcaagctccgaagaagattgtcggcgtccactcagcagaactaggaatcctgctgatggtatccccgcacctgagagctcctccgattcggattctcatgagtcatttacctgctcggagatggaatatgacagagagaaaccaatggtatacacctctcgaatgccaaaactaagtcaagtgaatgaaagcgatgcggacgacgaggacaattatggagcgcggctcaaacctaggcgatatcatggtaggagggctgagggaggccctgttggaacgcaggccgccgcgcccggcaccgctgacaacactttacctatgaagttaggccagcaggccggaactttcaattgggacaatctactcaactggggacccggatttggtcactacgtggacgtgtttaaggacctggcgagccttccagaaaaagccgccgccaacgaggaagggaaggcgggcaccaccaagccggtcccaaaagatggcgaagctgaacagtacgtttag

SEQ ID NO: 215822 - DNA, 9668 bp, Artificial Sequence
  derived and/or modified sequence
atggtcaccacagtagttgccgtgggcgacacgttggctcagccgctggctgctgcagaggtttttatcgtcgagatcaccttgcaagatattaatgacaaccctcccgtgtttcccaccgatatgctggaccttacagtggaagaaaatattggcgatggctccaagatcatgcagctcaccgccatggatgccgacgaaggggctaatgcccttgtgacctataccataatttcgggcgcagatgacagtttcagaatcgaccctgaatccggagatctgattgccaccagaaggcttgacagagagagacggagcaagtacagtttattggtgcgagccgatgatggactgcaatcaagcgacatgcgtataaatatcacagtttccgatgtaaacgatcacacaccaaagttttcacgacctgtgtactcttttgatatccccgaggacaccatacccggtagtctggtggccgctattctggctacagatgatgactctggggtaaatggtgagatcacatatattgtcaatgaggatgacgaagacggaatcttctttctcaaccccatcaccggcgtcttcaatttgacccgattgctggactatgaggtccagcaatattacatcctcacagtaagagctgaggatggaggtggccagttcaccaccattagagtctattttaatattctagatgttaacgacaacccccctatcttcagcctgaattcttactccacgtctctgatggagaatcttcctgtggggagcactgtgttggtcttcaacgtcactgacgccgatgacggtatcaacagccagctgacatacagtatagcctccggcgatagtctggggcagttcaccgtggataagaacggcgtactaaaagttctcaaagcacttgatagagagtcacagagcttttacaacttggtggttcaggtccatgacttgccacagatccccgcttcccggttcacatcaactgcccaggtgtcaatcatccttctggacgtgaacgacaaccctccaactttcctgagccccaagctgacctacattccagaaaacacacccattgacaccgtcgtgttcaaggcccaggctaccgatcccgatagtggacctaatagctacatcgaatatactctcctgaatcctcttggaaataagttcagcataggtacaatcgacggagaggtcaggctcaccggtgaactagatcgggaggaggtgtctaattacaccctgaccgttgtcgcaacggacaaaggtcagcccagcttgagctcatccacggaagttgtagtcatggtgttggacatcaatgacaacaacccaatattcgcgcaggccttatataaagtcgagatcaatgaaaacactcttaccggaaccgatatcatccaggtctttgctgctgatggtgacgagggcaccaatgggcaagtacgctatggcatcgtgaacggaaatacaaaccaggaattccgtatcgattccgtgacgggtgccataaccgtggccaagcccctggaccgagaaaagacgccaacataccaccttaccgtgcaggccactgataggggaagcacacccagaaccgatacttccactgtgagcattgtacttcttgatattaacgatttcgtaccagtgtttgaactgagtccatactccgtcaatgtccccgagaatttgggaactcttccacggacaatcctgcaggttgtggctcgcgatgatgaccgaggaagcaatagcaagctttcctacgtgctctttggtggcaatgaggacaacgcttttacgttgagtgccagcggagagcttggtgtgacccagtcgttggatagagagactaaggagagattcgtgctcatgatcaccgccactgattccgggagccctgccctaactgggacaggaaccatcaacgtgattgttgacgacgttaacgataacgtgccgacattcgcttccaaagcatatttcactactattccagaagacgccccaaccggaaccgatgtcctgttggtgaatgctagtgacgccgatgccagcaagaacgctgtcattcgtatcatcggcggaaatagtcagttcaccattaacccgtctaccggacagatcattaccagcgccttactggaccgcgaaacaaaggacaactatacactggttgttgtgtgctctgacgccggaagccccgagcctttaagtagttccacatctgtgctagtgaccgtcactgacgtcaatgacaatcctcccaggttccagcaccatccatacgtcacccacatcccatctccaactcttcctgggtcatttgtgttcgcagtcaccgtcactgatgcagacatcggccctaactctgagctgcattattccttgagcggacggaacagcgaaaagtttcacattgacccacttagaggcgctatcatggccgcaggacccctcaacggggcaagcgaagtcactttctcggtgcacgtgaaagacgggggttcttttccgaaaacagactctaccacagttaccgtgcggttcgtaaacaaagccgactttcctaaggtgagggctaaagaacagactttcatgttccccgaaaaccagccagtctccagcttggtcactacaattacgggcagctctcttcgcggagagcccatgtcctactatatcgctagcgggaatttaggaaataccttccaaatagaccaacttaccggacaggtgagtatttcacaacccctggactttgaaaaaattcagaagtacgtggtgtggatagaggcacgagatggaggattccctcctttcagctcatatgaaaagcttgacattacagtcctggacgtgaacgacaatgctccaatttttaaagaggacccttttatctctgagatcttggagaacctaagtcccagaaagattttgacagttagtgcgatggacaaagattccggacccaacggtcagctagattacgagatagtcaatgggaacatggaaaattccttcagcatcaatcacgctacaggtgaaattaggtcagtacggccactcgaccgagaaaaggtgagccactatgtcctaactatcaagagctcagataaaggttctcctagccagtctacatctgtgaaagtgatgatcaacatactcgacgagaacgacaatgcaccccgattctcgcagatcttttccgcgcatgtacctgagaactcaccgttggggtatactgttacccgagtgacaacctcagacgaggatatcgggattaatgccatctcgcgctactccattatggacgcaagtctgccgtttacgattaacccgtccaccggggacatcgttatctcacggcctctcaaccgcgaagatacagataggtataggattagagtctcagcccacgacagtggttggacagtctcaacagacgtcacaatctttgtaacagacatcaacgataacgctcctagattttcccgcacaagctactacctggattgccctgaactaacagaaataggaagcaaagtgacccaggtctttgcgacagaccctgacgaaggttccaatggccaggtattctattttatcaagtcacaaagtgaatatttcagaattaatgctactacgggagaaattttcaataagcagatcctcaaataccagaacgttaccggtttttcaaacgttaatataaatcgtcatagctttatcgtcaccagctcagatcggggtaaacccagcctcatttcagagaccactgtcacaatcaacatcgttgactctaatgataacgccccacagttcctaaagtctaaatacttcacacctgtaaccaagaacgtgaaggtggggactaaactgattagggtgacggctattgatgataaagactttggtctcaactccgaagtggagtatttcatatcaaatgacaaccacctggggaagtttaagctggacaacgacactggttggataagcgtcgcttcttccctcatctccgatctgaatcagaacttttttatcacagtgaccgccaaagacaaaggcaatcccccactgtcttctcaggctacagtgcatatcacagtcaccgaagaaaactaccacacacccgagttctcacagtcacatatgtcagctacaattccagagtctcattcaatcggcagtattgtccgaaccgtgagtgcccgagatagagacgcagccatgaatggccttatcaagtactcaatctcctctgggaatgaagaggggatattcgcgattaacagctccaccggaatcctgactctggcaaaagcattagattatgaactctgccaaaagcacgagatgacaatctcagcaattgatggagggtgggttgccagaacaggctactgctcggtgactgtgaatgttatagacgtaaatgataattcgcctgtttttctctctgacgactacttccccactgtgctcgagaacgccccatctggcacgactgttatccatctgaacgcaaccgatgctgacagcggcactaatgctgtgatcgcatacacagtgcagtctagcgatagcgacctgttcgttatcgacccgaatactggggtcataacaacccaggggtttctggacttcgaaactaagcaatcataccacctgaccgtgaaagccttcaacgttcccgatgaggagcggtgtagcttcgctaccgttaatatccaacttaaaggcacaaacgagtacgtccccaggtttgtgagtaaattgtactatttcgagattagcgaagcagctccaaagggaactattgtaggtgaggtgttcgcatcagacagagacttgggaactgacggggaagtgcactaccttatcttcggtaactccaggaaaaaaggattccagattaacaagaaaactggacagatttacgtctccggtattctcgatagggaaaaggaagagcgagtgtcactgaaagttttggctaaaaatttcggaagtatccgaggcgcagacatcgacgaagtgactgtaaatgtcacagtgctggacgcaaacgatcctcctatctttacattgaatatctatagcgtacagattagtgagggcgttccgatcggcacgcacgttacgttcgtgtcagccttcgactctgatagtatccccagttggtcaaggttttcgtactttattggctctggtaacgaaaacggagccttcagcattaatcctcagactggccagataacagttaccgctgagctcgacagggagacactgcctatttataacttatcagtgttggctgtcgactctggaactccctccgcgaccggctccgcctccttattagttacccttgaagacattaacgacaacggaccaatgctgaccgttagcgagggcgaagtgatggagaacaagcgcccaggcacactggtcatgactctgcagtctactgatcctgatctccctccgaatcaggggccattcacctactatttgctttctacgggccctgctacatcttatttctctctgtcaacggcaggtgtgttaagcaccactcgggagatcgatagggaacagatcgctgacttttacctttcggtggttaccaaggattcgggtgtcccccagatgtcttccactggcactgtacacataactgtaatcgaccagaacgataatccaagccagagcagaactgtagaaatatttgtgaattactatggcaatcttttcccaggaggcatcctgggcagcgtcaaacctcaggatcctgacgtcttggacagtttccactgcagcttgaccagcggagttacgtctctcttttcaattccgggaggaacttgtgacctgaactctcaacccagaagcaccgatggcacttttgatctgacagtgctgtcaaacgacggagtccatagcacggtgacttccaatatccgggtgtttttcgccggattcagcaatgcgacagtggacaattccatcctcctacgcctgggcgtccctactgtcaaagattttttgacgaatcattatctgcatttcctaaggatcgcttcctctcaactgacaggccttggcaccgccgtgcagctctattcagcctacgaagaaaataacagaacattcctgcttgcagccgtaaagcgcaatcataatcagtatgttaatccttctggtgtggcaacattcttcgaatctattaaagagatcctcttgcgacagagcggcgtcaaggtagagagcgttgaccacgactcctgcgtgcatggaccctgtcagaacggagggagctgcctcaggagactggcagtttcttccgtactgaagtcaagagagagcctgcccgtcattatcgtcgctaacgaacctctccagccctttctctgcaaatgtctacctggctatgccggatcttggtgcgagatcgacattgacgaatgcctgccgtctccatgtcattcagggggtacttgccataatcttgttggcggtttttcttgctcctgcccagacggctttactggtcgagcttgcgaacgcgatatcaacgagtgtctgcagtctccttgcaagaacggtgccatctgtcagaatttccccggaagcttcaattgcgtgtgcaaaacaggttacaccggggtgttcggcaagcattgcgagctcaattcttacggtttcgaggaactgtcgtatatggagttcccatctcttgatcctaacaacaattacatctacgttaagtttgccaccattaaatcacatgcgctactgctgtacaactatgacaaccagactggtgaccgggctgagttcctcgcactcgagatcgcggaggagaggctgcgcttttcctataaccttgggtcaggtacttataagctgaccaccatgaagaaagtgagcgatggacacttccacaccgtaattgctcggagggctggaatggcagccagtttgacagtggatagctgcagcgaaaatcaggaaccaggctactgcactgtcagtaacgtggctgtcagcgatgattggaccttggatgtgcagcccaacagggtgaccgtggggggaatcagaagcctagaacccatactgcaacgccgaggccacgttgaaagtcacgatttcgtcggctgtattatggaatttgctgtgaacgggagacctttggagccaagccaggcacttgcagcccaggggatactggaccagtatggggatttcattagttattgctttaaagaaaagaaatgtaagaaggtctgcttcactgtcacaccagatacagccctgtcactggaaggcaagggacggctggattaccacatgtcccagaatgagaagcgagagtaccttctgcgacagagcctccgcggtgccatgctcgagccattcggggtgaactctctagaagtcaagttccgaacaaggagtgaaaatggcgtcttgatccatatccaggagtcttcaaattacacaacagtgaaaatcaaaaacggtaaggtgtactttacgtccgacgccggaattgctggcaaagtggagagaaatatccccgaggtctacgtggccgacggtcactggcatacatttttgatcggcaagaacgggaccgctactgtcttgagcgttgaccggatatacaaccgtgatattatccatcccacgcaggattttggagggcttgatgtccttaccatttctctggggggtatcccacccaatcaggctcaccgcgatgcccagaccgcaggcttcgatggctgcatcgcatcaatgtggtacggtggtgagagcttgcccttctcaggcaagcattccctggcatccataagcaagacggacccatccgtcaagattggctgtcggggtccgaacatctgtgcttccaatccatgctggggtgatctcctttgtatcaatcagtggtatgcctaccggtgcgtgccacccggtgactgtgcctcccacccgtgtcagaacggaggatcctgcgagcccggtctgcattcgggatttacatgcagctgtccagactcccacactggtcgaacctgtgaaatggtggtagcctgtctgggggtcctgtgtccccaggggaaggtgtgcaaggcaggatcacccgctggccatgtctgcgtcttgtcccagggacctgaagagatctctcttcccctgtgggccgtgccggcaattgttggaagctgcgcaactgttctcgccctcctcgtactgtctctgattctctgcaaccagtgccgaggtaagaaggccaaaaaccctaaggaagagaagaagccaaaggaaaaaaagaaaaagggcagcgaaaatgttgcatttgatgatcccgataacatcccgccatatggcgacgatatgaccgtccgtaagcaaccagagggcaatcctaagcccgatatcatagagagagagaatccatatttaatttacgatgagaccgacattcctcacaactcagagaccataccgagcgctcctcttgcctcccctgagcaagaaatcgaacattatgatatcgataatgcctccagcatagccccttcggacgccgatattattcaacactacaaacagtttcgaagccacacacctaaattcagcatccaacggcacagccccctcggattcgcccgtcagtcgccgatgccgcttggcgctagttcactcacataccaaccctcgtacgggcagggcctgcgcactagtagcttgagtcatagcgcctgtcccaccccaaatccacttagcagacacagtcctgcgccatttagtaagagttcaaccttctaccgtaattcacccgctagggagttgcacctgcctatccgagacggaaacacgttggaaatgcatggagatacatgtcagcctgggatcttcaactatgccacacggctgggcagaagaagcaaaagtccacaggccatggcgagtcacggaagccgcccaggctctaggctgaaacagccaattggccaaattcctctggaatcaagtcctccagttggactgtctattgaagaggtggaacgactcaacactccacggcctcgaaatcctagcatctgcagcgcagatcatgggagatcatcttctgaggaggactgtcggagaccactgtcccggacacgcaacccagccgatggcatcccagcgcctgaaagtagcagtgacagtgattcacatgaatccttcacttgctcagagatggagtatgatcgagaaaagccaatggtctacacctccagaatgcccaaactgtcccaggtaaatgagagtgacgcggacgacgaagacaattatggcgctcgccttaagcctcgacgttatcacggcagacgggctgagggagggcctgtaggcacacaggccgctgccccaggtactgcagacaatactctacctatgaaattgggccagcaggccggtacctttaactgggataatttactgaactggggccctggctttggacattatgtggacgttttcaaggatctcgcgtctctgccagaaaaagccgcagccaatgaggaggggaaggcaggaaccactaagcccgtccctaaagatggggaagcagagcagtacgtcta

SEQ ID NO: 215823 - DNA, 14946 bp, Artificial Sequence
  derived and/or modified sequence
atggacttagcccctgatagggccacgggacggccttggcttccactccatacgctaagcgtctcccagttgctgcgggtgttttggcttctcagtctgttacctggccaagcttgggttcacggcgctgaaccaagacaggtgttccaggttttggaggagcaacctccgggtacacttgttggcactatccagaccaggccaggcttcacgtacaggctctccgaaagtcacgcactgtttgctatcaactcgtccactggggctctgtacaccactagcacgatagacagggagagcctcccttcagacgtgatcaatctggtcgttttgagctctgctccaacataccccaccgaggtgcgggtgcttgtgagggatctgaacgacaatgcccctgtctttccagaccccagtattgtggtaacattcaaggaggatagttcgtccggacggcaggtgattcttgataccgctacagattctgacattggctccaacggggtggaccaccgaagctaccgcatcatacgaggaaacgaggctggaagatttaggctggatattacactgaacccctctggtgaaggcgcttttcttcatctggtgtctaagggcggactggaccgcgaggtcacgccccagtatcagctgcttgttgaagtcgaggataagggggagccgaagcggagggggtatctgcaggttaacgtaaccgtgcaggacattaacgacaacccgcctgtgtttggatcttcccactatcaggctggcgtgccggaagatgctgtcgtggggagctctgtactgcaagtggctgctgccgatgctgacgagggaacaaacgccgacattagataccggctgcaggatgagggaactccattccaaatggatcctgaaaccggcctgatcacggtgcgagagccccttgactttgaagcccgtagacagtattccctgactgtgcaggctatggatcgtggcgtgccctcccttactggccgagcagaggccctgattcagcttctggatgtgaatgacaatgatccagtcgtaaagttcaggtactttcccgctaccagccgatatgcaagtgtggacgaaaacgcgcaggtaggcacagtagtggctcttttgacagtaacggatgcggactcgcctgccgctaatggaaacatatctgtgcagatcctaggcggtaatgaacagcgtcatttcgaggtacaatcaagcaaagtgccaaatctctcccttatcaaggttgccagcgcactggaccgggaaagaatccctagttataacttgactgtgagcgtcagcgataattacggcgcaccccctggcgctgctgtccaggccagaagctcggttgcaagtctcgtgatattcgtgaacgatataaacgaccacccaccggtattctcacaacaggtgtacagggtcaatttgagcgaggaagcgccaccagggtcctatgtgtccggcatctcagccacggatggggactctggactgaacgctaacttgaggtattccatcgtctcgggtaatggtctcggatggtttcacataagtgagcactcagggttagtgactactggcagctcggggggactagaccgggaattggcatcccaaatcgtcttaaacattagcgccagagatcagggagtgcatccaaaagtgagctacgcacagcttgtagtaacattattggacgtgaatgatgagaaacccgtattttctcagccggagggctatgatgttagcgtcgttgaaaacgcccctaccggcactgagttacttatgctgcgcgctacagatggagacttgggcgacaacggcacggtgcggtttagtctgcaggaagccgagactgaccggaggtcatttagactggaccccgtgagcggtcgactttctaccatttccagtctggaccgcgaagaacaggcgttctatagcctcctcgtgcttgcaaccgacctggggtctccaccacagtcatctatggccagaattaatgtgagcctgctggatattaacgacaatagccctgtcttctaccccgtgcagtactttgctcacataaaagaaaatgaacctggcggtagctacatcactactgttagtgccacagacccggacctggggacaaatggtacagtgaaatactccatctcagccggtgatcgatcgagattccaggtcaatgcccagagtggcgtgattagcacacgcatggccctcgatagggaagaaaaaacagcctaccagctgcagatcgtcgcaaccgatggtggaaaccttcagtcccccaaccaggccattgtcactatcaccgtccttgacacacaggacaacccacctgtattttcgcaggtagcctattcattcgttgtgttcgagaacgtagctctggggtaccacgtagggagtgtaagtgcaagcacgatggacctgaacagcaacatcagctacttgattaccacgggagaccagaaaggcatgttcgcgattaaccaggtgactggccagctcactaccgccaacgtgattgaccgggaggaacagagcttctaccaactcaaagtggtggcttccgggggaacagtcactggggatacaatggtcaatatcacagttaaggacctgaatgacaattctcctcatttcctgcaggccattgagtccgtgaacgtagtggagaactggcaggccggacatagcatcttccaggcgaaggcagtggatcccgacgagggggtgaacggaatggtgctctattctctcaaacagaatccaaagaatctcttcgctatcaacgagaagaacggaacaatatccctgctgggtccactcgacgtgcacgcaggctcatatcagatcgaaatccttgctagcgacatgggggtgcctcagttaagtagcagtgtgatactgactgtgtacgtccatgatgtaaacgacaactccccagtgtttgatcagctgtcatatgaggtcaccttatccgagagcgaaccagtgaattcaaggttcttcaaagtccaagcgtccgacaaggactctggtgcgaatggcgagatcgcttacaccatagccgaggggaacaccggcgatgcattcggcatctttcctgatggacaactgtatattaagagtgagcttgatcgtgaacttcaggacagatatgttctcatggtcgtagcttccgaccgtgctgtagaaccactgagcgccactgtaaatgtgaccgtcatcctcgaggatgtgaacgacaaccggccactcttcaacagcacaaactatactttctactttgaagaggaacaacgcgcagggtccttcgtcgggaaggtatcagccgttgataaggactttggacccaacggcgaagtgagatattcttttgagatggttcaaccagacttcgagctgcatgcaatttccggcgaaatcactaatacgcatcaatttgacagagaatctctcatgcggagaagagggacagcggtgttctcctttaccgtgatcgcaactgaccagggcatcccacagcctctgaaggaccaggccaccgtgcacgtttatatgaaagatattaacgataacgcccctaagttccttaaggatttctaccaggctaccatcagcgagagtgcagcaaatctgactcaggtactgcgggtctctgccagtgatgtggacgaaggtaacaacggcctcatacactattccatcataaaagggaacgaggaacgacagtttgcaatcgactctacgtctggtcaggttaccctgataggaaagttggattacgaggcgactcctgcttactccctcgtaatacaagccgtagattcaggaactatccctctgaatagtacatgcactctcaacatcgacattctagatgagaatgataacacgcccagctttcctaagtctacgctcttcgtggatgtgcttgagaacatgcggatcggcgaactggtttctagcgtgactgctactgactccgattctggagataacgctgacctctactactcaattaccggaactaataaccacgggacattctccatcagcccgaatactgggtctatctttctggctaaaaagttagatttcgagactcagagcctgtataaacttaatatcaccgcaaaggatcaaggcaggcctcctagaagttcaacaatgtcagtagtgattcatgttcgggacttcaacgacaaccccccatcctttccgccaggtgacatttttaagtctattgtggagaatatccccatcggcacctctgttatctcagttaccgctcatgacccggatgcagacattaatggccagctgtcctacactattatccagcagatgccccgtggcaaccactttaccatcgatgaggtcaaggggacaatctatacaaacgcggaaattgacagagaattcgctaacctgtttgagttaacagtcaaggcgaatgaccaggccgtccccattgagacccggaggtacgccctaaagaacgtaactattctggtaactgatttgaacgacaatgtcccaatgtttattagtcagaacgctctggcagctgatccctctgccgtcatcgggagcgtactcactacgatcatggcggcagaccctgatgagggtgcaaacggtgagatagaatatgaaatcatcaacggagatacagatacatttattgttgataggtacagcggcgatctccgcgtggcttctgccctcgtcccaagtcaactcatttacaatctcattgtgtccgccaccgatttgggtcctgaaagacgtaagagcaccacagagctaacgatcatcctccaaggactcgacgggcctgtcttcacccagcccaagtatatcactatcctaaaagaaggagagcctattggaacgaacgttatcagtatcgaggctgcttctcccagaggcagcgaagctcctgtggagtattacatcgtcagtgtgaggtgtgaagagaaaactgtgggccgtctgttcacaatcggtaggcatactggcattattcagactgccgcaattctcgaccgagaacaaggagcatgcctctacctcgtcgacgtgtatgcgatagagaagagtactgccttcccacggacccagcgagccgaggtggagatcaccttgcaagacattaatgataatcctcccgttttcccaacggacatgctcgacctgacagtggaggagaatattggcgatggaagtaagattatgcaacttacagcgatggacgctgatgagggcgctaacgctttggtgacatatactatcatatcaggggctgacgatagcttccgcatagatcctgagtctggagacctcatcgccacccggcgactggaccgggagcggcgatctaaatatagcttgctcgtgcgtgcggatgacggtctgcagtcctctgacatgaggatcaacattacagtctccgacgttaatgatcacacccccaagttttcacggccagtgtacagcttcgacattcccgaagacacgataccgggttccctggtcgcagccattctggccacggatgatgattctggtgtcaacggcgagattacctatatcgtgaacgaagatgacgaggatggaatatttttccttaaccctatcactggagtttttaacctgacccgccttcttgattatgaggtgcaacaatactatatcctgactgtgcgcgctgaagatggcggaggccagttcactacaatcagggtttactttaacatactcgacgtcaatgacaatcccccaattttttctctgaactcctactccacatcactgatggagaaccttcctgttggatcgaccgtgctggtgtttaacgtgactgatgctgacgacgggatcaatagccagttaacatatagcatcgcatccggcgacagcttgggccagtttaccgtggataagaatggcgtgctaaaggtgttaaaggctctggacagggagtcacagagcttctataatctggtcgtgcaagttcatgacctcccccagatccccgctagccggttcacatctacggcccaggtcagtattatcttgctcgacgtgaacgacaaccccccaacattcctatcccctaaactgacctacatccccgagaatactcctattgatacagtcgtgtttaaggctcaggctactgatccagactcagggcctaacagttacatagagtataccttattaaatccgctgggcaataaattctccatcggcacaatagacggcgaagtcagactgactggagaattggacagggaagaagtctccaattatacactcaccgtggtcgctacagacaagggccagccaagcctgtcatcatcaaccgaggtggtcgttatggttcttgatatcaacgataacaaccctatattcgcccaggcgttatacaaggtggaaattaatgagaacaccttaaccggaaccgatatcattcaggtctttgcagctgacggtgacgaaggaaccaatggacaagtgcgttatggaatagttaacgggaatactaaccaagagttcagaatcgatagtgtcactggggctatcacagttgcaaagcctttagatcgcgaaaaaaccccaacctaccatctgacggtgcaggccactgacaggggaagtacaccaaggaccgacacctccacagtgtcgatagttctcctggacattaacgactttgtgcctgtcttcgaactttccccatacagcgtaaatgtgcctgagaatttgggcacgctgcctagaactattctgcaggtggtggcaagggacgatgatcggggatccaactctaaattgtcctacgttcttttcggcggtaatgaggataatgccttcacgctctccgcctcaggcgagctcggcgtgacgcaatctctggacagagaaactaaagaacgatttgtattgatgatcacagccactgacagtgggagcccggcattgacaggtaccggcacgatcaacgtgattgtggatgatgtgaacgataatgtgcccacctttgccagcaaggcttacttcacgaccattcccgaagatgcaccaacggggaccgacgtcctcctcgtcaacgctagcgatgctgacgcaagtaagaacgccgtgattcggattatcggcggtaacagtcaattcactattaatccatctaccgggcagattatcacctcagcactgctcgaccgcgaaaccaaagacaactacaccctcgttgtcgtgtgcagtgacgccggtagccccgagcccctatcatccagcactagtgtgttggtgacagtcactgatgtcaatgacaacccaccacggttccaacaccatccttacgtgacccacatcccttcgccaacattaccgggttcattcgtctttgcggtcaccgtgaccgacgccgatattggtccaaactctgaattgcactactcactctctgggcgaaattcagagaagttccatatcgatcccctgcgtggtgcgattatggcagcgggtcccctcaacggggcatctgaggtgactttctccgtccacgtcaaagatgggggtagtttccctaaaacagactctacaacggtgaccgttcgctttgtcaataaggctgattttccaaaagtgcgggctaaggaacagactttcatgttccctgaaaaccagccggtgagctccctcgtgacaacaatcactgggtcgagccttagaggagagcccatgagctactacatcgcttcagggaacctaggaaacactttccagatcgaccagcttaccggacaggtttcaatatcccagccgcttgatttcgagaaaatccagaagtacgtagtgtggattgaggctcgcgacgggggattccccccattctcgagctatgaaaaactcgatattactgtgctagatgtgaatgataatgctcctatattcaaagaggacccctttatcagcgagatactggaaaatctgagtccaaggaagatcctcaccgtgtcagccatggataaagacagcggtcccaatgggcagctcgactacgagattgtgaacggaaacatggaaaacagctttagcattaaccatgctactggggagattcggagcgtgcggcctttggatcgggaaaaagtatctcactatgtgcttacaataaagagctcagataaagggtctcccagtcagtccactagtgtgaaggtcatgatcaacatcctcgacgagaatgataatgcgcctaggttttcccagattttttccgctcatgtgcccgagaatagcccgctgggttacactgtgacgcgggtgactacctccgacgaggacataggaatcaacgcgatttcccggtactctattatggacgctagccttccattcaccatcaatccatcgaccggggatatcgtaatcagcagacctctgaaccgtgaagatactgacagatatcggattagggtttcagctcatgacagcggctggaccgtgtctacggacgtgacaatcttcgtgacagatatcaacgataatgcccctcggttctctaggacatcctactatttggactgccccgaactgacggagatcggatccaaagtgacacaggtgtttgccaccgaccccgacgaggggtcgaacggccaggtgttttactttatcaagtcccagtcagagtacttcaggatcaatgctaccactggagagatttttaacaaacagattctaaagtaccagaacgtaaccggtttttctaatgtgaacatcaataggcactcttttatcgtgacttcctcggatagggggaagcctagcctgataagcgaaaccacagtgacaataaatatcgtggattctaatgataatgccccacagtttctcaagagcaagtactttactccagtgaccaaaaacgtgaaggtcggaaccaaacttattcgcgttaccgcaatcgacgataaagacttcgggttgaatagcgaggtggagtacttcatctcaaacgataaccatctaggaaagtttaagctggataatgacaccggatggataagcgtcgcctccagcctgatttcggatctaaaccaaaacttttttatcaccgtgacagcaaaggacaaggggaaccccccactctctagtcaggcaacggtgcacattaccgtcaccgaagaaaactatcacacccctgagttttcgcagagccacatgtccgctactatacccgaatcccattccatcggctctattgtcaggacggtgagcgccagagacagggacgcagctatgaacggcttaataaaatattcgatatccagtggcaatgaggagggaatattcgctatcaattcctccaccgggatcttaactttggccaaggcactggactacgagctgtgtcagaaacatgagatgactatctctgcgattgacggaggctgggtcgcacgaactgggtactgttcagtgaccgtcaatgtgattgacgttaacgacaattcccccgtgtttctgagcgatgattacttccctacagttctcgaaaatgctccatccgggaccacggtcatccatctgaatgccaccgatgccgacagcggaaccaacgctgtcattgcatacaccgtccagagttctgattctgatctgttcgtaattgatcccaacaccggcgtgatcactacccagggctttctggatttcgagaccaaacagagctatcaccttaccgttaaagccttcaacgtgccagacgaggaacgttgctcattcgcaacagtgaacattcagcttaagggtaccaacgaatacgtcccccgtttcgttagtaaactgtactattttgaaatctctgaagccgcaccgaagggcaccattgtcggcgaagttttcgctagcgaccgagaccttggtaccgacggcgaggttcactatctaatattcggcaactcacgtaaaaaggggtttcagatcaataagaaaacgggccagatctatgtttctggaatactcgatcgcgaaaaagaggaacgggtgtccttgaaggtcctggcaaagaactttgggtccatcagaggggcagatattgatgaggttactgttaacgttactgtgttggacgctaacgatccacctattttcacccttaacatttacagcgtgcagatttccgagggggttcccatcggaacccatgtgaccttcgtgagtgccttcgattccgattctatccccagctggagccgtttctcttacttcatcgggagtggcaatgaaaacggggcattttcaattaacccacaaaccggccagatcacggtgactgcggaactcgacagagaaacactgcccatctataatctgtctgtactcgccgtggactccggcaccccttcggcgaccggaagtgctagcctccttgtcacattggaggacattaatgataatggtccaatgctcaccgtctcagaaggcgaggtcatggagaataagcgacctggtacgctggtaatgactctccaaagtaccgaccccgacctaccacctaatcagggcccattcacatattacctgttatctacgggccctgcgacaagttacttttctttatctaccgcaggtgtccttagtacaactcgcgaaatagacagagagcagatcgcggacttctatctgagcgtggtaaccaaagattcaggggtgcctcagatgtcaagtacaggaacggtgcatatcaccgtaatagaccaaaatgacaatccttcacaaagcaggacagtggagatattcgtcaactactacggcaatctgtttcctgggggtattctcggaagtgttaaaccacaagatccggatgtactggactcctttcactgttccctgacatctggggttacaagcctgttctccatccctggtggtacctgcgatctgaacagccagccacggagcactgacggaacctttgacctcacagtcctgtccaacgatggggtgcacagcacggtaacttctaacattcgagtattcttcgccggattttcgaacgctacagtggataattccattctcctaagattgggcgtgccaaccgtgaaggattttctgactaaccactatctacatttccttcggatcgcttcctcacagctaacggggctggggacggcggtgcagctctacagcgcttatgaggagaataatagaacgtttcttctagcagccgtgaaaaggaatcataaccagtatgtcaatccttctggtgtcgcaaccttttttgaatccatcaaggagattctcctgcgacaatccggagtcaaagtcgaatcagtcgaccacgactcctgtgtgcacggaccctgccagaacggcggttcatgcctgaggcggcttgcagtgagcagtgtgctaaagagccgggagtccctccccgtgatcatcgtcgccaacgaacctctgcaaccttttctgtgcaagtgtctcccagggtacgccggatcatggtgcgaaatcgatatcgatgagtgcctgccctccccctgccatagtggagggacgtgccataacctggtcggaggctttagctgcagctgtccagatggtttcacaggacgcgcatgtgaacgcgacataaacgaatgtctacaatcaccctgtaagaacggcgctatttgtcagaactttcctgggtcatttaactgcgtctgcaagaccggctataccggaaagatgtgtgaatcctcagtcaattactgtgaatgtaacccatgtttcaatgggggatcatgtcagtcgggggtggattcctactattgtcattgccccttcggcgtttttggtaaacattgtgaactcaatagctatggctttgaggaactttcttatatggaatttccttcactcgatcccaataacaactatatctatgtcaagttcgctaccatcaaatcacacgccctcctgctctataattacgataaccagactggtgatcgggcagaatttcttgcgctggaaatagccgaagagcgattgagattctcgtacaacctgggcagtggaacatataaacttactacgatgaaaaaagtctcagatggccacttccacaccgtgatcgctaggcgtgctgggatggctgccagccttactgtggactcctgctccgagaaccaggagccaggttattgtaccgtctccaatgtcgcagtatccgacgactggactctggatgtgcagcccaaccgtgtgacagtcggaggaattcggagtctagagcctatactgcaacgcaggggtcacgtcgaaagccacgatttcgtgggatgtatcatggagtttgccgttaacggccgaccactggagccgtcacaagcgctagccgcacaggggatcctcgatcagtgccccaggctggaaggtgcctgtactcggagtccgtgtcagcatggtgggacctgcatggactactggagttggcagcagtgtcactgcaaggaaggactcactggcaaatattgcgagaaatctgttacccctgatacagctctctcgctggaggggaaggggagattggattatcatatgtcacaaaacgagaagcgagaatatctcttgcgtcagtctctgagaggcgctatgttggaaccttttggggtcaattctctggaagtcaagtttagaacacgcagcgagaatggggttctgattcacatacaggaaagttcaaattacacgaccgtgaaaattaagaacggaaaagtgtactttacatccgacgctgggatagctggtaaagtagagcgtaatattcctgaggtgtatgttgctgacgggcattggcataccttcctcatcggaaaaaacggcaccgccacggtgctttccgtcgaccggatctataatcgagatattattcaccctactcaggattttggaggtctggacgtactaacaattagcctgggcggtatacctcctaaccaggcccacagggacgcgcagaccgccggtttcgatgggtgtatcgccagcatgtggtacggcggtgaaagcctcccttttagcgggaagcacagccttgcttccatctcgaagactgatccttctgtgaagattgggtgtcgagggccaaatatttgcgctagtaacccctgttggggcgaccttctctgcatcaatcagtggtatgcctaccggtgtgtcccccctggggactgtgctagtcacccatgccagaatgggggatcctgcgaacccggtctgcattctggattcacctgctcatgccccgattcccacacagggaggacctgtgaaatggtggtggcttgcctgggtgttctctgccctcagggaaaagtctgtaaagcagggtctccggctgggcacgtgtgcgtgttgtcacaggggcctgaggagatctccttgcctttatgggcagttcccgcaatagtgggttcctgcgctactgtgttagctctgcttgtattgagcctcattctatgcaatcagtgccgagggaaaaaggccaagaatccaaaagaggagaagaagccaaaagaaaaaaagaagaagggatctgagaatgtggcgttcgacgaccccgacaacattcctccttacggtgacgatatgaccgtgagaaaacaaccggagggaaacccgaaacccgatatcatcgagcgtgagaatccatatctgatttatgacgagacagacataccgcataattctgaaacaatcccatccgctccattggccagtcctgagcaggagatagagcattatgacatcgataacgcaagttctatcgcgccatccgatgcagatatcattcagcattacaagcagttccgcagccatactcccaaattttcaattcagcgacattcccccctggggttcgcgagacagagtccgatgcctctcggggcatcatccttgacataccagcccagctatggccagggccttaggactagctcactgtcccactctgcctgtccgacacccaatcccctttcgcgccactcgccagctccgttctccaaaagctcaactttttaccgaaattctcccgctagagagttgcatctaccaattagagacggcaatactctcgaaatgcacggcgatacctgccagcctgggatctttaattatgccacaagactcgggaggcgttctaaatcccctcaggctatggcgagccatggatcccgacccggtagtcgactcaagcagcccatcggacagatcccccttgagtcctcgcctccggtggggctgtccattgaggaggttgagcggcttaacacaccacgaccacgcaacccgtctatctgttcagctgatcatgggagaagtagcagcgaagaggattgccgcaggccactgtcacgcacccgcaacccagctgatggcatcccagccccagagagtagtagcgactccgactctcacgagagctttacctgtagtgagatggagtatgacagagagaagcccatggtgtacacatccaggatgccaaagcttagtcaggtgaatgagagcgatgctgatgatgaagacaactatggcgctcgattgaaacccaggcgatatcacgggagaagggctgagggcggtccagtgggtacccaggccgcagcacctgggacagcagacaacaccttacccatgaagctgggacagcaggcgggaaccttcaactgggacaatcttttgaactggggccctggttttgggcactacgtggatgtgttcaaggatctggccagcctgcctgagaaggccgctgcaaatgaagagggtaaagctggcacaacaaagcctgttccaaaggacggagaggctgagcagtacgtttag

SEQ ID NO: 215824 - DNA, 9669 bp, Artificial Sequence
  derived and/or modified sequence
atggtgaccaccgtggtggccgtgggcgacaccctggcccagcccctggccgccgccgaggtgttcatcgtggagatcaccctgcaggacatcaacgacaacccccccgtgttccccaccgacatgctggacctgaccgtggaggagaacatcggcgacggcagcaagatcatgcagctgaccgccatggacgccgacgagggcgccaacgccctggtgacctacaccatcatcagcggcgccgacgacagcttcagaatcgaccccgagagcggcgacctgatcgccaccagaagactggacagagagagaagaagcaagtacagcctgctggtgagagccgacgacggcctgcagagcagcgacatgagaatcaacatcaccgtgagcgacgtgaacgaccacacccccaagttcagcagacccgtgtacagcttcgacatccccgaggacaccatccccggcagcctggtggccgccatcctggccaccgacgacgacagcggcgtgaacggcgagatcacctacatcgtgaacgaggacgacgaggacggcatcttcttcctgaaccccatcaccggcgtgttcaacctgaccagactgctggactacgaggtgcagcagtactacatcctgaccgtgagagccgaggacggcggcggccagttcaccaccatcagagtgtacttcaacatcctggacgtgaacgacaacccccccatcttcagcctgaacagctacagcaccagcctgatggagaacctgcccgtgggcagcaccgtgctggtgttcaacgtgaccgacgccgacgacggcatcaacagccagctgacctacagcatcgccagcggcgacagcctgggccagttcaccgtggacaagaacggcgtgctgaaggtgctgaaggccctggacagagagagccagagcttctacaacctggtggtgcaggtgcacgacctgccccagatccccgccagcagattcaccagcaccgcccaggtgagcatcatcctgctggacgtgaacgacaacccccccaccttcctgagccccaagctgacctacatccccgagaacacccccatcgacaccgtggtgttcaaggcccaggccaccgaccccgacagcggccccaacagctacatcgagtacaccctgctgaaccccctgggcaacaagttcagcatcggcaccatcgacggcgaggtgagactgaccggcgagctggacagagaggaggtgagcaactacaccctgaccgtggtggccaccgacaagggccagcccagcctgagcagcagcaccgaggtggtggtgatggtgctggacatcaacgacaacaaccccatcttcgcccaggccctgtacaaggtggagatcaacgagaacaccctgaccggcaccgacatcatccaggtgttcgccgccgacggcgacgagggcaccaacggccaggtgagatacggcatcgtgaacggcaacaccaaccaggagttcagaatcgacagcgtgaccggcgccatcaccgtggccaagcccctggacagagagaagacccccacctaccacctgaccgtgcaggccaccgacagaggcagcacccccagaaccgacaccagcaccgtgagcatcgtgctgctggacatcaacgacttcgtgcccgtgttcgagctgagcccctacagcgtgaacgtgcccgagaacctgggcaccctgcccagaaccatcctgcaggtggtggccagagacgacgacagaggcagcaacagcaagctgagctacgtgctgttcggcggcaacgaggacaacgccttcaccctgagcgccagcggcgagctgggcgtgacccagagcctggacagagagaccaaggagagattcgtgctgatgatcaccgccaccgacagcggcagccccgccctgaccggcaccggcaccatcaacgtgatcgtggacgacgtgaacgacaacgtgcccaccttcgccagcaaggcctacttcaccaccatccccgaggacgcccccaccggcaccgacgtgctgctggtgaacgccagcgacgccgacgccagcaagaacgccgtgatcagaatcatcggcggcaacagccagttcaccatcaaccccagcaccggccagatcatcaccagcgccctgctggacagagagaccaaggacaactacaccctggtggtggtgtgcagcgacgccggcagccccgagcccctgagcagcagcaccagcgtgctggtgaccgtgaccgacgtgaacgacaacccccccagattccagcaccacccctacgtgacccacatccccagccccaccctgcccggcagcttcgtgttcgccgtgaccgtgaccgacgccgacatcggccccaacagcgagctgcactacagcctgagcggcagaaacagcgagaagttccacatcgaccccctgagaggcgccatcatggccgccggccccctgaacggcgccagcgaggtgaccttcagcgtgcacgtgaaggacggcggcagcttccccaagaccgacagcaccaccgtgaccgtgagattcgtgaacaaggccgacttccccaaggtgagagccaaggagcagaccttcatgttccccgagaaccagcccgtgagcagcctggtgaccaccatcaccggcagcagcctgagaggcgagcccatgagctactacatcgccagcggcaacctgggcaacaccttccagatcgaccagctgaccggccaggtgagcatcagccagcccctggacttcgagaagatccagaagtacgtggtgtggatcgaggccagagacggcggcttcccccccttcagcagctacgagaagctggacatcaccgtgctggacgtgaacgacaacgcccccatcttcaaggaggaccccttcatcagcgagatcctggagaacctgagccccagaaagatcctgaccgtgagcgccatggacaaggacagcggccccaacggccagctggactacgagatcgtgaacggcaacatggagaacagcttcagcatcaaccacgccaccggcgagatcagaagcgtgagacccctggacagagagaaggtgagccactacgtgctgaccatcaagagcagcgacaagggcagccccagccagagcaccagcgtgaaggtgatgatcaacatcctggacgagaacgacaacgcccccagattcagccagatcttcagcgcccacgtgcccgagaacagccccctgggctacaccgtgaccagagtgaccaccagcgacgaggacatcggcatcaacgccatcagcagatacagcatcatggacgccagcctgcccttcaccatcaaccccagcaccggcgacatcgtgatcagcagacccctgaacagagaggacaccgacagatacagaatcagagtgagcgcccacgacagcggctggaccgtgagcaccgacgtgaccatcttcgtgaccgacatcaacgacaacgcccccagattcagcagaaccagctactacctggactgccccgagctgaccgagatcggcagcaaggtgacccaggtgttcgccaccgaccccgacgagggcagcaacggccaggtgttctacttcatcaagagccagagcgagtacttcagaatcaacgccaccaccggcgagatcttcaacaagcagatcctgaagtaccagaacgtgaccggcttcagcaacgtgaacatcaacagacacagcttcatcgtgaccagcagcgacagaggcaagcccagcctgatcagcgagaccaccgtgaccatcaacatcgtggacagcaacgacaacgccccccagttcctgaagagcaagtacttcacccccgtgaccaagaacgtgaaggtgggcaccaagctgatcagagtgaccgccatcgacgacaaggacttcggcctgaacagcgaggtggagtacttcatcagcaacgacaaccacctgggcaagttcaagctggacaacgacaccggctggatcagcgtggccagcagcctgatcagcgacctgaaccagaacttcttcatcaccgtgaccgccaaggacaagggcaacccccccctgagcagccaggccaccgtgcacatcaccgtgaccgaggagaactaccacacccccgagttcagccagagccacatgagcgccaccatccccgagagccacagcatcggcagcatcgtgagaaccgtgagcgccagagacagagacgccgccatgaacggcctgatcaagtacagcatcagcagcggcaacgaggagggcatcttcgccatcaacagcagcaccggcatcctgaccctggccaaggccctggactacgagctgtgccagaagcacgagatgaccatcagcgccatcgacggcggctgggtggccagaaccggctactgcagcgtgaccgtgaacgtgatcgacgtgaacgacaacagccccgtgttcctgagcgacgactacttccccaccgtgctggagaacgcccccagcggcaccaccgtgatccacctgaacgccaccgacgccgacagcggcaccaacgccgtgatcgcctacaccgtgcagagcagcgacagcgacctgttcgtgatcgaccccaacaccggcgtgatcaccacccagggcttcctggacttcgagaccaagcagagctaccacctgaccgtgaaggccttcaacgtgcccgacgaggagagatgcagcttcgccaccgtgaacatccagctgaagggcaccaacgagtacgtgcccagattcgtgagcaagctgtactacttcgagatcagcgaggccgcccccaagggcaccatcgtgggcgaggtgttcgccagcgacagagacctgggcaccgacggcgaggtgcactacctgatcttcggcaacagcagaaagaagggcttccagatcaacaagaagaccggccagatctacgtgagcggcatcctggacagagagaaggaggagagagtgagcctgaaggtgctggccaagaacttcggcagcatcagaggcgccgacatcgacgaggtgaccgtgaacgtgaccgtgctggacgccaacgacccccccatcttcaccctgaacatctacagcgtgcagatcagcgagggcgtgcccatcggcacccacgtgaccttcgtgagcgccttcgacagcgacagcatccccagctggagcagattcagctacttcatcggcagcggcaacgagaacggcgccttcagcatcaacccccagaccggccagatcaccgtgaccgccgagctggacagagagaccctgcccatctacaacctgagcgtgctggccgtggacagcggcacccccagcgccaccggcagcgccagcctgctggtgaccctggaggacatcaacgacaacggccccatgctgaccgtgagcgagggcgaggtgatggagaacaagagacccggcaccctggtgatgaccctgcagagcaccgaccccgacctgccccccaaccagggccccttcacctactacctgctgagcaccggccccgccaccagctacttcagcctgagcaccgccggcgtgctgagcaccaccagagagatcgacagagagcagatcgccgacttctacctgagcgtggtgaccaaggacagcggcgtgccccagatgagcagcaccggcaccgtgcacatcaccgtgatcgaccagaacgacaaccccagccagagcagaaccgtggagatcttcgtgaactactacggcaacctgttccccggcggcatcctgggcagcgtgaagccccaggaccccgacgtgctggacagcttccactgcagcctgaccagcggcgtgaccagcctgttcagcatccccggcggcacctgcgacctgaacagccagcccagaagcaccgacggcaccttcgacctgaccgtgctgagcaacgacggcgtgcacagcaccgtgaccagcaacatcagagtgttcttcgccggcttcagcaacgccaccgtggacaacagcatcctgctgagactgggcgtgcccaccgtgaaggacttcctgaccaaccactacctgcacttcctgagaatcgccagcagccagctgaccggcctgggcaccgccgtgcagctgtacagcgcctacgaggagaacaacagaaccttcctgctggccgccgtgaagagaaaccacaaccagtacgtgaaccccagcggcgtggccaccttcttcgagagcatcaaggagatcctgctgagacagagcggcgtgaaggtggagagcgtggaccacgacagctgcgtgcacggcccctgccagaacggcggcagctgcctgagaagactggccgtgagcagcgtgctgaagagcagagagagcctgcccgtgatcatcgtggccaacgagcccctgcagcccttcctgtgcaagtgcctgcccggctacgccggcagctggtgcgagatcgacatcgacgagtgcctgcccagcccctgccacagcggcggcacctgccacaacctggtgggcggcttcagctgcagctgccccgacggcttcaccggcagagcctgcgagagagacatcaacgagtgcctgcagagcccctgcaagaacggcgccatctgccagaacttccccggcagcttcaactgcgtgtgcaagaccggctacaccggcgtgttcggcaagcactgcgagctgaacagctacggcttcgaggagctgagctacatggagttccccagcctggaccccaacaacaactacatctacgtgaagttcgccaccatcaagagccacgccctgctgctgtacaactacgacaaccagaccggcgacagagccgagttcctggccctggagatcgccgaggagagactgagattcagctacaacctgggcagcggcacctacaagctgaccaccatgaagaaggtgagcgacggccacttccacaccgtgatcgccagaagagccggcatggccgccagcctgaccgtggacagctgcagcgagaaccaggagcccggctactgcaccgtgagcaacgtggccgtgagcgacgactggaccctggacgtgcagcccaacagagtgaccgtgggcggcatcagaagcctggagcccatcctgcagagaagaggccacgtggagagccacgacttcgtgggctgcatcatggagttcgccgtgaacggcagacccctggagcccagccaggccctggccgcccagggcatcctggaccagtacggcgacttcatcagctactgcttcaaggagaagaagtgcaagaaggtgtgcttcaccgtgacccccgacaccgccctgagcctggagggcaagggcagactggactaccacatgagccagaacgagaagagagagtacctgctgagacagagcctgagaggcgccatgctggagcccttcggcgtgaacagcctggaggtgaagttcagaaccagaagcgagaacggcgtgctgatccacatccaggagagcagcaactacaccaccgtgaagatcaagaacggcaaggtgtacttcaccagcgacgccggcatcgccggcaaggtggagagaaacatccccgaggtgtacgtggccgacggccactggcacaccttcctgatcggcaagaacggcaccgccaccgtgctgagcgtggacagaatctacaacagagacatcatccaccccacccaggacttcggcggcctggacgtgctgaccatcagcctgggcggcatcccccccaaccaggcccacagagacgcccagaccgccggcttcgacggctgcatcgccagcatgtggtacggcggcgagagcctgcccttcagcggcaagcacagcctggccagcatcagcaagaccgaccccagcgtgaagatcggctgcagaggccccaacatctgcgccagcaacccctgctggggcgacctgctgtgcatcaaccagtggtacgcctacagatgcgtgccccccggcgactgcgccagccacccctgccagaacggcggcagctgcgagcccggcctgcacagcggcttcacctgcagctgccccgacagccacaccggcagaacctgcgagatggtggtggcctgcctgggcgtgctgtgcccccagggcaaggtgtgcaaggccggcagccccgccggccacgtgtgcgtgctgagccagggccccgaggagatcagcctgcccctgtgggccgtgcccgccatcgtgggcagctgcgccaccgtgctggccctgctggtgctgagcctgatcctgtgcaaccagtgcagaggcaagaaggccaagaaccccaaggaggagaagaagcccaaggagaagaagaagaagggcagcgagaacgtggccttcgacgaccccgacaacatccccccctacggcgacgacatgaccgtgagaaagcagcccgagggcaaccccaagcccgacatcatcgagagagagaacccctacctgatctacgacgagaccgacatcccccacaacagcgagaccatccccagcgcccccctggccagccccgagcaggagatcgagcactacgacatcgacaacgccagcagcatcgcccccagcgacgccgacatcatccagcactacaagcagttcagaagccacacccccaagttcagcatccagagacacagccccctgggcttcgccagacagagccccatgcccctgggcgccagcagcctgacctaccagcccagctacggccagggcctgagaaccagcagcctgagccacagcgcctgccccacccccaaccccctgagcagacacagccccgcccccttcagcaagagcagcaccttctacagaaacagccccgccagagagctgcacctgcccatcagagacggcaacaccctggagatgcacggcgacacctgccagcccggcatcttcaactacgccaccagactgggcagaagaagcaagagcccccaggccatggccagccacggcagcagacccggcagcagactgaagcagcccatcggccagatccccctggagagcagcccccccgtgggcctgagcatcgaggaggtggagagactgaacacccccagacccagaaaccccagcatctgcagcgccgaccacggcagaagcagcagcgaggaggactgcagaagacccctgagcagaaccagaaaccccgccgacggcatccccgcccccgagagcagcagcgacagcgacagccacgagagcttcacctgcagcgagatggagtacgacagagagaagcccatggtgtacaccagcagaatgcccaagctgagccaggtgaacgagagcgacgccgacgacgaggacaactacggcgccagactgaagcccagaagataccacggcagaagagccgagggcggccccgtgggcacccaggccgccgcccccggcaccgccgacaacaccctgcccatgaagctgggccagcaggccggcaccttcaactgggacaacctgctgaactggggccccggcttcggccactacgtggacgtgttcaaggacctggccagcctgcccgagaaggccgccgccaacgaggagggcaaggccggcaccaccaagcccgtgcccaaggacggcgaggccgagcagtacgtgtag

SEQ ID NO: 215825 - DNA, 14946 bp, Artificial Sequence
  derived and/or modified sequence
atggacctggcccccgacagagccaccggcagaccctggctgcccctgcacaccctgagcgtgagccagctgctgagagtgttctggctgctgagcctgctgcccggccaggcctgggtgcacggcgccgagcccagacaggtgttccaggtgctggaggagcagccccccggcaccctggtgggcaccatccagaccagacccggcttcacctacagactgagcgagagccacgccctgttcgccatcaacagcagcaccggcgccctgtacaccaccagcaccatcgacagagagagcctgcccagcgacgtgatcaacctggtggtgctgagcagcgcccccacctaccccaccgaggtgagagtgctggtgagagacctgaacgacaacgcccccgtgttccccgaccccagcatcgtggtgaccttcaaggaggacagcagcagcggcagacaggtgatcctggacaccgccaccgacagcgacatcggcagcaacggcgtggaccacagaagctacagaatcatcagaggcaacgaggccggcagattcagactggacatcaccctgaaccccagcggcgagggcgccttcctgcacctggtgagcaagggcggcctggacagagaggtgaccccccagtaccagctgctggtggaggtggaggacaagggcgagcccaagagaagaggctacctgcaggtgaacgtgaccgtgcaggacatcaacgacaacccccccgtgttcggcagcagccactaccaggccggcgtgcccgaggacgccgtggtgggcagcagcgtgctgcaggtggccgccgccgacgccgacgagggcaccaacgccgacatcagatacagactgcaggacgagggcacccccttccagatggaccccgagaccggcctgatcaccgtgagagagcccctggacttcgaggccagaagacagtacagcctgaccgtgcaggccatggacagaggcgtgcccagcctgaccggcagagccgaggccctgatccagctgctggacgtgaacgacaacgaccccgtggtgaagttcagatacttccccgccaccagcagatacgccagcgtggacgagaacgcccaggtgggcaccgtggtggccctgctgaccgtgaccgacgccgacagccccgccgccaacggcaacatcagcgtgcagatcctgggcggcaacgagcagagacacttcgaggtgcagagcagcaaggtgcccaacctgagcctgatcaaggtggccagcgccctggacagagagagaatccccagctacaacctgaccgtgagcgtgagcgacaactacggcgccccccccggcgccgccgtgcaggccagaagcagcgtggccagcctggtgatcttcgtgaacgacatcaacgaccacccccccgtgttcagccagcaggtgtacagagtgaacctgagcgaggaggccccccccggcagctacgtgagcggcatcagcgccaccgacggcgacagcggcctgaacgccaacctgagatacagcatcgtgagcggcaacggcctgggctggttccacatcagcgagcacagcggcctggtgaccaccggcagcagcggcggcctggacagagagctggccagccagatcgtgctgaacatcagcgccagagaccagggcgtgcaccccaaggtgagctacgcccagctggtggtgaccctgctggacgtgaacgacgagaagcccgtgttcagccagcccgagggctacgacgtgagcgtggtggagaacgcccccaccggcaccgagctgctgatgctgagagccaccgacggcgacctgggcgacaacggcaccgtgagattcagcctgcaggaggccgagaccgacagaagaagcttcagactggaccccgtgagcggcagactgagcaccatcagcagcctggacagagaggagcaggccttctacagcctgctggtgctggccaccgacctgggcagccccccccagagcagcatggccagaatcaacgtgagcctgctggacatcaacgacaacagccccgtgttctaccccgtgcagtacttcgcccacatcaaggagaacgagcccggcggcagctacatcaccaccgtgagcgccaccgaccccgacctgggcaccaacggcaccgtgaagtacagcatcagcgccggcgacagaagcagattccaggtgaacgcccagagcggcgtgatcagcaccagaatggccctggacagagaggagaagaccgcctaccagctgcagatcgtggccaccgacggcggcaacctgcagagccccaaccaggccatcgtgaccatcaccgtgctggacacccaggacaacccccccgtgttcagccaggtggcctacagcttcgtggtgttcgagaacgtggccctgggctaccacgtgggcagcgtgagcgccagcaccatggacctgaacagcaacatcagctacctgatcaccaccggcgaccagaagggcatgttcgccatcaaccaggtgaccggccagctgaccaccgccaacgtgatcgacagagaggagcagagcttctaccagctgaaggtggtggccagcggcggcaccgtgaccggcgacaccatggtgaacatcaccgtgaaggacctgaacgacaacagcccccacttcctgcaggccatcgagagcgtgaacgtggtggagaactggcaggccggccacagcatcttccaggccaaggccgtggaccccgacgagggcgtgaacggcatggtgctgtacagcctgaagcagaaccccaagaacctgttcgccatcaacgagaagaacggcaccatcagcctgctgggccccctggacgtgcacgccggcagctaccagatcgagatcctggccagcgacatgggcgtgccccagctgagcagcagcgtgatcctgaccgtgtacgtgcacgacgtgaacgacaacagccccgtgttcgaccagctgagctacgaggtgaccctgagcgagagcgagcccgtgaacagcagattcttcaaggtgcaggccagcgacaaggacagcggcgccaacggcgagatcgcctacaccatcgccgagggcaacaccggcgacgccttcggcatcttccccgacggccagctgtacatcaagagcgagctggacagagagctgcaggacagatacgtgctgatggtggtggccagcgacagagccgtggagcccctgagcgccaccgtgaacgtgaccgtgatcctggaggacgtgaacgacaacagacccctgttcaacagcaccaactacaccttctacttcgaggaggagcagagagccggcagcttcgtgggcaaggtgagcgccgtggacaaggacttcggccccaacggcgaggtgagatacagcttcgagatggtgcagcccgacttcgagctgcacgccatcagcggcgagatcaccaacacccaccagttcgacagagagagcctgatgagaagaagaggcaccgccgtgttcagcttcaccgtgatcgccaccgaccagggcatcccccagcccctgaaggaccaggccaccgtgcacgtgtacatgaaggacatcaacgacaacgcccccaagttcctgaaggacttctaccaggccaccatcagcgagagcgccgccaacctgacccaggtgctgagagtgagcgccagcgacgtggacgagggcaacaacggcctgatccactacagcatcatcaagggcaacgaggagagacagttcgccatcgacagcaccagcggccaggtgaccctgatcggcaagctggactacgaggccacccccgcctacagcctggtgatccaggccgtggacagcggcaccatccccctgaacagcacctgcaccctgaacatcgacatcctggacgagaacgacaacacccccagcttccccaagagcaccctgttcgtggacgtgctggagaacatgagaatcggcgagctggtgagcagcgtgaccgccaccgacagcgacagcggcgacaacgccgacctgtactacagcatcaccggcaccaacaaccacggcaccttcagcatcagccccaacaccggcagcatcttcctggccaagaagctggacttcgagacccagagcctgtacaagctgaacatcaccgccaaggaccagggcagaccccccagaagcagcaccatgagcgtggtgatccacgtgagagacttcaacgacaacccccccagcttcccccccggcgacatcttcaagagcatcgtggagaacatccccatcggcaccagcgtgatcagcgtgaccgcccacgaccccgacgccgacatcaacggccagctgagctacaccatcatccagcagatgcccagaggcaaccacttcaccatcgacgaggtgaagggcaccatctacaccaacgccgagatcgacagagagttcgccaacctgttcgagctgaccgtgaaggccaacgaccaggccgtgcccatcgagaccagaagatacgccctgaagaacgtgaccatcctggtgaccgacctgaacgacaacgtgcccatgttcatcagccagaacgccctggccgccgaccccagcgccgtgatcggcagcgtgctgaccaccatcatggccgccgaccccgacgagggcgccaacggcgagatcgagtacgagatcatcaacggcgacaccgacaccttcatcgtggacagatacagcggcgacctgagagtggccagcgccctggtgcccagccagctgatctacaacctgatcgtgagcgccaccgacctgggccccgagagaagaaagagcaccaccgagctgaccatcatcctgcagggcctggacggccccgtgttcacccagcccaagtacatcaccatcctgaaggagggcgagcccatcggcaccaacgtgatcagcatcgaggccgccagccccagaggcagcgaggcccccgtggagtactacatcgtgagcgtgagatgcgaggagaagaccgtgggcagactgttcaccatcggcagacacaccggcatcatccagaccgccgccatcctggacagagagcagggcgcctgcctgtacctggtggacgtgtacgccatcgagaagagcaccgccttccccagaacccagagagccgaggtggagatcaccctgcaggacatcaacgacaacccccccgtgttccccaccgacatgctggacctgaccgtggaggagaacatcggcgacggcagcaagatcatgcagctgaccgccatggacgccgacgagggcgccaacgccctggtgacctacaccatcatcagcggcgccgacgacagcttcagaatcgaccccgagagcggcgacctgatcgccaccagaagactggacagagagagaagaagcaagtacagcctgctggtgagagccgacgacggcctgcagagcagcgacatgagaatcaacatcaccgtgagcgacgtgaacgaccacacccccaagttcagcagacccgtgtacagcttcgacatccccgaggacaccatccccggcagcctggtggccgccatcctggccaccgacgacgacagcggcgtgaacggcgagatcacctacatcgtgaacgaggacgacgaggacggcatcttcttcctgaaccccatcaccggcgtgttcaacctgaccagactgctggactacgaggtgcagcagtactacatcctgaccgtgagagccgaggacggcggcggccagttcaccaccatcagagtgtacttcaacatcctggacgtgaacgacaacccccccatcttcagcctgaacagctacagcaccagcctgatggagaacctgcccgtgggcagcaccgtgctggtgttcaacgtgaccgacgccgacgacggcatcaacagccagctgacctacagcatcgccagcggcgacagcctgggccagttcaccgtggacaagaacggcgtgctgaaggtgctgaaggccctggacagagagagccagagcttctacaacctggtggtgcaggtgcacgacctgccccagatccccgccagcagattcaccagcaccgcccaggtgagcatcatcctgctggacgtgaacgacaacccccccaccttcctgagccccaagctgacctacatccccgagaacacccccatcgacaccgtggtgttcaaggcccaggccaccgaccccgacagcggccccaacagctacatcgagtacaccctgctgaaccccctgggcaacaagttcagcatcggcaccatcgacggcgaggtgagactgaccggcgagctggacagagaggaggtgagcaactacaccctgaccgtggtggccaccgacaagggccagcccagcctgagcagcagcaccgaggtggtggtgatggtgctggacatcaacgacaacaaccccatcttcgcccaggccctgtacaaggtggagatcaacgagaacaccctgaccggcaccgacatcatccaggtgttcgccgccgacggcgacgagggcaccaacggccaggtgagatacggcatcgtgaacggcaacaccaaccaggagttcagaatcgacagcgtgaccggcgccatcaccgtggccaagcccctggacagagagaagacccccacctaccacctgaccgtgcaggccaccgacagaggcagcacccccagaaccgacaccagcaccgtgagcatcgtgctgctggacatcaacgacttcgtgcccgtgttcgagctgagcccctacagcgtgaacgtgcccgagaacctgggcaccctgcccagaaccatcctgcaggtggtggccagagacgacgacagaggcagcaacagcaagctgagctacgtgctgttcggcggcaacgaggacaacgccttcaccctgagcgccagcggcgagctgggcgtgacccagagcctggacagagagaccaaggagagattcgtgctgatgatcaccgccaccgacagcggcagccccgccctgaccggcaccggcaccatcaacgtgatcgtggacgacgtgaacgacaacgtgcccaccttcgccagcaaggcctacttcaccaccatccccgaggacgcccccaccggcaccgacgtgctgctggtgaacgccagcgacgccgacgccagcaagaacgccgtgatcagaatcatcggcggcaacagccagttcaccatcaaccccagcaccggccagatcatcaccagcgccctgctggacagagagaccaaggacaactacaccctggtggtggtgtgcagcgacgccggcagccccgagcccctgagcagcagcaccagcgtgctggtgaccgtgaccgacgtgaacgacaacccccccagattccagcaccacccctacgtgacccacatccccagccccaccctgcccggcagcttcgtgttcgccgtgaccgtgaccgacgccgacatcggccccaacagcgagctgcactacagcctgagcggcagaaacagcgagaagttccacatcgaccccctgagaggcgccatcatggccgccggccccctgaacggcgccagcgaggtgaccttcagcgtgcacgtgaaggacggcggcagcttccccaagaccgacagcaccaccgtgaccgtgagattcgtgaacaaggccgacttccccaaggtgagagccaaggagcagaccttcatgttccccgagaaccagcccgtgagcagcctggtgaccaccatcaccggcagcagcctgagaggcgagcccatgagctactacatcgccagcggcaacctgggcaacaccttccagatcgaccagctgaccggccaggtgagcatcagccagcccctggacttcgagaagatccagaagtacgtggtgtggatcgaggccagagacggcggcttcccccccttcagcagctacgagaagctggacatcaccgtgctggacgtgaacgacaacgcccccatcttcaaggaggaccccttcatcagcgagatcctggagaacctgagccccagaaagatcctgaccgtgagcgccatggacaaggacagcggccccaacggccagctggactacgagatcgtgaacggcaacatggagaacagcttcagcatcaaccacgccaccggcgagatcagaagcgtgagacccctggacagagagaaggtgagccactacgtgctgaccatcaagagcagcgacaagggcagccccagccagagcaccagcgtgaaggtgatgatcaacatcctggacgagaacgacaacgcccccagattcagccagatcttcagcgcccacgtgcccgagaacagccccctgggctacaccgtgaccagagtgaccaccagcgacgaggacatcggcatcaacgccatcagcagatacagcatcatggacgccagcctgcccttcaccatcaaccccagcaccggcgacatcgtgatcagcagacccctgaacagagaggacaccgacagatacagaatcagagtgagcgcccacgacagcggctggaccgtgagcaccgacgtgaccatcttcgtgaccgacatcaacgacaacgcccccagattcagcagaaccagctactacctggactgccccgagctgaccgagatcggcagcaaggtgacccaggtgttcgccaccgaccccgacgagggcagcaacggccaggtgttctacttcatcaagagccagagcgagtacttcagaatcaacgccaccaccggcgagatcttcaacaagcagatcctgaagtaccagaacgtgaccggcttcagcaacgtgaacatcaacagacacagcttcatcgtgaccagcagcgacagaggcaagcccagcctgatcagcgagaccaccgtgaccatcaacatcgtggacagcaacgacaacgccccccagttcctgaagagcaagtacttcacccccgtgaccaagaacgtgaaggtgggcaccaagctgatcagagtgaccgccatcgacgacaaggacttcggcctgaacagcgaggtggagtacttcatcagcaacgacaaccacctgggcaagttcaagctggacaacgacaccggctggatcagcgtggccagcagcctgatcagcgacctgaaccagaacttcttcatcaccgtgaccgccaaggacaagggcaacccccccctgagcagccaggccaccgtgcacatcaccgtgaccgaggagaactaccacacccccgagttcagccagagccacatgagcgccaccatccccgagagccacagcatcggcagcatcgtgagaaccgtgagcgccagagacagagacgccgccatgaacggcctgatcaagtacagcatcagcagcggcaacgaggagggcatcttcgccatcaacagcagcaccggcatcctgaccctggccaaggccctggactacgagctgtgccagaagcacgagatgaccatcagcgccatcgacggcggctgggtggccagaaccggctactgcagcgtgaccgtgaacgtgatcgacgtgaacgacaacagccccgtgttcctgagcgacgactacttccccaccgtgctggagaacgcccccagcggcaccaccgtgatccacctgaacgccaccgacgccgacagcggcaccaacgccgtgatcgcctacaccgtgcagagcagcgacagcgacctgttcgtgatcgaccccaacaccggcgtgatcaccacccagggcttcctggacttcgagaccaagcagagctaccacctgaccgtgaaggccttcaacgtgcccgacgaggagagatgcagcttcgccaccgtgaacatccagctgaagggcaccaacgagtacgtgcccagattcgtgagcaagctgtactacttcgagatcagcgaggccgcccccaagggcaccatcgtgggcgaggtgttcgccagcgacagagacctgggcaccgacggcgaggtgcactacctgatcttcggcaacagcagaaagaagggcttccagatcaacaagaagaccggccagatctacgtgagcggcatcctggacagagagaaggaggagagagtgagcctgaaggtgctggccaagaacttcggcagcatcagaggcgccgacatcgacgaggtgaccgtgaacgtgaccgtgctggacgccaacgacccccccatcttcaccctgaacatctacagcgtgcagatcagcgagggcgtgcccatcggcacccacgtgaccttcgtgagcgccttcgacagcgacagcatccccagctggagcagattcagctacttcatcggcagcggcaacgagaacggcgccttcagcatcaacccccagaccggccagatcaccgtgaccgccgagctggacagagagaccctgcccatctacaacctgagcgtgctggccgtggacagcggcacccccagcgccaccggcagcgccagcctgctggtgaccctggaggacatcaacgacaacggccccatgctgaccgtgagcgagggcgaggtgatggagaacaagagacccggcaccctggtgatgaccctgcagagcaccgaccccgacctgccccccaaccagggccccttcacctactacctgctgagcaccggccccgccaccagctacttcagcctgagcaccgccggcgtgctgagcaccaccagagagatcgacagagagcagatcgccgacttctacctgagcgtggtgaccaaggacagcggcgtgccccagatgagcagcaccggcaccgtgcacatcaccgtgatcgaccagaacgacaaccccagccagagcagaaccgtggagatcttcgtgaactactacggcaacctgttccccggcggcatcctgggcagcgtgaagccccaggaccccgacgtgctggacagcttccactgcagcctgaccagcggcgtgaccagcctgttcagcatccccggcggcacctgcgacctgaacagccagcccagaagcaccgacggcaccttcgacctgaccgtgctgagcaacgacggcgtgcacagcaccgtgaccagcaacatcagagtgttcttcgccggcttcagcaacgccaccgtggacaacagcatcctgctgagactgggcgtgcccaccgtgaaggacttcctgaccaaccactacctgcacttcctgagaatcgccagcagccagctgaccggcctgggcaccgccgtgcagctgtacagcgcctacgaggagaacaacagaaccttcctgctggccgccgtgaagagaaaccacaaccagtacgtgaaccccagcggcgtggccaccttcttcgagagcatcaaggagatcctgctgagacagagcggcgtgaaggtggagagcgtggaccacgacagctgcgtgcacggcccctgccagaacggcggcagctgcctgagaagactggccgtgagcagcgtgctgaagagcagagagagcctgcccgtgatcatcgtggccaacgagcccctgcagcccttcctgtgcaagtgcctgcccggctacgccggcagctggtgcgagatcgacatcgacgagtgcctgcccagcccctgccacagcggcggcacctgccacaacctggtgggcggcttcagctgcagctgccccgacggcttcaccggcagagcctgcgagagagacatcaacgagtgcctgcagagcccctgcaagaacggcgccatctgccagaacttccccggcagcttcaactgcgtgtgcaagaccggctacaccggcaagatgtgcgagagcagcgtgaactactgcgagtgcaacccctgcttcaacggcggcagctgccagagcggcgtggacagctactactgccactgccccttcggcgtgttcggcaagcactgcgagctgaacagctacggcttcgaggagctgagctacatggagttccccagcctggaccccaacaacaactacatctacgtgaagttcgccaccatcaagagccacgccctgctgctgtacaactacgacaaccagaccggcgacagagccgagttcctggccctggagatcgccgaggagagactgagattcagctacaacctgggcagcggcacctacaagctgaccaccatgaagaaggtgagcgacggccacttccacaccgtgatcgccagaagagccggcatggccgccagcctgaccgtggacagctgcagcgagaaccaggagcccggctactgcaccgtgagcaacgtggccgtgagcgacgactggaccctggacgtgcagcccaacagagtgaccgtgggcggcatcagaagcctggagcccatcctgcagagaagaggccacgtggagagccacgacttcgtgggctgcatcatggagttcgccgtgaacggcagacccctggagcccagccaggccctggccgcccagggcatcctggaccagtgccccagactggagggcgcctgcaccagaagcccctgccagcacggcggcacctgcatggactactggagctggcagcagtgccactgcaaggagggcctgaccggcaagtactgcgagaagagcgtgacccccgacaccgccctgagcctggagggcaagggcagactggactaccacatgagccagaacgagaagagagagtacctgctgagacagagcctgagaggcgccatgctggagcccttcggcgtgaacagcctggaggtgaagttcagaaccagaagcgagaacggcgtgctgatccacatccaggagagcagcaactacaccaccgtgaagatcaagaacggcaaggtgtacttcaccagcgacgccggcatcgccggcaaggtggagagaaacatccccgaggtgtacgtggccgacggccactggcacaccttcctgatcggcaagaacggcaccgccaccgtgctgagcgtggacagaatctacaacagagacatcatccaccccacccaggacttcggcggcctggacgtgctgaccatcagcctgggcggcatcccccccaaccaggcccacagagacgcccagaccgccggcttcgacggctgcatcgccagcatgtggtacggcggcgagagcctgcccttcagcggcaagcacagcctggccagcatcagcaagaccgaccccagcgtgaagatcggctgcagaggccccaacatctgcgccagcaacccctgctggggcgacctgctgtgcatcaaccagtggtacgcctacagatgcgtgccccccggcgactgcgccagccacccctgccagaacggcggcagctgcgagcccggcctgcacagcggcttcacctgcagctgccccgacagccacaccggcagaacctgcgagatggtggtggcctgcctgggcgtgctgtgcccccagggcaaggtgtgcaaggccggcagccccgccggccacgtgtgcgtgctgagccagggccccgaggagatcagcctgcccctgtgggccgtgcccgccatcgtgggcagctgcgccaccgtgctggccctgctggtgctgagcctgatcctgtgcaaccagtgcagaggcaagaaggccaagaaccccaaggaggagaagaagcccaaggagaagaagaagaagggcagcgagaacgtggccttcgacgaccccgacaacatccccccctacggcgacgacatgaccgtgagaaagcagcccgagggcaaccccaagcccgacatcatcgagagagagaacccctacctgatctacgacgagaccgacatcccccacaacagcgagaccatccccagcgcccccctggccagccccgagcaggagatcgagcactacgacatcgacaacgccagcagcatcgcccccagcgacgccgacatcatccagcactacaagcagttcagaagccacacccccaagttcagcatccagagacacagccccctgggcttcgccagacagagccccatgcccctgggcgccagcagcctgacctaccagcccagctacggccagggcctgagaaccagcagcctgagccacagcgcctgccccacccccaaccccctgagcagacacagccccgcccccttcagcaagagcagcaccttctacagaaacagccccgccagagagctgcacctgcccatcagagacggcaacaccctggagatgcacggcgacacctgccagcccggcatcttcaactacgccaccagactgggcagaagaagcaagagcccccaggccatggccagccacggcagcagacccggcagcagactgaagcagcccatcggccagatccccctggagagcagcccccccgtgggcctgagcatcgaggaggtggagagactgaacacccccagacccagaaaccccagcatctgcagcgccgaccacggcagaagcagcagcgaggaggactgcagaagacccctgagcagaaccagaaaccccgccgacggcatccccgcccccgagagcagcagcgacagcgacagccacgagagcttcacctgcagcgagatggagtacgacagagagaagcccatggtgtacaccagcagaatgcccaagctgagccaggtgaacgagagcgacgccgacgacgaggacaactacggcgccagactgaagcccagaagataccacggcagaagagccgagggcggccccgtgggcacccaggccgccgcccccggcaccgccgacaacaccctgcccatgaagctgggccagcaggccggcaccttcaactgggacaacctgctgaactggggccccggcttcggccactacgtggacgtgttcaaggacctggccagcctgcccgagaaggccgccgccaacgaggagggcaaggccggcaccaccaagcccgtgcccaaggacggcgaggccgagcagtacgtgtag

SEQ ID NO: 215826 - protein, 278 aa, Artificial Sequence
  derived and/or modified sequence
MTDLNKHIKQAQTQRKQLLEESRELHREKLLVQAENRFFLEYLTNKTEEYTEQPEKVWNSYLQKSGEIERRRQESASRYAEQISVLKTALLQKENIQSSLKRKLQAMRDIAILKEKQEKEIQTLQEETKKVQAETASKTREVQAQLLQEKRLLEKQLSEPDRRLLGKRKRRELNMKAQALKLAAKRFIFEYSCGINRENQQFKKELLQLIEQAQKLTATQSHLENRKQQLQQEQWYLESLIQARQRLQGSHNQCLNRQDVPKTTPSLPQGTKSRINPK

SEQ ID NO: 215827 - DNA, 837 bp, Artificial Sequence
  derived and/or modified sequence
atgaccgacctgaacaagcacatcaagcaggcccagacccagagaaagcagctgctggaggagagcagagagctgcacagagagaagctgctggtgcaggccgagaacagattcttcctggagtacctgaccaacaagaccgaggagtacaccgagcagcccgagaaggtgtggaacagctacctgcagaagagcggcgagatcgagagaagaagacaggagagcgccagcagatacgccgagcagatcagcgtgctgaagaccgccctgctgcagaaggagaacatccagagcagcctgaagagaaagctgcaggccatgagagacatcgccatcctgaaggagaagcaggagaaggagatccagaccctgcaggaggagaccaagaaggtgcaggccgagaccgccagcaagaccagagaggtgcaggcccagctgctgcaggagaagagactgctggagaagcagctgagcgagcccgacagaagactgctgggcaagagaaagagaagagagctgaacatgaaggcccaggccctgaagctggccgccaagagattcatcttcgagtacagctgcggcatcaacagagagaaccagcagttcaagaaggagctgctgcagctgatcgagcaggcccagaagctgaccgccacccagagccacctggagaacagaaagcagcagctgcagcaggagcagtggtacctggagagcctgatccaggccagacagagactgcagggcagccacaaccagtgcctgaacagacaggacgtgcccaagaccacccccagcctgccccagggcaccaagagcagaatcaaccccaagtag

SEQ ID NO: 215828 - DNA, 837 bp, Artificial Sequence
  derived and/or modified sequence
atgaccgacctcaataaacacataaaacaggcccagacgcaacgaaagcagcttctggaggagtccagagaactacaccgggaaaagttgttagtgcaagccgaaaacagattcttcctggaatatctcaccaataagaccgaggagtacaccgaacagccggagaaggtgtggaacagctacctgcaaaagtcaggggaaatcgagcgcagaagacaggagtccgcttcacgatacgccgagcagattagcgtgttgaagaccgcgctgttacagaaggaaaacatacaatcctctttgaagcggaaacttcaggctatgcgcgatatcgctatactgaaggagaagcaggaaaaagaaatccagaccctccaggaagaaaccaagaaggttcaggccgagaccgccagcaagacccgggaagtgcaggcgcagctactccaagagaagcgccttctggaaaaacagctttctgaacccgataggcggctactcggaaagcgtaagcgtcgcgaactcaacatgaaagcgcaagcccttaagctcgccgcaaaaaggttcatcttcgaatactcatgcggcattaaccgggaaaatcaacagtttaagaaagagctcctgcaacttattgaacaggcccaaaaattgaccgccacccagtcccacttggagaacagaaagcagcagctccagcaggaacagtggtacctggagagcctgatccaggcacggcagagactgcaaggatcccacaatcaatgcttgaacaggcaagacgtacccaagacaactccttcccttccacagggcacgaagtctagaatcaaccccaagtag

SEQ ID NO: 215829 - DNA, 837 bp, Artificial Sequence
  derived and/or modified sequence
atgacagacctgaacaagcacatcaagcaggcccagacccagaggaagcagctgctggaggagagccgggagctgcaccgggagaagctgctggtgcaggctgaaaatcgcttcttcctggagtacctgaccaacaagacagaggagtacacagagcagcctgagaaggtgtggaacagctacctgcagaagtctggagaaattgaaagaagacggcaggagagcgccagccgctatgcagagcagatctctgtgctgaagacagccctgctgcagaaggagaacatccagagcagcctgaagaggaagctgcaggccatgagggacatcgccatcctgaaggagaagcaggagaaggagatccagaccctgcaggaggagaccaagaaggtgcaggccgagacagccagcaagacccgggaggtgcaggcccagctgctgcaggagaagaggctgctggagaagcagctgtctgagccagaccggcggctgctgggcaagaggaagaggcgggagctgaacatgaaggcccaggccctgaagctggccgccaagcgcttcatctttgagtacagctgtggcatcaaccgggagaaccagcagttcaagaaggagctgctgcagctgattgagcaggcccagaagctgacagccacccagagccacctggagaacaggaagcagcagctgcagcaggagcagtggtacctggagagcctcatccaggcccggcagaggctgcagggcagccacaaccagtgcctgaaccggcaggatgtgcccaagaccacccccagcctgccccagggcaccaagagccgcatcaaccccaagtag

SEQ ID NO: 215830 - DNA, 837 bp, Artificial Sequence
  derived and/or modified sequence
atgaccgacctgaacaagcacatcaagcaggcccagacccagcggaagcagctgcttgaggaatcgcgggagctgcaccgtgaaaaattactggtgcaagccgaaaatcggttctttcttgaatatctcaccaacaaaaccgaggagtatactgagcagccagagaaggtgtggaacagctatctccaaaaaagcggtgagattgaaaggcgacgtcaggagtccgcatctcgctatgcggagcagatttctgtactgaaaactgcactgttacagaaggaaaacattcaaagcagcttgaagcgcaaactgcaagctatgcgcgacattgccatcttaaaggagaagcaggagaaagaaatccagacactccaagaagaaactaagaaagttcaggctgaaactgcctctaaaacccgtgaggttcaggcacaactccttcaggaaaagcgcctgctggaaaagcagctttccgaacctgaccggcgtctcctgggcaaaaggaaacggcgtgaattgaatatgaaggcccaggcacttaagctggcagcaaaaagattcatcttcgagtattcctgtggcatcaaccgggaaaatcaacagttcaagaaagaactcctgcagttgattgagcaagcccaaaaactcaccgctacccagtcacaccttgagaataggaagcaacagctgcaacaggaacagtggtacctcgagagcttgatccaggcgcgccagagattacaggggagccacaaccagtgtctgaataggcaggatgttccaaagactacaccatctctgccccagggaactaagagccgtatcaacccaaaatag

SEQ ID NO: 215831 - DNA, 837 bp, Artificial Sequence
  derived and/or modified sequence
atgacagacctgaacaaacacattaagcaagctcagacgcagagaaagcaactcctcgaggagagtcgggagctgcatcgtgagaaactgcttgtgcaagcagagaataggtttttcctggagtacctgacgaacaagacggaagagtataccgagcagccagaaaaagtctggaacagttaccttcagaaatccggagaaattgagcgtcgaagacaggaatccgcaagcaggtacgctgagcagattagtgtgttgaaaacagcactcctccagaaggagaacattcagagctccttgaaaaggaaactccaggctatgagagatatagccattttaaaggagaaacaggagaaggaaatccaaactttgcaggaggaaacaaagaaagtgcaggctgaaaccgcttctaaaacccgggaagtccaagcccagttgttgcaagagaagagactgctcgaaaaacaactttcagaaccggacagacggctgctgggaaagagaaaacgccgtgaactcaacatgaaagcacaagctttgaagttggcagcgaagcgctttatttttgagtatagttgtggcataaaccgggaaaaccagcagttcaagaaggaactgctgcagcttatagagcaggcccagaaactgactgctacccaatcacacctggaaaacagaaaacagcagctccaacaagaacagtggtatctagagagtctcattcaggcacgacagcggctccaagggagccacaaccaatgcctgaatcggcaggacgttccgaagactactccatccctgccccaaggcaccaaatctcgtatcaatccaaagtag

SEQ ID NO: 215832 - protein, 287 aa, Artificial Sequence
  derived and/or modified sequence
MATVMAATAAERAVLEEEFRWLLHDEVHAVLKQLQDILKEASLRFTLPGSGTEGPAKQENFILGSCGTDQVKGVLTLQGDALSQADVNLKMPRNNQLLHFAFREDKQWKLQQIQDARNHVSQAIYLLTSRDQSYQFKTGAEVLKLMDAVMLQLTRARNRLTTPATLTLPEIAASGLTRMFAPALPSDLLVNVYINLNKLCLTVYQLHALQPNSTKNFRPAGGAVLHSPGAMFEWGSQRLEVSHVHKVECVIPWLNDALVYFTVSLQLCQQLKDKISVFSSYWSYRPF

SEQ ID NO: 215833 - DNA, 864 bp, Artificial Sequence
  derived and/or modified sequence
atggccaccgtgatggccgccaccgccgccgagagagccgtgctggaggaggagttcagatggctgctgcacgacgaggtgcacgccgtgctgaagcagctgcaggacatcctgaaggaggccagcctgagattcaccctgcccggcagcggcaccgagggccccgccaagcaggagaacttcatcctgggcagctgcggcaccgaccaggtgaagggcgtgctgaccctgcagggcgacgccctgagccaggccgacgtgaacctgaagatgcccagaaacaaccagctgctgcacttcgccttcagagaggacaagcagtggaagctgcagcagatccaggacgccagaaaccacgtgagccaggccatctacctgctgaccagcagagaccagagctaccagttcaagaccggcgccgaggtgctgaagctgatggacgccgtgatgctgcagctgaccagagccagaaacagactgaccacccccgccaccctgaccctgcccgagatcgccgccagcggcctgaccagaatgttcgcccccgccctgcccagcgacctgctggtgaacgtgtacatcaacctgaacaagctgtgcctgaccgtgtaccagctgcacgccctgcagcccaacagcaccaagaacttcagacccgccggcggcgccgtgctgcacagccccggcgccatgttcgagtggggcagccagagactggaggtgagccacgtgcacaaggtggagtgcgtgatcccctggctgaacgacgccctggtgtacttcaccgtgagcctgcagctgtgccagcagctgaaggacaagatcagcgtgttcagcagctactggagctacagacccttctag

SEQ ID NO: 215834 - DNA, 864 bp, Artificial Sequence
  derived and/or modified sequence
atggccacggtaatggcagctacggccgcggagcgggcagtcctggaagaagaattccggtggctgctacatgatgaggtgcatgccgtcctaaagcaactgcaggacatcctcaaggaggcttccttgcgctttacccttcccgggtccggaaccgaaggacctgctaaacaggaaaatttcatcctgggaagctgtggcactgaccaggtcaagggggtgcttacactacaaggggacgcattgtcccaagccgacgtgaacctgaagatgcccagaaacaaccaactcctgcacttcgccttccgcgaggacaagcaatggaagctgcagcaaatacaggacgctagaaaccacgtgtcacaggcgatctacctattgacaagccgggaccagagctatcagttcaagactggggcagaggtcttgaaactgatggacgccgtaatgctgcagcttaccagggctagaaacaggctgacaactcccgccacactgactctcccagagattgccgcatcaggccttactcgcatgttcgcccctgccctgccctccgatctgttggtgaacgtgtacattaaccttaacaagctgtgtttaaccgtgtatcaactccacgccctgcagcccaacagcaccaagaactttcggccagctgggggagccgtgttacattctcctggggcaatgtttgaatggggatcccagcggctggaagttagtcatgtgcataaagtggagtgcgtgattccatggttgaatgatgctctggtctatttcaccgtctcattgcaactgtgtcagcagctgaaagataaaataagcgtgttttcctcctactggtcctatcgaccattctag

SEQ ID NO: 215835 - DNA, 864 bp, Artificial Sequence
  derived and/or modified sequence
atggccaccgtgatggccgccacagctgctgagagagctgtgctggaggaggagttccgctggctgctgcatgatgaggtgcatgctgtgctgaagcagctgcaggacatcctgaaggaggccagcctgcgcttcaccctgcccggcagcggcacagagggccctgccaagcaggagaacttcatcctgggcagctgtggcacagaccaggtgaagggcgtgctgaccctgcagggagatgccctgagccaggctgatgtgaacctgaagatgcccaggaacaaccagctgctgcactttgccttccgggaggacaagcagtggaagctgcagcagatccaggatgccagaaatcatgtgtcccaggccatctacctgctgaccagccgggaccagagctaccagttcaagacaggagctgaggtgctgaagctgatggatgctgtgatgctgcagctgacccgggccaggaaccggctgaccaccccagccaccctgaccctgcctgagattgctgccagcggcctgaccaggatgtttgccccagccctgcccagcgacctgctggtgaatgtgtacatcaacctgaacaagctgtgcctgactgtgtaccagctgcacgccctgcagcccaacagcaccaagaacttccggcctgctgggggcgctgtgctgcacagccctggggccatgtttgagtggggcagccagaggctggaggtgagccacgtgcacaaggtggagtgtgtgatcccctggctgaatgatgccctggtgtacttcaccgtgtccctgcagctgtgccagcagctgaaggacaagatcagcgtcttcagcagctactggagctaccggcccttctag

SEQ ID NO: 215836 - DNA, 864 bp, Artificial Sequence
  derived and/or modified sequence
atggccaccgtgatggccgccaccgccgccgagcgggccgtgctggaggaggagtttcggtggctattgcacgacgaggttcatgcagttcttaagcaactgcaggatattctcaaggaagccagtctaagatttacgctaccagggtccggcacagagggaccggcaaagcaggagaatttcatcctaggcagttgcggaactgatcaggtgaaaggtgtgttgactctgcaaggggatgctttatcacaggctgatgtgaatctaaagatgccccggaataatcagctcttacacttcgccttccgggaggataagcaatggaaactgcaacaaattcaggacgcacggaatcatgtgagccaggccatctatctgttaacctccagggaccagagctatcagtttaagaccggggccgaggtgttgaaattaatggacgcagttatgctgcagctgacacgagcccgaaacaggcttaccaccccagccaccctcacactgcctgagattgctgcaagcggccttacacgaatgttcgccccagcgctgccttctgatctgctcgtcaatgtttacatcaacctgaacaagctttgtctcactgtttatcagctgcatgctttgcagcccaatagtactaagaacttcagacccgccgggggagccgttctccactcccccggggcgatgtttgaatggggcagccagcgactcgaggtatcccacgttcataaggtggagtgcgtgattccttggcttaacgacgctctggtgtatttcaccgtaagcctgcaactttgccagcaacttaaagacaagattagcgtctttagtagttactggtcatacaggcctttctag

SEQ ID NO: 215837 - DNA, 864 bp, Artificial Sequence
  derived and/or modified sequence
atggcaacggttatggcagcaactgctgccgagagagctgtgctcgaagaagagtttagatggttactgcacgacgaggtgcacgccgtgttgaaacagcttcaagacattctgaaggaagcttcactgcgattcaccttgcctgggtcgggaaccgaaggtcccgcaaagcaagagaacttcatcttgggatcctgtggcaccgatcaagttaagggtgtgcttactttgcagggagacgcccttagccaggctgacgtgaacttgaaaatgcccagaaataaccagttactacacttcgcattccgcgaggataagcagtggaagctccagcagatacaggatgcgaggaaccacgtgtcacaggcgatctacctgctgacatccagggaccagtcataccagttcaagaccggagcggaagtactgaagttgatggatgcagtgatgctgcaattgacacgagccaggaaccgcctgaccacccccgctacgctcactcttcccgaaatagcagcgagcggattaactaggatgttcgcacctgcacttccttctgacctgctggtcaacgtgtacattaacctcaacaagttatgcttgactgtgtaccaactgcatgccctgcaacccaattccacaaagaacttccggccagccggtggggctgtcctccactctccaggtgccatgtttgagtggggatcccagcgtctcgaggtgtcccacgtccataaagtagaatgcgtcatcccctggttgaacgatgctcttgtatatttcactgtgtcactccagctgtgtcagcagcttaaagataagatcagtgtgtttagctcatattggtcgtaccgcccattttag

SEQ ID NO: 215838 - DNA, 1735 bp, Artificial Sequence
  derived and/or modified sequence
tcctgggggcgccccgggagctccgcccccaagcgggcgccccaggctggtgccggccgcgtccctggccagccggagcaagcctgactcgtgcagccgccggccgcgtccctggccaggcggagcgagcctcactcccgcagccgccagtctggttccagggctcccgcaggtttcgggggccgaggcggaccgacaggcgccagccaatcgcgagcacggagccggcctgggggcggggtggtacccgctccgccaatcgggtgggggcggagccagacgccgggggcggacgggaggaccggaggaccgaggacagaaagattggtggacaggagcagcggccggtggggagggcgctcggcggcggcctgcggccatggccaccgtgatggcagcgacggcggcggagcgggcggtgctggaggaggagttccgctggctgctgcacgacgaggtgcacgctgtgttgaagcagctgcaggacatcctcaaggaggcctctctgcgcttcactctgccgggctccggcactgaggggcccgccaagcaagagaacttcatcctaggcagctgtggcacagaccaggtgaagggtgtgctgactctgcagggggatgccctcagccaggcggatgtgaacctgaagatgccccggaacaaccagctgctgcacttcgccttccgggaggacaagcagtggaagctgcagcagatccaggatgccagaaaccatgtgagccaagccatttacctgcttaccagccgggaccagagctaccagttcaagacgggcgctgaggtcctcaagctgatggacgcagtgatgctgcagctgaccagagcccgaaaccggctcaccacccccgccaccctcaccctccccgagatcgccgccagcggcctcacgcggatgttcgcccctgccctgccgtccgacctgctggtcaacgtctacatcaacctcaacaagctctgcctcacggtgtaccagctgcatgccctgcagcccaactccaccaagaacttccgcccagctgggggcgcggtgctgcatagccctggggccatgttcgagtggggctctcagcgcctggaggtgagccacgtgcacaaagtggagtgcgtgatcccctggctcaacgacgccctggtctacttcaccgtctccctgcagctctgccagcagctcaaggacaagatctccgtgttctccagctactggagctacagacccttctgatcacagcacccaggagcttgtctccaggaaggcggccccgtcccctactcatacccaccacagagcaccagccagtgccaacgccaggctgctatttatctccctatcccaccccctaccccacctaacacatttgcactgccgggaatggacactggaagtgccaggaggaaggaaggctggtttggtggggtagtggggaggtcagggaggcggggccaagggtgtcccacattcccaacaccgccctctgatcaccatgggaatctttggactcaggacagggccaggcgcagggctctccctcctctccccttcgctgtcccctccccctggagggcatggtgtcggggggtggcactgagctatgagtcccggggatggtgaggaacgccacagacagagccaccctaggagtgagtatagtgctggtgactgtgtttcatagccccagtccagggctgtctaagaaataaagatcatcagactcca

SEQ ID NO: 215839 - protein, 599 aa, Artificial Sequence
  derived and/or modified sequence
MAPRGCAGHPPPPSPQACVCPGKMLAMGALAGFWILCLLTYGYLSWGQALEEEEEGALLAQAGEKLEPSTTSTSQPHLIFILADDQGFRDVGYHGSEIKTPTLDKLAAEGVKLENYYVQPICTPSRSQFITGKYQIHTGLQHSIIRPTQPNCLPLDNATLPQKLKEVGYSTHMVGKWHLGFYRKECMPTRRGFDTFFGSLLGSGDYYTHYKCDSPGMCGYDLYENDNAAWDYDNGIYSTQMYTQRVQQILASHNPTKPIFLYIAYQAVHSPLQAPGRYFEHYRSIININRRRYAAMLSCLDEAINNVTLALKTYGFYNNSIIIYSSDNGGQPTAGGSNWPLRGSKGTYWEGGIRAVGFVHSPLLKNKGTVCKELVHITDWYPTLISLAEGQIDEDIQLDGYDIWETISEGLRSPRVDILHNIDPIYTKAKNGSWAAGYGIWNTAIQSAIRVQHWKLLTGNPGYSDWVPPQSFSNLGPNRWHNERITLSTGKSVWLFNITADPYERVDLSNRYPGIVKKLLRRLSQFNKTAVPVRYPPKDPRSNPRLNGGVWGPWYKEETKKKKPSKNQAEKKQKKSKKKKKKQQKAVSGSTCHSGVTCG

SEQ ID NO: 215840 - protein, 168 aa, Artificial Sequence
  derived and/or modified sequence
MAPGQQAMGSGTLQSSQPSECSTGLLTGNPGYSDWVPPQSFSNLGPNRWHNERITLSTGKSVWLFNITADPYERVDLSNRYPGIVKKLLRRLSQFNKTAVPVRYPPKDPRSNPRLNGGVWGPWYKEETKKKKPSKNQAEKKQKKSKKKKKKQQKAVSGSTCHSGVTCG

SEQ ID NO: 215841 - DNA, 1800 bp, Artificial Sequence
  derived and/or modified sequence
atggcgccgaggggctgtgcgggacacccaccacctccatcacctcaggcctgcgtgtgtcctggcaagatgctggccatgggggcactggcaggcttttggattctgtgcctgctgacctacgggtatctgtcctggggacaggctttggaagaagaggaggagggcgccttgctggcccaggcaggagagaaactggagccaagcacaacatctacttctcagccacatctgattttcatcctggccgatgatcagggcttccgagatgtgggatatcacggatctgaaataaaaactcccacgttggataaactcgccgccgaaggagtcaagctggaaaactactatgtgcagcccatctgtaccccttctcgtagtcagttcataactgggaagtatcaaatccataccgggctacagcatagcattatacggccaacccaaccaaactgtctgcctctggacaatgccaccctacctcaaaagctgaaggaagtgggctatagcacacatatggtgggaaaatggcacctgggtttttacagaaaggagtgtatgcccacccggcgtggctttgacaccttttttggttcactcctcggaagcggcgactactacactcactacaagtgcgactcaccaggcatgtgtggctacgatttgtatgaaaatgacaatgctgcctgggattacgacaacgggatctatagcacgcagatgtacacccaacgggtacagcagattttggcttctcataaccccactaaaccaatttttttgtatatcgcataccaggccgtacacagcccactgcaagcccctggtcgctacttcgaacattataggtccatcatcaatatcaatcggaggcggtacgccgccatgttgtcctgcctcgatgaggccattaataacgtcacccttgcacttaaaacctacggcttttataacaattcaatcatcatctattcctccgacaatggaggccagcctactgccggcgggtcaaactggcccttgaggggcagcaaaggtacctactgggaaggagggattcgcgctgtggggtttgtacatagtccactgttgaagaataaaggcaccgtatgtaaggaactggtgcatataacagattggtacccaacactaattagtctagctgaaggacagattgatgaagatatccagctcgacggatacgatatctgggagacaatctctgaaggcctgcgctcccccagggtggatatccttcataatatcgaccccatctataccaaagcaaagaatggctcttgggctgcaggctacggaatctggaacacggccattcaatcagccatcagggtgcagcactggaaactcctaaccggcaacccgggctacagtgactgggtgccaccacagtctttcagcaatctgggcccaaatagatggcacaacgagaggattacattgtctaccgggaagtccgtatggctcttcaacataacagctgatccatatgaaagggtggacttgtctaataggtatccaggtatcgtgaaaaagttattacggaggcttagtcagtttaataagaccgcagtgccagtgaggtatcctcccaaagaccctagaagcaacccacgactgaatgggggagtatgggggccttggtacaaggaggagactaagaaaaagaaaccttcgaagaaccaggccgaaaagaagcaaaagaaatccaaaaagaaaaagaagaaacagcaaaaagctgtgagcggatctacttgccatagtggggtaacttgcggctag

SEQ ID NO: 215842 - DNA, 1800 bp, Artificial Sequence
  derived and/or modified sequence
atggccccccggggctgtgccggccaccccccaccacccagcccccaggcctgtgtgtgccctgggaagatgctggccatgggcgccctggccggcttctggatcctgtgcctgctgacctacggctacctgtcctggggccaggccctggaggaggaggaggagggcgccctgctggcccaggccggggagaagctggagcccagcaccaccagcaccagccagccccacctgatcttcatcctggctgatgaccagggcttcagagatgtgggctaccacggcagcgagatcaagacccccaccctggacaagctggccgctgagggcgtgaagctggagaactactacgtgcagcccatctgcacccccagccgcagccagttcatcaccgggaagtaccagatccacacaggcctgcagcacagcatcatccggcccacccagcccaactgcctgcccctggacaatgccaccctgccccagaagctgaaggaggtgggctacagcacccacatggtgggcaagtggcacctgggcttctacagaaaagaatgcatgcccacccggcggggctttgacaccttcttcggcagcctgctgggcagcggggactactacacccactacaagtgtgacagccctggcatgtgtggctatgacctgtatgaaaatgacaatgctgcctgggactatgacaatggcatctacagcacccagatgtacacccagagggtgcagcagatcctggccagccacaaccccaccaagcccatcttcctgtacatcgcctaccaggccgtgcacagccccctgcaggcccctggccgctactttgagcactaccgcagcatcatcaacatcaacagaagaagatatgctgccatgctgagctgcctggatgaggccatcaacaacgtgaccctggccctgaagacctacggcttctacaacaacagcatcatcatctacagcagtgacaatggaggccagcccacagctgggggcagcaactggcccctgcggggcagcaagggcacctactgggagggcggcatccgggctgtgggctttgtgcacagccccctgctgaagaacaagggcaccgtgtgcaaggagctggtgcacatcacagactggtaccccaccctcatcagcctggccgagggccagattgatgaggacatccagctggatggctatgacatctgggagaccatcagcgagggcctgcggagcccccgggtggacatcctgcacaacatcgaccccatctacaccaaggccaagaatggctcctgggccgccggctacggcatctggaacacagccatccagagcgccatccgggtgcagcactggaagctgctgaccggcaaccctggctacagcgactgggtgcccccccagagcttcagcaacctgggccccaaccgctggcacaatgaaagaatcaccctgagcacaggcaagtctgtgtggctgttcaacatcacagctgacccctatgagcgggtggacctgagcaaccgctacccaggcatcgtgaagaagctgctgcggcggctgagccagttcaacaagacagctgtgcctgtgcgctacccacccaaggaccccaggagcaacccccggctgaatggaggagtgtggggcccctggtacaaggaggagaccaagaagaagaagcccagcaagaaccaggccgagaagaagcagaagaagagcaagaagaagaagaagaagcagcagaaggctgtgtctggcagcacctgccacagcggcgtgacctgtggctag

SEQ ID NO: 215843 - DNA, 1800 bp, Artificial Sequence
  derived and/or modified sequence
atggccccccggggctgcgccggccacccccccccccccagcccccaggcctgcgtctgcccagggaagatgttggcaatgggagccctcgccggtttttggatcctctgcctgctgacttacgggtatcttagctggggccaggccttggaagaagaagaagaaggtgcacttttggctcaggccggtgaaaagctggagccgagcacgactagcacgtcacagccgcacctgatttttattttagccgacgatcaggggttccgggacgtgggataccatggctcagagattaagacccctacactcgacaagctggccgcagaaggggtcaaactggagaactattatgtccagccgatctgtactccctcccggtcccaatttattaccggcaagtatcagatccacacggggttgcagcatagcatcatccggcccacccagcctaactgtctgccactcgacaatgccaccctgccgcagaaactgaaagaggtcggctatagcacacatatggtgggaaaatggcatctcggtttctataggaaggaatgtatgcccactagaaggggctttgacacattttttggctctctactggggagcggtgactactacacacactataagtgcgattccccaggcatgtgcggctatgatctgtatgagaatgacaatgccgcatgggattatgacaacgggatttacagcacacaaatgtatacgcagcgagtccaacagatcctggcctctcataatccaactaagccaatcttcctgtacatcgcctatcaggccgtgcatagccccctgcaggctccagggagatacttcgagcactatcgctccataattaatatcaatcgtagaaggtatgctgctatgctctcttgcctggacgaggccatcaacaacgttacgttagctctgaaaacttacggcttctacaacaatagcatcattatatactcctctgataatggtggtcagcctacggcaggcggatccaactggcccctccggggctcaaagggcacttactgggagggaggtattcgcgctgtgggcttcgtgcattcccccctgctgaagaacaagggaactgtgtgcaaagagctggtacatatcacagattggtaccccacgttaatttccctcgcggagggacaaatcgacgaggacattcagctggacggctacgacatctgggagacaatctccgagggcctgaggagcccccgcgtggacatcctccacaacattgacccgatctataccaaggcaaaaaatggcagctgggctgcgggctatgggatttggaataccgctatccagagcgcgataagggttcaacattggaagttgctgaccgggaaccctggctattccgactgggtcccccctcagtccttctccaaccttggccctaatcgctggcataatgaaagaattacactgtccactggaaagagcgtgtggctgttcaatatcacagccgatccctatgagcgggtcgatctctctaaccggtatccaggtatcgttaagaaacttctcagacgattgtcccagttcaacaaaaccgccgttcccgttcgctacccccccaaggatccacgctctaaccctagactgaatggcggtgtctgggggccatggtacaaggaggagaccaagaagaaaaagccctctaaaaatcaggcagagaagaagcaaaaaaagtccaaaaaaaaaaagaaaaagcagcagaaggcagtttccggctctacctgtcactctggagtgacctgtggctag

SEQ ID NO: 215844 - DNA, 1800 bp, Artificial Sequence
  derived and/or modified sequence
atggctccacgcggttgcgccggacaccctcccccaccatcccctcaggcgtgcgtctgtcccggtaagatgctggccatgggagcccttgcgggattctggattctgtgtctgcttacctacggatatctgtcatggggccaagctctggaggaagaagaggaaggagcactcctggctcaagccggtgagaagcttgaacctagtacaacttcaactagtcagccacatctgatcttcatcctcgcggatgatcagggtttccgcgacgtcggctatcatgggtcagagattaaaacgcccacactggataagttggctgccgagggtgtgaagctggaaaactactatgtgcagcccatctgtaccccttctaggagccagtttatcactgggaaatatcaaatccataccggtctccagcacagcatcatccgccctacacaaccgaactgcctccccctagataacgccacgctgccacagaaactcaaggaagtgggatactcgactcacatggttggaaagtggcacttgggcttttatcgcaaagaatgcatgcccactaggagagggtttgataccttcttcggaagcttactgggatccggtgattactacacccactacaagtgtgacagtcctggtatgtgtgggtatgatctctacgagaacgataatgccgcttgggactacgataatggcatatacagtacacagatgtacacacaacgggtacagcagatcctcgcttcacacaaccccaccaaacctatattcctgtatatagcttaccaggctgtgcatagcccgcttcaggctcccggaagatatttcgaacattataggagcattattaatattaatagaaggagatatgctgccatgctgtcatgcctcgacgaggccataaataatgtgactttggccctcaagacgtacgggttttataataatagtatcatcatatactcttctgataatggcggacaacccaccgccggtggttctaactggccactccgtggttccaaggggacctattgggaaggtggaattcgtgcagtagggtttgtgcactcccccctcttgaagaacaagggaaccgtgtgcaaagagctggtgcacattaccgattggtatcctaccctgatatcgctcgccgaaggacaaatcgacgaggacatacaactggacggctacgacatatgggaaaccatttctgagggcctacggtctcccagagtcgacatccttcataacatcgatcctatctacacaaaggcaaagaatgggagctgggcagcaggctatgggatctggaacaccgccatccagtcagctattcgggtgcagcattggaagctcctgacggggaacccaggctatagtgattgggtgcctccgcagagcttctccaacttaggccctaataggtggcacaacgagagaattaccctgtctaccggcaaaagcgtttggctattcaatatcactgcagacccctatgagcgtgtcgatctgagtaacaggtaccccggtatcgtcaagaagctattaagaaggctgtcccagttcaacaaaactgccgtgccagtgagatatcctcccaaggatcctaggtctaacccaaggctgaacggaggagtgtggggaccctggtataaggaagagactaaaaaaaaaaaaccctccaagaaccaggcagagaagaagcagaagaaaagcaagaaaaagaagaagaaacagcaaaaggccgtttcaggatccacttgccactcaggggtgacctgtggctag

SEQ ID NO: 215845 - DNA, 4657 bp, Artificial Sequence
  derived and/or modified sequence
ggcaaaagaactcggagtgccaaagctaaataagttagctgagaaaacgcacgcagtttgcagcgcctgcgccgggtgcgccaactacgcaaagaccaagcgggctccgcgcggaccggccgcggggctagggacccggctttggccttcaggctccctagcagcggggaaaaggaattgctgcccggagtttctgcggaggtggagggagatcaggaaacggcttcttcctcacttcgccgcctggtgagtgtcggggagattggcaaacgcctaggaaaggactggggaaaatagccctgggaaagtggagaaggtgatcaggaggccggtccactacggcagtttatctgtctgatcagagccagacgcgacgcgtccacttcgcagttctttccaggtgtggggaccgcaggacagacggccgatcccgccgccctccgtaccagcactcccaggagagtcagcctcgctccccaacgtcgagggcgctctggccacgaaaagttcctgtccactgtgattctcaattccttgcttggtttttttctccagagaacttttgggtggagatattaacttttttcttttttttttccttggtggaagctgctctagggaggggggaggaggaggagaaagtgaaatgtgctggagaagagcgagccctccttgttcttccggagtcccatccattaagccatcacttctggaagattaaagttgtcggacatggtgacagctgagaggagaggaggatttcttgccaggtggagagtcttcaccgtctgttgggtgcatgtgtgcgcccgcagcggcgcggggcgcgtggttctccgcgtggagtctcacctgggacctgagtgaatggctcccaggggctgtgcggggcatccgcctccgccttctccacaggcctgtgtctgtcctggaaagatgctagcaatgggggcgctggcaggattctggatcctctgcctcctcacttatggttacctgtcctggggccaggccttagaagaggaggaagaaggggccttactagctcaagctggagagaaactagagcccagcacaacttccacctcccagccccatctcattttcatcctagcggatgatcagggatttagagatgtgggttaccacggatctgagattaaaacacctactcttgacaagctcgctgccgaaggagttaaactggagaactactatgtccagcctatttgcacaccatccaggagtcagtttattactggaaagtatcagatacacaccggacttcaacattctatcataagacctacccaacccaactgtttacctctggacaatgccaccctacctcagaaactgaaggaggttggatattcaacgcatatggtcggaaaatggcacttgggtttttacagaaaagaatgcatgcccaccagaagaggatttgataccttttttggttcccttttgggaagtggggattactatacacactacaaatgtgacagtcctgggatgtgtggctatgacttgtatgaaaacgacaatgctgcctgggactatgacaatggcatatactccacacagatgtacactcagagagtacagcaaatcttagcttcccataaccccacaaagcctatatttttatatattgcctatcaagctgttcattcaccactgcaagctcctggcaggtatttcgaacactaccgatccattatcaacataaacaggaggagatatgctgccatgctttcctgcttagatgaagcaatcaacaacgtgacattggctctaaagacttatggtttctataacaacagcattatcatttactcttcagataatggtggccagcctacggcaggagggagtaactggcctctcagaggtagcaaaggaacatattgggaaggagggatccgggctgtaggctttgtgcatagcccacttctgaaaaacaagggaacagtgtgtaaggaacttgtgcacatcactgactggtaccccactctcatttcactggctgaaggacagattgatgaggacattcaactagatggctatgatatctgggagaccataagtgagggtcttcgctcaccccgagtagatattttgcataacattgaccccatatacaccaaggcaaaaaatggctcctgggcagcaggctatgggatctggaacactgcaatccagtcagccatcagagtgcagcactggaaattgcttacaggaaatcctggctacagcgactgggtcccccctcagtctttcagcaacctgggaccgaaccggtggcacaatgaacggatcaccttgtcaactggcaaaagtgtatggcttttcaacatcacagccgacccatatgagagggtggacctatctaacaggtatccaggaatcgtgaagaagctcctacggaggctctcacagttcaacaaaactgcagtgccggtcaggtatccccccaaagaccccagaagtaaccctaggctcaatggaggggtctggggaccatggtataaagaggaaaccaagaaaaagaagccaagcaaaaatcaggctgagaaaaagcaaaagaaaagcaaaaaaaagaagaagaaacagcagaaagcagtctcaggttcaacttgccattcaggtgttacttgtggataagcacaaatatttcctgtttggttaaactttaatcagttcttatctttcatctgtttcctaggtaaaccagcaaatttggctcgataatatcgctggcctaagcgtcaggcttgttttcatgctgtgccactccagagacttctgccacctggccgccacactgaaaactgtcctgctcagtgccaaggtgctactcttgcaagccacacttagagagagtggagatgtttatttctcttgctcctttagaaaacgtggtgagtcctgagttccactgctgtgcttcagtcaactgaccaaacactgctttgaattataggaggagaacaataacctaccatccgcaagcatgctaatttgatggaagttacagggtataccatccgcaagcatgctaatttgatggaagttacagggtagcatgattaaaactacctttgataaattacagtcaaagattgtgtcacctcaaaggccttgaagaatatattttcttggtgaatttttgtatgtctgtcatatgacacttgggttttttaattaattctattttatatatatatatatgtttcttttcctgtgaaaagctgtttttctcacatgtgaacagcttgcacctcattttaccatgcgtgagggaatggcaaataagaatgtttgagcacactgcccacaatgaatgtaactattttctaaacactttactagaagaacatttcagtataaaaaacctaatttatttttacagaaaaatattttgttgtttttataaaaagttatgcaaatgactttattttatttttatttcctgcataccattagaataattttatttcatttcttcaaattaccaagcactgtaatactataaattaatgtaatactgtgtgaattcagactataaaaaacatcattcagaaaactttataatcgtcattgttcaaccaagattttgaatgtaataagatgaatatattccttacaaattacttggaaattcaatgtttgtgcagagttgagacaactttattgtttctatcataaactatttatgtatcttaattattaaaatgatttactttatggcactagaaaatttactgtggcttttctgatctaacttctagctaaaattgtatcattggtcctaaaaaataaaaatctttactaataggcaattgaaggaatggtttgctaacaaccacagtaatataatatgattttacagatagatgcttccccttggctatgacatggagaaagattttcccataataataactaacatttatattaggttggtgcaaaactagttgcggtttttcccattaaaagtaataaacttactcttatacaaagtggacactgtggggagatacagagaaatggaagatacggatcctgcctggagtaggtaaccttgcttggaaaccccacatgcaaacgtcatgaggagaattaaaggagtattatcagtaatgaagtttatcatgggtcatcaatgagcatagattggtgtggatcctgtagaccctggtgttttctttgaagtgccctctcctaatgcagaggccttgaagcttacagtatacacttgaaaagtcacagatagctagaattatgatctttgaagttataactgtgatctgaaaatgtgtgtggtggtatgacagcataccattaaatacatttacatcacagctcaaaggactgtgatataatccatttatatcacaactcaaaggactgtgatataatccatttatatcacagctcacagtttctgaaaatgtataaaagaatctataatctagtactgaaattactaaattgggtaagatgatttaaatgattttaattttaacattttatttctagaatatatggctccattttattttatagtgtaaagttgtatttcctaaagtttgtgttttgtcgacagtatcttttaaatgagtcttaaaaataaaggcatattgttcatgtt

SEQ ID NO: 215846 - DNA, 1800 bp, Artificial Sequence
  derived and/or modified sequence
atggcccccagaggctgcgccggccacccccccccccccagcccccaggcctgcgtgtgccccggcaagatgctggccatgggcgccctggccggcttctggatcctgtgcctgctgacctacggctacctgagctggggccaggccctggaggaggaggaggagggcgccctgctggcccaggccggcgagaagctggagcccagcaccaccagcaccagccagccccacctgatcttcatcctggccgacgaccagggcttcagagacgtgggctaccacggcagcgagatcaagacccccaccctggacaagctggccgccgagggcgtgaagctggagaactactacgtgcagcccatctgcacccccagcagaagccagttcatcaccggcaagtaccagatccacaccggcctgcagcacagcatcatcagacccacccagcccaactgcctgcccctggacaacgccaccctgccccagaagctgaaggaggtgggctacagcacccacatggtgggcaagtggcacctgggcttctacagaaaggagtgcatgcccaccagaagaggcttcgacaccttcttcggcagcctgctgggcagcggcgactactacacccactacaagtgcgacagccccggcatgtgcggctacgacctgtacgagaacgacaacgccgcctgggactacgacaacggcatctacagcacccagatgtacacccagagagtgcagcagatcctggccagccacaaccccaccaagcccatcttcctgtacatcgcctaccaggccgtgcacagccccctgcaggcccccggcagatacttcgagcactacagaagcatcatcaacatcaacagaagaagatacgccgccatgctgagctgcctggacgaggccatcaacaacgtgaccctggccctgaagacctacggcttctacaacaacagcatcatcatctacagcagcgacaacggcggccagcccaccgccggcggcagcaactggcccctgagaggcagcaagggcacctactgggagggcggcatcagagccgtgggcttcgtgcacagccccctgctgaagaacaagggcaccgtgtgcaaggagctggtgcacatcaccgactggtaccccaccctgatcagcctggccgagggccagatcgacgaggacatccagctggacggctacgacatctgggagaccatcagcgagggcctgagaagccccagagtggacatcctgcacaacatcgaccccatctacaccaaggccaagaacggcagctgggccgccggctacggcatctggaacaccgccatccagagcgccatcagagtgcagcactggaagctgctgaccggcaaccccggctacagcgactgggtgcccccccagagcttcagcaacctgggccccaacagatggcacaacgagagaatcaccctgagcaccggcaagagcgtgtggctgttcaacatcaccgccgacccctacgagagagtggacctgagcaacagataccccggcatcgtgaagaagctgctgagaagactgagccagttcaacaagaccgccgtgcccgtgagatacccccccaaggaccccagaagcaaccccagactgaacggcggcgtgtggggcccctggtacaaggaggagaccaagaagaagaagcccagcaagaaccaggccgagaagaagcagaagaagagcaagaagaagaagaagaagcagcagaaggccgtgagcggcagcacctgccacagcggcgtgacctgcggctag

SEQ ID NO: 215847 - protein, 318 aa, Artificial Sequence
  derived and/or modified sequence
MAPWAEAEHSALNPLRAVWLTLTAAFLLTLLLQLLPPGLLPGCAIFQDLIRYGKTKCGEPSRPAACRAFDVPKRYFSHFYIISVLWNGFLLWCLTQSLFLGAPFPSWLHGLLRILGAAQFQGGELALSAFLVLVFLWLHSLRRLFECLYVSVFSNVMIHVVQYCFGLVYYVLVGLTVLSQVPMDGRNAYITGKNLLMQARWFHILGMMMFIWSSAHQYKCHVILGNLRKNKAGVVIHCNHRIPFGDWFEYVSSPNYLAELMIYVSMAVTFGFHNLTWWLVVTNVFFNQALSAFLSHQFYKSKFVSYPKHRKAFLPFLF

SEQ ID NO: 215848 - DNA, 957 bp, Artificial Sequence
  derived and/or modified sequence
atggccccctgggccgaggccgagcacagcgccctgaaccccctgagagccgtgtggctgaccctgaccgccgccttcctgctgaccctgctgctgcagctgctgccccccggcctgctgcccggctgcgccatcttccaggacctgatcagatacggcaagaccaagtgcggcgagcccagcagacccgccgcctgcagagccttcgacgtgcccaagagatacttcagccacttctacatcatcagcgtgctgtggaacggcttcctgctgtggtgcctgacccagagcctgttcctgggcgcccccttccccagctggctgcacggcctgctgagaatcctgggcgccgcccagttccagggcggcgagctggccctgagcgccttcctggtgctggtgttcctgtggctgcacagcctgagaagactgttcgagtgcctgtacgtgagcgtgttcagcaacgtgatgatccacgtggtgcagtactgcttcggcctggtgtactacgtgctggtgggcctgaccgtgctgagccaggtgcccatggacggcagaaacgcctacatcaccggcaagaacctgctgatgcaggccagatggttccacatcctgggcatgatgatgttcatctggagcagcgcccaccagtacaagtgccacgtgatcctgggcaacctgagaaagaacaaggccggcgtggtgatccactgcaaccacagaatccccttcggcgactggttcgagtacgtgagcagccccaactacctggccgagctgatgatctacgtgagcatggccgtgaccttcggcttccacaacctgacctggtggctggtggtgaccaacgtgttcttcaaccaggccctgagcgccttcctgagccaccagttctacaagagcaagttcgtgagctaccccaagcacagaaaggccttcctgcccttcctgttctag

SEQ ID NO: 215849 - DNA, 957 bp, Artificial Sequence
  derived and/or modified sequence
atggcgccatgggccgaagcggagcacagtgctctgaatccactgcgcgccgtgtggctgaccctgacggcggcattcctgctaacactgctgcttcaacttttgccacccggtctgctgccggggtgtgccatcttccaggacctgattaggtacggaaaaacaaaatgcggagaaccaagcaggcctgctgcttgcagggccttcgatgtgccaaagcggtacttcagccatttttacattatcagcgtgctttggaacgggttccttctctggtgtctaacacaaagtttgtttctgggcgccccattccccagctggctgcatgggttgctgcgtatcctgggtgccgcccagtttcaggggggcgagctggctttgtcagcattcctggtcttagtgttcctctggctgcactccctccggaggctttttgaatgtttatacgtctccgtgttctccaatgtgatgattcacgtggtgcagtactgctttggcttagtctactatgttcttgttggactgaccgtcctctctcaagtacccatggatggccgtaatgcatacattaccggaaagaatctcctcatgcaggcgcgttggtttcacatccttggtatgatgatgttcatatggtcgtccgctcaccagtacaaatgccacgtcatcctgggcaatctgcgcaagaacaaggccggcgtggtgattcactgcaaccacaggatcccttttggcgattggtttgagtacgtctcttctcccaactacctggccgagctgatgatctatgtgagtatggccgttacattcggatttcacaacttaacctggtggcttgtggtgacaaacgtcttttttaaccaagccctcagtgctttcctgtcgcaccaattctataagagcaagtttgtctcttatcccaagcatagaaaggcattcttaccgtttctcttctag

SEQ ID NO: 215850 - DNA, 957 bp, Artificial Sequence
  derived and/or modified sequence
atggccccctgggccgaggccgagcacagcgccctgaaccccctgcgggctgtgtggctgaccctgacagctgccttcctgctgaccctgctgctgcagctgctgcccccaggcctgctgcccggctgtgccatcttccaggacctgatccgctatggcaagaccaagtgtggggagcccagcaggcctgctgcctgccgggcctttgatgtgcccaagcgctacttcagccacttctacatcatctctgtgctgtggaatggcttcctgctgtggtgcctgacccagagcctcttcctgggcgcccccttccccagctggctgcacggcctgctgcgcatcctgggcgccgcccagttccagggcggggagctggccctgagcgccttcctggtgctggtgttcctgtggctgcacagcctgcggcggctgtttgagtgcctgtatgtgtctgtgttcagcaatgtgatgattcatgtggtgcagtactgcttcggcctggtgtactacgtgctggtgggcctgactgtgctgagccaggtgcccatggatggaagaaatgcctacatcaccgggaagaacctgctgatgcaggcccgctggttccacatcctgggcatgatgatgttcatctggagcagcgcccaccagtacaagtgccacgtgatcctgggcaacctgaggaagaacaaggccggcgtggtgatccactgcaaccaccgcatcccctttggagactggtttgaatatgtgagcagccccaactacctggccgagctgatgatctacgtgtccatggctgtgaccttcggcttccacaacctgacctggtggctggtggtgaccaacgtgttcttcaaccaggccctgagcgccttcctgagccaccagttctacaagagcaagtttgtgtcctaccccaagcacaggaaggccttcctgcccttcctgttctag

SEQ ID NO: 215851 - DNA, 957 bp, Artificial Sequence
  derived and/or modified sequence
atggccccctgggccgaggccgagcacagcgccctgaaccccctgagagctgtgtggctgactctcaccgctgcatttctgctaacgttgctcctgcaactcctgccacccgggttgctgcccgggtgtgcaatctttcaggacctaattagatacgggaagacaaagtgtggtgagccgtcccgacctgcagcttgtcgcgcttttgacgtgcccaagagatatttcagccacttctacataatttctgtgctctggaatggcttcctgctctggtgcttgactcaaagcttgttcctcggcgccccttttccgtcttggttgcatggactactgcgcatccttggcgccgcgcagttccagggtggtgaactcgcactgtccgcctttctagtcctggtgtttctctggctgcacagcctgcgacggctgtttgagtgtctctacgtgtctgttttcagcaacgttatgatacatgtggttcagtactgcttcggcctggtgtattatgtcctggtcggtctcaccgtcctgtcacaggtccccatggacgggaggaacgcctacatcactggaaagaacctcttaatgcaggccagatggttccatatcctcggtatgatgatgttcatttggagttcggctcaccagtataagtgtcacgtgatcctcgggaaccttcgcaaaaataaagccggcgtggtcatccattgtaaccataggattcctttcggggactggttcgagtatgtgtctagcccaaattatctcgccgaactcatgatctatgttagcatggcagtgaccttcggatttcacaatctcacatggtggcttgtggtaacgaatgtcttcttcaaccaggcgctctctgccttcctctcacaccagttttacaaaagcaagttcgtgtcttaccctaagcacaggaaagcttttcttcccttcctcttctag

SEQ ID NO: 215852 - DNA, 957 bp, Artificial Sequence
  derived and/or modified sequence
atggcaccatgggcggaggcagagcacagcgcacttaaccccctgagggcggtgtggctgactttaaccgccgcattcctgttaacccttttactgcagctcctgccccctggcctcctccctggctgcgctatcttccaggaccttatcagatatggcaaaaccaagtgcggcgaacctagccgaccggcagcctgtcgcgcatttgatgtaccaaaaagatacttttctcacttctacataatatctgtgttgtggaatggatttctcctctggtgtctgacccaatccctcttcctcggggcaccctttccaagctggctacacgggctgcttcggatccttggggctgcccagtttcagggtggagaactggcactatcagccttccttgtcctggtgtttttgtggttacactccctccggcgtctgttcgaatgcctgtatgtgtccgtgttctctaacgttatgattcatgttgttcaatattgtttcggacttgtatactacgttctggtcggattgaccgtgcttagtcaggtcccaatggacggtaggaacgcttatattaccgggaagaaccttctgatgcaggcccgatggtttcacatactggggatgatgatgtttatctggtctagtgcccaccagtataagtgtcacgtaattctgggaaacctgcgaaaaaacaaggccggagtggtgattcactgtaaccatcgtattcccttcggtgactggttcgagtacgtaagtagcccgaactatttggccgaactaatgatctacgtttctatggccgtgactttcggcttccataatctgacatggtggctggtggttaccaatgtgttttttaatcaggctttgagtgcatttctgagtcaccagttttacaaatctaagtttgtatcttacccaaagcaccgcaaggcttttcttccttttctgttttag

SEQ ID NO: 215853 - DNA, 4190 bp, Artificial Sequence
  derived and/or modified sequence
atgcccagattagggactgcgagcgaccacccagcgccagcgcgaccaggaccaaggacctccgcggctgagcggcgagtccgggaggggctctgcgcgtccccgccccgcgccgcgtcaccgacgtcccgctaggctgagaccggtgcgccgcgcgctagtggccgctcttccgcgggctagcgggcggtgggggcgccagcagcgcggaaggcgggcacgcgggccatggctccctgggcggaggccgagcactcggcgctgaacccgctgcgcgcggtgtggctcacgctgaccgccgccttcctgctgaccctactgctgcagctcctgccgcccggcctgctcccgggctgcgcgatcttccaggacctgatccgctatgggaaaaccaagtgtggggagccgtcgcgccccgccgcctgccgagcctttgatgtccccaagagatatttttcccacttttatatcatctcagtgctgtggaatggcttcctgctttggtgccttactcaatctctgttcctgggagcaccttttccaagctggcttcatggtttgctcagaattctcggggcggcacagttccagggaggggagctggcactgtctgcattcttagtgctagtatttctgtggctgcacagcttacgaagactcttcgagtgcctctacgtcagtgtcttctccaatgtcatgattcacgtcgtgcagtactgttttggacttgtctattatgtccttgttggcctaactgtgctgagccaagtgccaatggatggcaggaatgcctacataacagggaaaaatctattgatgcaagcacggtggttccatattcttgggatgatgatgttcatctggtcatctgcccatcagtataagtgccatgttattctcggcaatctcaggaaaaataaagcaggagtggtcattcactgtaaccacaggatcccatttggagactggtttgaatatgtttcttcccctaactacttagcagagctgatgatctacgtttccatggccgtcacctttgggttccacaacttaacttggtggctagtggtgacaaatgtcttctttaatcaggccctgtctgcctttctcagccaccaattctacaaaagcaaatttgtctcttacccgaagcataggaaagctttcctaccatttttgttttaagttaacctcagtcatgaagaatgcaaaccaggtgatggtttcaatgcctaaggacagtgaagtctggagcccaaagtacagtttcagcaaagctgtttgaaactctccattccatttctataccccacaagttttcactgaatgagcatggcagtgccactcaagaaaatgaatctccaaagtatcttcaaagaataaatactaatggcagatctgcgatttctgggtccactttctgagatgctttctaaaaccaaccaactgataaaaagtagatgagacttctccaagctgcttcacaagcaaactaaccgaaaaaccgaaaatatacaaacagcttcacacacacacacacacacacacacacacacacacacacacaaaggaagatcatcaatggctgcggtagcctagtaggaatggactatataataatatagcaggtgctcaataactgtttgttgcatttcagtaaaagcagaataacctttcaaaataataacaggctgggtgcaatggctcacacctgttaatcccagcacttcgggaggccaaggtgggcagttcgcttgggcccaagagttcgagaccagcctgggcaacatggtgaaaccctatctccgtgaaaaaatatgaaaattagccaagagtggtggcacatgcctgtagtcccagatacttgggagtgggctgagatgggagaatcgcttgagcccaggaggtcaagggtacagtgagccgaggtcatgccactgcactccagcctggcctgggcaacagagcaagaccctgtctcaaaataataataatatataattttacaccaaaagtttcaggaaaaaacgagtttgttggagttagtttatactttcacatatcaccacaaagatctccagttaaataactatcaatatccatttccattcatctccccctcaaatcatagcctaacagaacactttgaaagctcttttatttaatatttttttacatcctttgaagggagtgcttcaaaaatgaaagcatcagaagataaaatatttttatatttatgcatagcaagccttcgtgaacggaagtgacacactctggattgaataatactgtagcctcattcatatgtagttattcaaattggattaatgtctgtgtgagtttatttgaactagcagaaagtatctgaagatattcaggaataaagtttatacttaaaatagcttatgttaaagaaaatacctgtgattaattcagagggaaataaatgcatggtataaaagaaaaccaaaaacttaaaaaataatactatagcctgagcaacacattaaaactgcacacttgtgcagcgtaagattctctggcttattggctgaggtgttaagtttattccttttatgaagatgtcctattacagtcagctaagcactaaagctttgcatttatatgtactttgctatgggggaaagaaccttatgattaataagacacatatcaaatgcatagtcaatcattcccacccccatccctggagctgtaacccaaaactgttaaactaagattcctttgttttttttgtttttttgagatggagtctcactctgtcgcccagactggagtgcagtggtgggatcctggctcactgcaacctccgccttctgggttccagcgattctcctctgcctcagcctcccaagtagctgggattacaggcacatgccaccatgcccaggtaattgttgtatttttagtagagatagagtttcaccatgttggccaggctggtctcaaactcctgacctcaggtgatccacctgcttcggcctcccaaagtgctgggattacaggtgtaagtcactgctcccggatgcatgtcaagcacattggaaagttcttacaacaattctgatggaggattttctctcccatcaaccaaacaccacttaagattaacctgtggctcagtctacttaaataaatgccatatttattttacttatcatttagaatttgccattctcaggaacaaaactttttgtacattggaaatggaaaacattgcagtttggtcttaatttccacatgaatatcaagtgtaatttttaataaattatttggagaaaaatgtattttattttagcatgcaattttatgcccaggttagactagagatttggctgatgttctggaatctcattgtactcttaagtaaaataacgagcatcccatgacgcaccctgtcaggggttgtgagaaagctgcagtgtccagtttcccacccctgtttcctgctgtctctctcccactcatccctgtttcttactcatcccttttccttctttgcccaaacatcatatttctaggcaaagataagagaggagatagtgatgtcctgaaaggggttcagaacaacgtagcatggcctttggtgaaagcgtcaccgatgggaaataattgagaattgtgcagtgcttgcagcgtcagaatcagcactgttttttgtgttggtgaaaatattccatgtgcgtaaagggagagcatcagggactttgcaaattcttcacaaggacccagaaatagcttaaagattcatggttttcctgttggcttaaatagccttaatctttcattttctactaccattaagtcggggaaatgacattgaactacctcattagcagccttcccttgattaactactgactaaaagtgtgctgaaaatggcctttgtttttgtgaagctcatcctatacactaacatttgcttaaccatggattattttgtctctacaaagctgtgccctgtattcgatttttacttcaatgagtggttattgctagaattcctacaaaaaaaaaaaaaaccgttgcagatatttttgtatgtagcttaatagatatttagtttaaggagactgcaacatttgcataaggtgcctaaaaactcaagaaccattgataagtgagatcactcaaaatgagctgatatattaaagaagaccttaaaacag

SEQ ID NO: 215854 - protein, 835 aa, Artificial Sequence
  derived and/or modified sequence
MAAPILKDVVAYVEVWSSNGTENYSKTFTTQLVDMGAKVSKTFNKQVTHVIFKDGYQSTWDKAQKRGVKLVSVLWVEKCRTAGAHIDESLFPAANMNEHLSSLIKKKRKCMQPKDFNFKTPENDKRFQKKFEKMAKELQRQKTNLDDDVPILLFESNGSLIYTPTIEINSRHHSAMEKRLQEMKEKRENLSPTSSQMIQQSHDNPSNSLCEAPLNISRDTLCSDEYFAGGLHSSFDDLCGNSGCGNQERKLEGSINDIKSDVCISSLVLKANNIHSSPSFTHLDKSSPQKFLSNLSKEEINLQRNIAGKVVTPDQKQAAGMSQETFEEKYRLSPTLSSTKGHLLIHSRPRSSSVKRKRVSHGSHSPPKEKCKRKRSTRRSIMPRLQLCRSEDRLQHVAGPALEALSCGESSYDDYFSPDNLKERYSENLPPESQLPSSPAQLSCRSLSKKERTSIFEMSDFSCVGKKTRTVDITNFTAKTISSPRKTGNGEGRATSSCVTSAPEEALRCCRQAGKEDACPEGNGFSYTIEDPALPKGHDDDLTPLEGSLEEMKEAVGLKSTQNKGTTSKISNSSEGEAQSEHEPCFIVDCNMETSTEEKENLPGGYSGSVKNRPTRHDVLDDSCDGFKDLIKPHEELKKSGRGKKPTRTLVMTSMPSEKQNVVIQVVDKLKGFSIAPDVCETTTHVLSGKPLRTLNVLLGIARGCWVLSYDWVLWSLELGHWISEEPFELSHHFPAAPLCRSECHLSAGPYRGTLFADQPAMFVSPASSPPVAKLCELVHLCGGRVSQVPRQASIVIGPYSGKKKATVKYLSEKWVLDSITQHKVCAPENYLLSQ

SEQ ID NO: 215855 - DNA, 2508 bp, Artificial Sequence
  derived and/or modified sequence
atggccgcccccatcctgaaggacgtggtggcctacgtggaggtgtggagcagcaacggcaccgagaactacagcaagaccttcaccacccagctggtggacatgggcgccaaggtgagcaagaccttcaacaagcaggtgacccacgtgatcttcaaggacggctaccagagcacctgggacaaggcccagaagagaggcgtgaagctggtgagcgtgctgtgggtggagaagtgcagaaccgccggcgcccacatcgacgagagcctgttccccgccgccaacatgaacgagcacctgagcagcctgatcaagaagaagagaaagtgcatgcagcccaaggacttcaacttcaagacccccgagaacgacaagagattccagaagaagttcgagaagatggccaaggagctgcagagacagaagaccaacctggacgacgacgtgcccatcctgctgttcgagagcaacggcagcctgatctacacccccaccatcgagatcaacagcagacaccacagcgccatggagaagagactgcaggagatgaaggagaagagagagaacctgagccccaccagcagccagatgatccagcagagccacgacaaccccagcaacagcctgtgcgaggcccccctgaacatcagcagagacaccctgtgcagcgacgagtacttcgccggcggcctgcacagcagcttcgacgacctgtgcggcaacagcggctgcggcaaccaggagagaaagctggagggcagcatcaacgacatcaagagcgacgtgtgcatcagcagcctggtgctgaaggccaacaacatccacagcagccccagcttcacccacctggacaagagcagcccccagaagttcctgagcaacctgagcaaggaggagatcaacctgcagagaaacatcgccggcaaggtggtgacccccgaccagaagcaggccgccggcatgagccaggagaccttcgaggagaagtacagactgagccccaccctgagcagcaccaagggccacctgctgatccacagcagacccagaagcagcagcgtgaagagaaagagagtgagccacggcagccacagcccccccaaggagaagtgcaagagaaagagaagcaccagaagaagcatcatgcccagactgcagctgtgcagaagcgaggacagactgcagcacgtggccggccccgccctggaggccctgagctgcggcgagagcagctacgacgactacttcagccccgacaacctgaaggagagatacagcgagaacctgccccccgagagccagctgcccagcagccccgcccagctgagctgcagaagcctgagcaagaaggagagaaccagcatcttcgagatgagcgacttcagctgcgtgggcaagaagaccagaaccgtggacatcaccaacttcaccgccaagaccatcagcagccccagaaagaccggcaacggcgagggcagagccaccagcagctgcgtgaccagcgcccccgaggaggccctgagatgctgcagacaggccggcaaggaggacgcctgccccgagggcaacggcttcagctacaccatcgaggaccccgccctgcccaagggccacgacgacgacctgacccccctggagggcagcctggaggagatgaaggaggccgtgggcctgaagagcacccagaacaagggcaccaccagcaagatcagcaacagcagcgagggcgaggcccagagcgagcacgagccctgcttcatcgtggactgcaacatggagaccagcaccgaggagaaggagaacctgcccggcggctacagcggcagcgtgaagaacagacccaccagacacgacgtgctggacgacagctgcgacggcttcaaggacctgatcaagccccacgaggagctgaagaagagcggcagaggcaagaagcccaccagaaccctggtgatgaccagcatgcccagcgagaagcagaacgtggtgatccaggtggtggacaagctgaagggcttcagcatcgcccccgacgtgtgcgagaccaccacccacgtgctgagcggcaagcccctgagaaccctgaacgtgctgctgggcatcgccagaggctgctgggtgctgagctacgactgggtgctgtggagcctggagctgggccactggatcagcgaggagcccttcgagctgagccaccacttccccgccgcccccctgtgcagaagcgagtgccacctgagcgccggcccctacagaggcaccctgttcgccgaccagcccgccatgttcgtgagccccgccagcagcccccccgtggccaagctgtgcgagctggtgcacctgtgcggcggcagagtgagccaggtgcccagacaggccagcatcgtgatcggcccctacagcggcaagaagaaggccaccgtgaagtacctgagcgagaagtgggtgctggacagcatcacccagcacaaggtgtgcgcccccgagaactacctgctgagccagtag

SEQ ID NO: 215856 - DNA, 2508 bp, Artificial Sequence
  derived and/or modified sequence
atggccgcacccattctcaaagatgttgttgcctacgttgaggtctggagctctaatggaactgaaaactacagtaagacattcacaacccagctggtcgacatgggcgccaaggtttccaaaacctttaacaagcaggttacacacgtgatcttcaaagatggttaccagtccacttgggataaggcccagaagagaggcgtaaaactggtttctgtcctgtgggtagaaaagtgccgcaccgctggggcccatattgacgagtcactatttcccgccgccaacatgaatgaacacctcagctccctaataaagaaaaagcgaaagtgtatgcagcctaaggactttaactttaagactcctgaaaatgacaagcggttccagaagaaattcgagaaaatggccaaggaactgcagcgccagaaaacaaatcttgatgacgatgtgccaatcctgctcttcgaatccaacggtagcttgatctatacaccaactatcgagatcaacagcagacaccatagcgccatggagaaaagactacaggagatgaaggagaaaagggagaacttgagcccaactagttcccagatgatccaacagtcccatgacaatccaagcaattcgctctgtgaggctcccctaaatattagccgggacaccctctgctcagatgaatactttgctggaggcctgcactcaagctttgacgacctgtgcggcaacagtggatgcgggaatcaggagaggaagttggagggtagtatcaacgacattaagtctgatgtgtgcattagctcgctggttctcaaggccaataacatccactccagcccatctttcacacacttggataaaagcagccctcagaagtttctgtcaaacctttcgaaagaggagattaaccttcaacgtaacatcgccggcaaagtggtgacgcccgaccagaaacaggccgccggcatgtcccaggagacattcgaggaaaaatataggctatcccctactcttagcagtacaaaggggcatcttctcattcactctcgtccacgcagctctagtgttaaacgcaagcgtgtgagtcatggctcccactctcctccaaaggaaaagtgtaaacggaaaagaagcaccagacgatccattatgccaaggctgcagctgtgccgctcggaggataggctccagcatgtggcgggtccagctttggaagccctgtcttgtggagagtcaagctacgacgactatttttcccccgacaacctgaaggagcggtacagcgaaaacctaccacctgagtcacaactacccagctctccggcacagctgtcctgtcgaagtttgtccaaaaaagaacgcacatcaattttcgaaatgagtgacttcagttgcgtcggaaagaagacccgcaccgtcgacattacgaattttaccgctaaaaccataagctccccacgaaagacaggcaacggcgagggaagagccacatccagctgtgtcaccagcgctccagaggaagccttgaggtgctgccgtcaggctggtaaagaggatgcttgtcctgaggggaacgggttcagctacacgatagaggatccagcactcccgaaggggcacgatgatgatctgacaccgcttgaggggtctctggaagaaatgaaagaagccgtaggcctcaaatctacacagaataaaggcacgacatccaaaatctcaaacagctctgagggggaggcccagtcagagcacgagccgtgttttatcgtggattgcaatatggaaactagcaccgaggaaaaagaaaatctgcctggtggctactccgggagcgttaagaacagacctacgcgccatgacgtcctggatgatagctgtgacgggtttaaagatcttattaagcctcacgaggagctcaaaaagagcggcagaggaaaaaaaccaacaagaacactggtgatgactagcatgccctccgagaagcaaaatgttgtgattcaggtggtggacaagttgaaaggcttttccatcgccccagacgtctgcgaaacaacgacacatgttctgtcaggcaaacccctccgcacactcaacgtgttactgggcattgctagaggatgctgggtcttgagctatgattgggtgctttggtctctggaactgggacactggattagtgaggaacccttcgagctcagccatcactttcccgcggccccactttgcagaagcgagtgtcacctttccgccggcccttatagaggcaccttgttcgccgatcagccagcgatgttcgtgtcccccgcctccagtccacctgtggccaagctctgtgagcttgtgcatctttgtggcggtagagtatcgcaggttcctaggcaggccagcattgtgattggcccatacagcggtaaaaagaaagccacagtcaaatatctgtcagagaaatgggtgttagattccatcactcagcacaaagtgtgtgcccctgaaaactacctgctgagtcagtag

SEQ ID NO: 215857 - DNA, 2508 bp, Artificial Sequence
  derived and/or modified sequence
atggccgcccccatcctgaaggatgtggtggcctacgtggaggtgtggagcagcaatggaacagagaactacagcaagaccttcaccacccagctggtggacatgggcgccaaggtgtccaagaccttcaacaagcaggtgacccacgtgatcttcaaggatggctaccagagcacctgggacaaggcccagaagaggggcgtgaagctggtgtctgtgctgtgggtggagaagtgcaggacagctggggcccacattgatgagagcctcttccctgctgccaacatgaatgagcacctgagcagcctcatcaagaagaagaggaagtgcatgcagcccaaggacttcaacttcaagaccccagaaaatgacaagcgcttccagaagaagtttgagaagatggccaaggagctgcagaggcagaagaccaacctggatgatgatgtgcccatcctgctgtttgagagcaatggcagcctcatctacacccccaccatcgagatcaacagccgccaccacagcgccatggagaagaggctgcaggagatgaaggagaagcgggagaacctgagccccaccagcagccagatgatccagcagagccatgacaaccccagcaacagcctgtgtgaggcccccctgaacatcagccgggacaccctgtgcagtgatgagtactttgctgggggcctgcacagcagctttgatgacctgtgtggcaacagcggctgcggcaaccaggagaggaagctggagggcagcatcaatgacatcaagagtgatgtgtgcatcagcagcctggtgctgaaggccaacaacatccacagcagccccagcttcacccacctggacaagagcagcccccagaagttcctgagcaacctgagcaaggaggagatcaacctgcagaggaacattgctgggaaggtggtgaccccagaccagaagcaggccgccggcatgagccaggagacctttgaggagaagtaccgcctgagccccaccctgagcagcaccaagggccacctgctgatccacagccggcccaggagcagctctgtgaagaggaagagggtgagccacggcagccacagcccccccaaggagaagtgcaagaggaagaggagcacccggcgcagcatcatgccccggctgcagctgtgccgctcagaagatcggctgcagcacgtggccggccctgccctggaggccctgagctgtggggagagcagctatgatgactacttctccccagacaacctgaaggagcgctacagcgagaacctgcccccagagagccagctgcccagcagccctgcccagctgagctgccgcagcctgagcaagaaggagaggaccagcatctttgagatgtctgacttcagctgtgtgggcaagaagaccaggacagtggacatcaccaacttcaccgccaagaccatcagcagccccaggaagacaggaaatggagagggccgggccaccagcagctgtgtgaccagcgcccctgaggaggccctgcgctgctgccggcaggccggcaaggaggatgcctgcccagagggcaatggcttctcctacaccatcgaggaccctgccctgcccaagggccatgatgatgacctgacccccctggagggcagcctggaggagatgaaggaggccgtgggcctgaagagcacccagaacaagggcaccaccagcaagatcagcaacagcagcgagggggaggcccagagcgagcacgagccctgcttcatcgtggactgcaacatggagaccagcacagaggagaaggagaacctgcccggcggctacagcggctctgtgaagaaccggcccaccaggcatgatgtgctggatgacagctgtgatggcttcaaggacctgatcaagccccatgaggagctgaagaagagcggccggggcaagaagcccaccaggaccctggtgatgacctccatgcccagcgagaagcagaatgtggtgatccaggtggtggacaagctgaagggcttcagcatcgccccagatgtgtgtgagaccaccacccacgtgctgagcggcaagcccctgcggaccctgaatgtgctgctgggcatcgcccggggctgctgggtgctgtcctatgactgggtgctgtggagcctggagctgggccactggatcagcgaggagccctttgagctgagccaccacttccctgctgcccccctgtgccgctctgagtgccacctgtctgctggcccctaccggggcaccctgtttgctgaccagcctgccatgtttgtgtccccagccagcagcccccctgtggccaagctgtgtgagctggtgcacctgtgtggcggccgggtgtcccaggtgccccggcaggccagcatcgtgattggcccctacagcggcaagaagaaggccaccgtgaagtacctgtctgagaagtgggtgctggacagcatcacccagcacaaggtgtgtgcccctgagaactacctgctgagccagtag

SEQ ID NO: 215858 - DNA, 3158 bp, Artificial Sequence
  derived and/or modified sequence
gcatgcccagtgcccgcgcgcgccgccaggctcgcaagcaccgcgtaggccagctggccggatcccgccgtctgtcatggcggcccccatcctgaaagatgtagtggcctatgttgaagtgtggtcatccaatggaacagaaaattattcaaagacatttacaacacagcttgtggatatgggggcaaaggtttcaaaaacttttaacaaacaagtaactcacgttatcttcaaagatggctaccagagcacttgggacaaagctcagaagagaggcgtaaagctcgtttcggtgctctgggtggaaaaatgcaggacagctggagcacacattgatgaatcattgttccctgcagctaatatgaatgaacacttatcaagcctaattaaaaaaaaacgtaaatgtatgcagcccaaagattttaattttaaaacaccagaaaatgataagagatttcagaagaaatttgagaaaatggctaaagagctacaaaggcaaaaaacaaatctagatgatgatgtacctattctcttatttgaatctaatggttcattaatatatactcccacaattgaaattaatagtaggcaccacagcgcaatggagaagagattacaagagatgaaggagaaaagggaaaatctttcccccacctcttcccaaatgattcagcagtctcatgataatccaagtaactctctgtgtgaagcacctttgaacatttcacgtgatactttgtgttcagatgaatactttgctggtggcttacactcatcttttgatgatctttgtggaaactcaggatgtggaaatcaggaaaggaagttggaaggatccattaatgacattaaaagtgatgtgtgtatttcttcacttgtattgaaagcaaataatattcattcatcaccatctttcactcacctcgataaatcaagtcctcagaaatttctgagtaatctttcaaaggaagaaataaacttgcaaagaaatattgcaggtaaagtagtcacccctgaccaaaagcaggctgcaggtatgtctcaggagacgtttgaagagaagtatcgtttgtctcctaccttatcttcaacaaaaggccaccttttgatacattcaagacccaggagttcctcagtaaagagaaaaagagtatcacatggctcccattcacctccgaaggaaaaatgcaagagaaagaggagcaccaggagatctatcatgccgaggctgcagctgtgcaggtcggaagacaggctgcagcacgtggcgggacctgccctggaggctcttagctgtggggagtcttcatatgatgactatttttcacctgataatcttaaggaaaggtattcagagaatcttcctcctgaatctcagctgccatcaagccctgctcagttgagctgcagaagtctttctaagaaggagagaacaagcatatttgaaatgtctgatttttcctgcgttggcaaaaaaaccagaacagttgacattaccaatttcacagcaaaaaccatctccagtcctcggaaaactggaaatggtgaaggccgtgcaacttcgagttgcgtgacttctgcccctgaagaagccctaaggtgttgtagacaggctgggaaagaagacgcatgcccagagggaaatggcttttcttacaccattgaggaccctgctcttccaaaaggacatgatgatgatttaactcctttggaaggaagccttgaagaaatgaaagaagcggttggtctgaaaagcacacagaacaaaggtaccacttccaaaatatcaaactcctctgaaggcgaagcccagagtgaacatgagccatgttttatagttgactgtaacatggagacgtctacagaagagaaggaaaacttacccggaggatacagtggaagtgttaaaaatagaccaacaaggcatgatgttttagatgactcatgtgacggctttaaggacctcatcaaacctcatgaggaattgaagaaaagtgggagaggcaaaaagccaacaagaacattagtcatgacaagcatgccatctgaaaagcagaatgtcgtcatccaggttgtggataaattgaaaggcttttcaattgcaccagacgtctgtgagaccacgactcacgtgctttccgggaagccacttcgcaccctgaatgtgctgctgggaattgcgcgtggctgctgggttctctcttatgattgggtgctatggtctttagaattgggtcactggatttctgaggagccgttcgaactgtctcaccacttccctgcagctcccctgtgccgaagcgagtgccacttgtctgcagggccgtaccgcggaaccctctttgccgaccagccagcgatgtttgtctcgcctgccagcagccccccagtggccaagctctgtgaactagtccacctgtgcggaggccgggtcagccaagtcccccgccaggccagcatcgtcatcgggccctacagcggaaagaagaaagccacagtcaagtatctgtctgagaaatgggtcttagattccatcacccagcacaaggtctgtgcccctgaaaactacctattgtcacaatgacagtgacctcactggcctgtggtgactgcacacagctcgcaaaactgtctttggatgttcaaatgagaaacaaaactgtgaagagaaggaactggcgtatacaagatgacttctgatatcatgtttgccatgtgttgtggttcttaagaactcataggtgactttctgatgactgaatgtctgtttcagagacgcttcgggcctttttatttttattttattttttattttttgagacggagtcctgccctgtttcccaggctggagtgcaatggcacaatctcggctcactgcaacctccacctcccaggttcaagcgattctgctgcctcagcctcctgagtagctgggattacagatgtgtgccaccatgcctggctaatttttgtagttttagtagagacagggtttcgccatgttggccaggctggtctcaaacgcctgagctcaggtgatctgtcaggcctcttctatagaattccagtctttgtgtcttagtcatgatcataattgaaaggtcacagaacctttgtcattagagcacagtactgccaaataaagaatggaaattcaa

SEQ ID NO: 215859 - DNA, 2508 bp, Artificial Sequence
  derived and/or modified sequence
atggccgcccccatcctgaaggacgtggtggcctacgtggaggtgtggagttctaacggcactgagaattactcaaaaacatttaccacacagttggtggatatgggagctaaggtaagcaagacctttaacaaacaggtcacccacgtgatcttcaaggatgggtaccagtccacatgggacaaggcccagaagcgcggggtgaaactcgtttctgtcctgtgggtggagaagtgtagaaccgccggcgctcacattgacgagtccctcttcccggccgcaaacatgaacgagcacctttcatccctgataaaaaagaagaggaaatgcatgcagcccaaggattttaattttaaaacaccggagaatgacaaaaggtttcagaaaaagttcgagaagatggccaaggaactgcagcggcagaaaaccaacctggatgacgacgttcctattctgctctttgagagcaatgggagcctgatttacacacccacaattgagattaattctaggcatcatagtgccatggagaagagactccaagagatgaaggagaagagggaaaatctgagcccgacctctagccagatgatccaacagagtcacgacaatcccagtaattcgctctgcgaggcccccctaaacataagccgggacactttgtgttctgacgagtatttcgctggtggccttcactccagctttgacgatctgtgcggaaatagtgggtgtgggaaccaagagcgtaaattagaaggatcgataaatgacataaaatctgatgtgtgtatatctagcttggtgctcaaagcaaataatattcacagtagcccctcctttacccacttagacaaatcttctccacagaaattcctttcaaaccttagtaaagaggagattaatctgcaacggaacattgccggcaaggtcgtgacccccgatcagaagcaagccgcagggatgagccaagaaaccttcgaggaaaaatatagactcagccctactctaagttccaccaaaggacatctattgattcattcacgcccccgctccagcagcgtgaagagaaagagggtgtcccatggaagtcacagtcctcccaaagagaagtgtaagagaaaacgatcaactaggcgctccatcatgccacgccttcagctctgtagatccgaggacaggctgcagcatgtagccgggcctgctctagaagccctgagctgtggggaaagttcctatgacgactacttttcgccagataatcttaaggaaagatacagcgagaacttgccgcccgagagtcagctgcctagctcgccagcccagttgtcttgtcgcagcctgtctaaaaaggaaagaacgtctattttcgagatgtctgacttcagttgcgtcggcaagaagaccagaacggttgacattactaattttactgccaagactatcagttcaccccgaaagacgggcaacggggaaggccgggccactagctcatgtgtaacgtccgcccccgaagaggccctccgttgttgtcgacaagcggggaaagaggacgcctgtccagagggcaatggtttctcatataccatcgaagatccggcactcccgaaaggccacgatgatgacctgactcccctcgaagggtctctggaggagatgaaggaagccgtcggcctgaagagtacgcaaaacaagggtaccacaagcaagatctccaactcctccgagggtgaggcccagagtgagcatgaaccatgttttatcgttgattgcaacatggagacctcaaccgaagagaaggagaacctaccagggggctactcaggaagcgttaagaaccgacccacacggcacgacgtgctagacgacagctgtgatgggttcaaagatctgatcaagccacacgaagagttaaagaaaagtggaagggggaagaaaccaaccaggacactggtaatgacctccatgcccagcgagaagcagaatgtggttatccaggttgttgacaagctcaaggggttctccatcgcccccgatgtctgtgagacaaccactcatgtccttagcgggaagcccttaaggacactgaacgtcctgctcggcatagctcgtggctgttgggtgctatcttatgactgggtcctatggagcttggagcttggccactggatcagcgaagagcctttcgagctttcccaccattttcctgctgcaccactgtgtaggagcgagtgccatctctccgccggtccttacaggggtactctctttgcagaccagcccgctatgttcgtaagcccagcttctagcccaccagtagcgaagctctgcgaactcgttcacctgtgtggtggaagggtgtcccaggtcccaagacaggcttctatcgttataggtccgtattcaggcaagaagaaggcgaccgtcaagtacctttccgagaagtgggtgctggactccattacacagcataaagtttgtgcacccgagaactacttgctctctcagtag

SEQ ID NO: 215860 - DNA, 2508 bp, Artificial Sequence
  derived and/or modified sequence
atggcagcacccatccttaaagatgttgtggcttacgtggaagtttggtcctccaacggtaccgagaactactccaaaaccttcacaacccagttagtggacatgggggcaaaggtgtcaaagacctttaacaaacaggtgacacacgttatctttaaagatgggtatcagagcacctgggataaagcccagaaacgcggagtcaagctggttagtgtgctctgggtggaaaaatgtcggaccgctggggctcacatcgacgaaagcctgtttcctgccgctaatatgaatgagcacctttcctcactgattaaaaagaagcggaagtgtatgcagcctaaggatttcaacttcaaaactcccgagaacgacaaacggtttcaaaagaagttcgaaaagatggcgaaagaactacagcgccagaagacaaatttagatgacgatgtgccaatcttgctgtttgaaagtaacggctccctgatatatacgccgactatagagattaattcccgacatcatagtgctatggaaaaacgactacaggagatgaaagagaagagagagaacttatctccgacatcctcccagatgattcagcagtcgcacgataacccttctaattcattgtgcgaggccccattgaacattagtagggacaccctgtgttcagacgaatatttcgccggagggctccactcttcctttgacgacctctgcggcaattccggctgcggtaatcaggagagaaaactggaggggagcatcaacgacatcaaatctgacgtgtgcatctccagtttggtgttgaaagccaataacatccatagcagccctagctttacccatcttgacaagtcctctccccagaagttcctcagtaacttatccaaggaggagatcaacctacagcggaatatcgcaggcaaagtggtgacgccggatcagaaacaagctgccggaatgagtcaagagaccttcgaggagaagtatcggctgagtcctacattatccagcactaagggccacctgctcatccactcaagacccaggtcaagctctgtcaaaagaaaacgggtatctcacggctcccattcaccaccgaaagaaaagtgtaaacgtaaaaggtcgacccgaaggtctattatgccaagactgcagctctgcaggagtgaggacaggttacaacacgtagctggaccagcactggaagcactgtcatgcggggaaagctcatatgacgattatttcagtcccgataacttaaaagaacgctattcggaaaatctgccccctgaaagccagcttccctcttcccctgctcagctgtcgtgtcgcagtcttagtaaaaaggaacgaacaagcatatttgaaatgtcggatttttcatgtgtgggcaagaagaccaggaccgtagacataaccaacttcaccgcaaaaactatatcatctcctagaaagactggcaatggcgagggtcgcgcaacgagctcttgcgttacatcagcaccagaggaagcacttcgctgctgtcgccaggcaggaaaggaggacgcctgccccgaaggcaatggctttagctacactatcgaggatccggctctccccaaaggccatgatgacgatcttactccactggagggcagcctcgaggagatgaaggaagctgtaggcttaaaaagtacccagaacaagggaaccacaagcaagatttcaaacagctccgagggggaagcacagagtgagcatgaaccttgttttatagtagactgcaacatggaaactagcactgaggagaaggagaacctaccaggtggttacagcggttcggtcaaaaaccgtcccacaagacacgacgtactcgatgactcctgtgatgggttcaaggatctcattaaacctcatgaggagctaaagaagtctggcagaggtaagaaacccacaagaacacttgtgatgacgtcaatgccctcggagaaacagaatgtggtgatccaggttgtggataagttaaaaggattctccatagccccagatgtttgtgaaaccactacgcacgtactttcaggaaagccattacggactctaaatgtgcttctcggaatagctagaggatgttgggtgcttagttacgactgggtcttatggagcctggaactggggcattggatttctgaagagcccttcgagctttctcaccatttcccagctgccccactctgccgaagtgaatgccatctgtccgctggaccttacagaggaactctgttcgctgatcagcctgcaatgtttgtctctccagcgtcaagtccacctgtcgccaagttgtgcgagctggtccacttatgcggcggtcgagtgtctcaggttccaagacaggcgtcaattgtcataggaccctattccggcaagaagaaagctactgttaagtacctctctgaaaaatgggtgttggattctattacccagcacaaagtatgcgctccagagaactatcttctgagccaatag

SEQ ID NO: 215861 - protein, 265 aa, Artificial Sequence
  derived and/or modified sequence
MSAAPLVGYSSSGSEDESEDGMRTRPGDGSHRRGQSPLPRQRFPVPDSVLNMFPGTEEGPEDDSTKHGGRVRTFPHERGNWATHVYVPYEAKEEFLDLLDVLLPHAQTYVPRLVRMKVFHLSLSQSVVLRHHWILPFVQALKARMTSFHRFFFTANQVKIYTNQEKTRTFIGLEVTSGHAQFLDLVSEVDRVMEEFNLTTFYQDPSFHLSLAWCVGDARLQLEGQCLQELQAIVDGFEDAEVLLRVHTEQVRCKSGNKFFSMPLK

SEQ ID NO: 215862 - protein, 213 aa, Artificial Sequence
  derived and/or modified sequence
MSPLPRQRFPVPDSVLNMFPGTEEGPEDDSTKHGGRVRTFPHERGNWATHVYVPYEAKEEFLDLLDVLLPHAQSVVLRHHWILPFVQALKARMTSFHRFFFTANQVKIYTNQEKTRTFIGLEVTSGHAQFLDLVSEVDRVMEEFNLTTFYQDPSFHLSLAWCVGDARLQLEGQCLQELQAIVDGFEDAEVLLRVHTEQVRCKSGNKFFSMPLK

SEQ ID NO: 215863 - DNA, 798 bp, Artificial Sequence
  derived and/or modified sequence
atgagcgccgcccccctggtgggctacagcagcagcggcagcgaggacgagagcgaggacggcatgagaaccagacccggcgacggcagccacagaagaggccagagccccctgcccagacagagattccccgtgcccgacagcgtgctgaacatgttccccggcaccgaggagggccccgaggacgacagcaccaagcacggcggcagagtgagaaccttcccccacgagagaggcaactgggccacccacgtgtacgtgccctacgaggccaaggaggagttcctggacctgctggacgtgctgctgccccacgcccagacctacgtgcccagactggtgagaatgaaggtgttccacctgagcctgagccagagcgtggtgctgagacaccactggatcctgcccttcgtgcaggccctgaaggccagaatgaccagcttccacagattcttcttcaccgccaaccaggtgaagatctacaccaaccaggagaagaccagaaccttcatcggcctggaggtgaccagcggccacgcccagttcctggacctggtgagcgaggtggacagagtgatggaggagttcaacctgaccaccttctaccaggaccccagcttccacctgagcctggcctggtgcgtgggcgacgccagactgcagctggagggccagtgcctgcaggagctgcaggccatcgtggacggcttcgaggacgccgaggtgctgctgagagtgcacaccgagcaggtgagatgcaagagcggcaacaagttcttcagcatgcccctgaagtag

SEQ ID NO: 215864 - DNA, 798 bp, Artificial Sequence
  derived and/or modified sequence
atgtcagccgctccgctggttggatacagctcgagcggctcagaagatgaatctgaggacggtatgcgcaccaggcccggtgacggcagccaccggaggggccagagtcccttgccacggcaaagattcccagtgcccgatagcgtgctgaacatgttccccgggacagaagagggccctgaagacgattccactaaacacggcggccgggtgagaacatttccacacgaacggggcaactgggccacccatgtgtacgtgccatacgaagctaaagaagagttcctcgatctcttggacgtgctcttgccccacgctcagacctacgtaccacggctcgtcaggatgaaagtgttccacctttcccttagtcagtctgtggtcttgaggcaccactggatactgccttttgtccaagctctaaaggctcgaatgacatcattccatagattcttctttacagccaaccaggtcaagatttatactaatcaagagaagacaaggacctttataggtctagaggtaacatcagggcacgctcaatttctagatctcgtgtccgaagtcgaccgggtgatggaagagttcaacttgactacattttaccaagacccctccttccatctgagtctcgcctggtgtgtcggggacgcccgcctgcagctggagggtcagtgcttgcaggaacttcaggctatcgtcgatggtttcgaggacgctgaggtcctgctcagggtgcataccgagcaggttaggtgtaaaagcggaaataaatttttctccatgcccctgaaatag

SEQ ID NO: 215865 - DNA, 798 bp, Artificial Sequence
  derived and/or modified sequence
atgtctgctgcccccctggtgggctacagcagcagcggctctgaagatgaaagtgaagatggcatgaggaccaggcctggagatggcagccaccggcggggccagagccccctgccccggcagcgcttccctgtgcctgacagcgtgctgaacatgtttcctggaacagaggagggcccagaagatgacagcaccaagcatggaggccgggtgaggaccttcccccatgagcggggcaactgggccacccacgtgtatgtgccctatgaggccaaggaggagttcctggacctgctggatgtgctgctgccccacgcccagacctacgtgccccggctggtgaggatgaaggtgttccacctgagcctgagccagagcgtggtgctgcggcaccactggatcctgccctttgtgcaggccctgaaggccaggatgaccagcttccaccgcttcttcttcaccgccaaccaggtgaagatctacaccaaccaggagaagaccaggaccttcatcggcctggaggtgaccagcggccacgcccagttcctggacctggtgtctgaggtggacagagtgatggaggagttcaacctgaccaccttctaccaggaccccagcttccacctgagcctggcctggtgtgtgggagatgcccggctgcagctggagggccagtgcctgcaggagctgcaggccatcgtggatggctttgaagatgctgaggtgctgctgcgggtgcacacagagcaggtgcgctgcaagagcggcaacaagttcttctccatgcccctgaagtag

SEQ ID NO: 215866 - DNA, 798 bp, Artificial Sequence
  derived and/or modified sequence
atgagcgccgcccccctggtgggctacagcagcagcggcagcgaggacgagagcgaggacggcatgaggactcggccgggtgacggatctcacaggcgcggccagtctccactcccacgacaaaggttcccagttcccgactctgtactgaatatgtttcccggtaccgaggaggggcctgaggacgattccaccaaacatggcggacgcgtgagaaccttcccgcatgagcgcgggaactgggcgacccacgtttacgtgccttacgaagcgaaggaggagttcctcgacttgctggacgtcctgctgccccatgcacagacctacgttcctcggctggtgcgcatgaaagtgttccacctgagccttagtcaatctgtggttttgagacaccactggatactccctttcgtgcaggcgctgaaggcccggatgacgtccttccacagatttttttttactgctaaccaggtgaaaatctacaccaatcaggagaagacaagaaccttcatcggtctagaagtgacttcaggacatgcccagttcctggacctcgtgtccgaagttgacagggttatggaggagttcaatctaacaacgttctaccaggatccttcattccatttaagcctggcgtggtgcgtgggtgacgcgaggctgcagcttgaaggacagtgtctgcaggagctgcaggcaatcgtcgacggtttcgaggacgcagaggtcctcctgcgggtgcataccgagcaggtgcgctgcaaaagcggcaataagttcttcagcatgcccctaaagtag

SEQ ID NO: 215867 - DNA, 798 bp, Artificial Sequence
  derived and/or modified sequence
atgagtgctgcacctctggttggttattcatcctccggtagcgaggatgagagcgaagatgggatgaggactcgccctggggatggctcccaccggagagggcagagtcctctgccgaggcagagattcccggttcccgattcggtcctaaacatgtttcccggaacagaggagggaccagaggatgacagcacaaagcacgggggtcgcgtgcggaccttcccccatgagaggggcaactgggctactcacgtgtatgtaccctatgaggcaaaagaagagtttctggacttactggatgtcctgctacctcacgcccagacctatgtgcccagactggtccggatgaaagtgttccacctctctctgtcacagtcggtggttttgaggcatcattggatcctgccattcgtgcaggctctcaaagcaaggatgacaagcttccacagattcttcttcaccgccaatcaggtaaagatttacactaatcaggagaagactagaacattcattgggctggaggtgacttctggccacgcacagttccttgatctagtttccgaggtggatcgagttatggaagaatttaacctcacgaccttttaccaagatccaagcttccacttatccctggcctggtgcgtaggcgatgctaggctgcagctcgaggggcagtgtctgcaggaattgcaggctattgtggatggcttcgaggatgcggaagtgctcctcagagtgcatactgaacaggttagatgtaagtcgggcaataagttcttttccatgccattaaagtag

SEQ ID NO: 215868 - DNA, 2254 bp, Artificial Sequence
  derived and/or modified sequence
gagggcgcttccggcacagcggaactccgggtgccggttgaggttgctggtggacctgctctggtggtcttggatgaggccccatgagcgcggcgcccctggtgggctacagcagcagcggctccgaggatgagtccgaggacgggatgcggaccaggccgggggatgggagccaccgtcgtggccagagcccccttcccaggcagagatttccagtacctgacagtgtgctgaacatgttcccgggcaccgaggaggggcctgaagatgacagcacaaaacacgggggacgggtgcgcaccttcccccacgagcgaggcaactgggccacccacgtctatgtaccatatgaagccaaggaggagttcctggatctgcttgatgtgttgctgccccatgcccagacatatgtcccccggctggtaaggatgaaggtgttccacctcagcctgtcccagagtgtggttctgcgccaccactggatcctccccttcgtgcaggctctgaaagcccgtatgacctccttccacagattcttctttactgccaaccaggtaaagatttacaccaatcaagagaaaaccaggacctttattgggcttgaggtcacttcagggcatgcccagttcctggacctggtttcagaggtggacagagtcatggaggaattcaacctcaccactttctaccaggatccttctttccacctcagcctggcctggtgtgtgggtgatgcacgtctccagctggaggggcagtgcctgcaggaactacaggcaatcgtggatgggtttgaagatgctgaggtgctgctgcgcgtgcacactgagcaagtccgctgcaagtctgggaacaagttcttctcgatgcctttgaagtgagcaccagaggccttcctcctccagggccctctgcagaccaggctgagatggaggaacctgctaaaatcgatggagatgcttctagcctcccagtaggaggccccagccatgccttcaacctggcaggaggtgtagccactcctcatcctccctgagtgctgatattctctctctctctttctcttcctcttctttctctctcttctcctctctttctctcctctgtctctcttcctctcctctcttcctctcttctctcttcctctcctctctctcttcctcttctctctcttcccctcctgtctctcctcccctcctctcttcctctcctctctcttcctctcctctctctacccctcctgtctctcctcccctcctctctcttcctctcctctctctcttcctctcctctctcttcccttcctgtctctcttcccctcctctctctcttcctgtcctctatctcttcccctcctctatctcttcctctcctctctctcttcctctcctctctctctcttgctttcttctctctctcctgtctcggctgttgtgggttgcaggttgggtgctgctgttgtggtccttcccagaaactgccagtagagggcagcctgggcatcctaatgcttactctggttgttacacaaagaaaatattggggtcactggcgagcccacccacactcaccagaatctccactgtagtccccctaacaaacagcccttcacttcctctcccacttcagcaatttgtattttgatgccattggcctcagatcagagtgttttaaatcatcacgccctggcttatccctggtcgagccaggacacggggtgcttcagtgggtctgtcaccctctctccttgaagcatgttgcttttatttatttacttttactctcaccctgctcctgtaccagcaggggccacttcaaagccaaggtacagggtgataacttgtggtccagcatcagttttctccacttctttctcccactcacccccagcaaggtgcctggggagacttgagcagatgtttcattttggcctggccagtggctgaaagccaggcctccaatgcactgtgacctctggcttccccagcagctttcccagagaggcagaggggccttccacagcccgggttctcctgctgcctcctgcctgctgcagctgcaggcattctgaggggcaacgtggaggaagggccagggatgcatgggattttaattgtttcatcacaccttccccgtggcaaagaaacagtcagtcctcttcaggtgtcttctggatttctggtgatggacagagaaatctttttacagtttcaaattatgttcaacaaataaaaattgcattttttattttgga

SEQ ID NO: 215869 - protein, 856 aa, Artificial Sequence
  derived and/or modified sequence
MASADKNGGSVSSVSSSRLQSRKPPNLSITIPPPEKETQAPGEQDSMLPEGFQNRRLKKSQPRTWAAHTTACPPSFLPKRKNPAYLKSVSLQEPRSRWQESSEKRPGFRRQASLSQSIRKGAAQWFGVSGDWEGQRQQWQRRSLHHCSMRYGRLKASCQRDLELPSQEAPSFQGTESPKPCKMPKIVDPLARGRAFRHPEEMDRPHAPHPPLTPGVLSLTSFTSVRSGYSHLPRRKRMSVAHMSLQAAAALLKGRSVLDATGQRCRVVKRSFAFPSFLEEDVVDGADTFDSSFFSKEEMSSMPDDVFESPPLSASYFRGIPHSASPVSPDGVQIPLKEYGRAPVPGPRRGKRIASKVKHFAFDRKKRHYGLGVVGNWLNRSYRRSISSTVQRQLESFDSHRPYFTYWLTFVHVIITLLVICTYGIAPVGFAQHVTTQLVLRNKGVYESVKYIQQENFWVGPSSIDLIHLGAKFSPCIRKDGQIEQLVLRERDLERDSGCCVQNDHSGCIQTQRKDCSETLATFVKWQDDTGPPMDKSDLGQKRTSGAVCHQDPRTCEEPASSGAHIWPDDITKWPICTEQARSNHTGFLHMDCEIKGRPCCIGTKGSCEITTREYCEFMHGYFHEEATLCSQVHCLDKVCGLLPFLNPEVPDQFYRLWLSLFLHAGVVHCLVSVVFQMTILRDLEKLAGWHRIAIIFILSGITGNLASAIFLPYRAEVGPAGSQFGLLACLFVELFQSWPLLERPWKAFLNLSAIVLFLFICGLLPWIDNIAHIFGFLSGLLLAFAFLPYITFGTSDKYRKRALILVSLLAFAGLFAALVLWLYIYPINWPWIEHLTCFPFTSRFCEKYELDQVLH

SEQ ID NO: 215870 - DNA, 2571 bp, Artificial Sequence
  derived and/or modified sequence
atggctagcgccgataagaatggcggtagtgtttcctctgtctctagcagccgtctccagtcaaggaagccaccgaatctcagcataaccattccccccccagaaaaagagacccaggcccccggagaacaagatagtatgttgcctgaaggattccagaacagaagacttaaaaaaagtcagccaaggacttgggccgcccacacgacggcctgtccaccatcgttcctgcccaagaggaagaacccagcctacctcaagtcggtgagcttacaagagccacgcagtcggtggcaggagtcaagcgaaaagagacctggttttcgcaggcaggcatcactcagccaatcaattagaaagggcgctgcccagtggtttggggtctcaggggactgggaaggtcagcgccaacaatggcaacgcagatcccttcaccattgcagtatgaggtatggtcgtctgaaggctagctgccagagggatctggagctgccctcccaggaagctccttcatttcagggcaccgaatccccgaaaccttgtaaaatgccaaagatcgtggatcccctggcccggggtcgcgctttccggcatcccgaagagatggacagaccacatgcacctcacccgccactgacccccggcgtgctgtcactcactagtttcacttcggtgaggtcaggatactcgcaccttccacgcagaaagcggatgtcagtcgcacacatgtctcttcaggccgccgcggctctgctgaagggaagatctgtgctggatgcaactgggcagcgctgtcgtgtagtcaagcgaagcttcgcattcccttcattcctggaggaggacgtggtggacggggctgacacctttgattccagtttttttagcaaggaagaaatgtcaagtatgcccgatgatgtgtttgagtcaccacctttatcagcatcatatttccgggggatcccccactctgcttctccagtcagcccggacggagttcagatcccgttgaaggaatacggacgcgcccctgtcccaggaccacgccgcggcaaaagaattgcctcaaaagtgaagcacttcgctttcgatcgcaaaaagagacactatggccttggggtcgtcggcaattggctcaatcgatcctacaggagatcaatatcatccactgtgcaacgccaactggagagcttcgacagccataggccatattttacttattggctgacctttgtgcacgttatcatcacacttctcgtcatttgtacctacgggatcgcgccagtgggctttgcccagcatgtaaccacccagctggtcttaaggaacaagggagtgtacgagagcgtaaaatacatccagcaggaaaacttttgggtgggcccatcttccatcgatcttatacacctgggagctaagttttcgccatgcattagaaaggacggccagattgagcaactcgtcctgagagaaagggacttagagagagacagcggatgttgcgtccagaacgaccacagtggctgtattcagacccagagaaaggattgttctgaaacactcgctacgttcgtgaagtggcaggacgacacaggcccaccaatggacaaaagcgacctcggtcagaagaggaccagtggggctgtctgccaccaggatccccgaacctgcgaagagcctgcatcctcgggagcacacatctggccagatgacatcacaaaatggcctatctgcaccgagcaggctaggtcaaatcacacggggtttctacatatggactgcgaaatcaaggggcgtccgtgttgtattggtaccaaggggtcttgtgagatcacaacccgcgagtactgcgagtttatgcatggctatttccatgaagaagcaacactgtgctcccaagtgcactgtttagacaaggtgtgcggactcctgcctttcttgaaccctgaagttcctgatcaattctacagactttggctgtccctgtttctgcacgccggcgttgtgcactgtctggtgtccgttgttttccagatgaccatcctacgcgatttagaaaagctggccggctggcaccggatcgcgatcattttcattcttagcggtattaccggaaacctggcctctgcgattttcctcccatatcgcgctgaggtgggtcctgctgggtcacagtttggtctcttggcgtgtttgttcgtggagctattccagagttggccactcctggaacgcccctggaaagcgttccttaatttgtccgctattgtgctgttcctcttcatctgtggcctgttgccctggatcgacaacatagcccacatcttcggattcctgagcgggctgctattggccttcgcatttctgccctacataactttcgggacatcagacaagtatcggaaacgcgctcttatactggtgtcgcttctggcattcgctggactgttcgctgctctggtactttggttatacatttatccaattaattggccatggatcgagcatctaacatgtttcccctttacatcaaggttctgcgaaaagtatgagctcgaccaagtcttgcactag

SEQ ID NO: 215871 - DNA, 2571 bp, Artificial Sequence
  derived and/or modified sequence
atggccagcgctgacaagaatggaggctctgtgtcctctgtgagcagcagccggctgcagagcaggaagccacccaacctgagcatcaccatccccccacctgagaaggagacccaggcccctggagagcaggacagcatgctgcctgagggcttccagaacagaaggctgaagaagagccagcccaggacctgggccgcccacaccacagcctgccccccatccttcctgcccaagaggaagaacccagcctacctgaagtctgtgtccctgcaggagcccaggagccgctggcaggagagcagcgagaagaggcctggcttccggcggcaggccagcctgagccagagcatcaggaagggggccgcccagtggtttggagtgtctggggactgggagggccagaggcagcagtggcagaggaggagcctgcaccactgcagcatgagatatggccgcctgaaggccagctgccagagggacctggagctgcccagccaggaggcccccagcttccagggcacagagagccccaagccctgcaagatgcccaagatcgtggaccccctggcccggggccgggccttccgccaccctgaggagatggaccggccccacgccccccacccccccctgaccccaggagtgctgagcctgaccagcttcacctctgtgcgcagcggctacagccacctgcccaggaggaagaggatgtctgtggcccacatgagcctgcaggccgctgctgccctgctgaagggccgctctgtgctggatgccaccggccagcgctgccgggtggtgaagaggagctttgccttccccagcttcctggaggaggatgtggtggatggagctgacacctttgacagcagcttcttcagcaaggaggagatgagctccatgccagatgatgtgtttgagagcccccccctgagcgccagctacttccggggcatcccccacagcgccagccctgtgtccccagatggagtgcagatccccctgaaggagtatggccgggcccctgtgcccggcccccggcggggcaagagaattgccagcaaggtgaagcactttgcctttgacaggaagaagaggcactacggcctgggcgtggtgggcaactggctgaacagaagctacagaagaagcatcagcagcacagtgcagaggcagctggagagctttgacagccaccggccctacttcacctactggctgacctttgtgcacgtgatcatcaccctgctggtgatctgcacctatggaattgcccctgtgggctttgcccagcacgtgaccacccagctggtgctgagaaataaaggagtgtatgagagcgtgaagtacatccagcaggagaacttctgggtgggccccagcagcattgacctgatccacctgggcgccaagttcagcccctgcatcaggaaggatggccagatcgagcagctggtgctgcgggagcgggacctggagcgggacagcggctgctgcgtgcagaatgaccacagcggctgcatccagacccagaggaaggactgcagcgagaccctggccacctttgtgaagtggcaggatgacaccggcccccccatggacaagagtgacctgggccagaagaggaccagcggggctgtgtgccaccaggaccccaggacctgtgaggagcccgccagcagcggggcccacatctggccagatgacatcaccaagtggcccatctgcacagagcaggcccggagcaaccacacaggcttcctgcacatggactgtgagatcaagggccggccctgctgcatcggcaccaagggcagctgtgagatcaccacccgggagtactgtgagttcatgcacggctacttccacgaggaggccaccctgtgcagccaggtgcactgcctggacaaggtgtgtggcctgctgcccttcctgaaccctgaggtgcctgaccagttctaccgcctgtggctgagcctcttcctgcatgctggggtggtgcactgcctggtgtctgtggtgttccagatgaccatcctgcgggacctggagaagctggccggctggcacagaattgccatcatcttcatcctgagcggcatcactggaaacctggccagcgccatcttcctgccctacagagctgaggtgggccctgctggcagccagtttggcctgctggcctgcctgtttgtggagctgttccagagctggcccctgctggagcggccctggaaggccttcctgaacctgagcgccatcgtgctcttcctgttcatctgtggcctgctgccctggattgacaacatcgcccacatcttcggcttcctgagcggcctgctgctggcctttgccttcctgccctacatcaccttcggcaccagtgacaagtacaggaagagggccctgatcctggtgtccctgctggcctttgctggcctgtttgctgccctggtgctgtggctgtacatctaccccatcaactggccctggattgagcacctgacctgcttccccttcaccagccgcttctgtgagaagtatgagctggaccaggtgctgcactag

SEQ ID NO: 215872 - DNA, 2571 bp, Artificial Sequence
  derived and/or modified sequence
atggccagcgccgacaagaacggcggcagcgtgagcagcgtgagctcttcacgactccagtcaaggaaaccaccaaatctctcaataaccatcccaccacccgagaaggaaactcaggcacctggcgaacaagactccatgttgcccgaaggatttcagaaccggcgcctaaagaaatctcagccccgtacatgggcagcccacacaacagcttgtcctcccagcttcctgccgaaaagaaaaaatcccgcctatctgaaaagcgtgtccctccaagaacctcggagcaggtggcaagagagctccgaaaaacggccaggtttccgccgacaggccagccttagtcagtccatcagaaaaggagcagctcaatggtttggtgtatccggggactgggagggacagcggcaacagtggcagagacgtagcctacaccattgctctatgcgttacgggcgcctcaaggcaagctgtcaacgagacctggaactgcccagtcaggaagcgccatccttccaagggacagaaagccccaagccttgtaagatgccaaagattgtggatcccctggctcggggacgcgcatttcgccaccctgaagagatggatcggcctcacgccccacatccgccactaacaccaggggtgctctccttgacctccttcacgtccgtgagaagcggttacagtcatctgccacgccgcaagaggatgtcggtcgctcatatgtccctgcaggccgcggcggccctgctgaaaggccgaagtgtgctggatgctaccggccagcgctgccgcgtcgtgaaacgcagctttgcctttccgtccttcctggaagaagacgtggttgacggcgctgatactttcgatagctcctttttctccaaagaagaaatgtctagtatgccagacgacgtgtttgagtcacctcctctgagcgcctcctactttcgaggcattccacattccgcttctcctgtctcccctgacggagttcagatcccgctgaaggaatacgggcgcgcccctgtgcctgggcctagaagaggcaaacgtatcgctagcaaggtgaaacattttgctttcgacagaaagaagcgtcattacgggctcggagtcgttggcaactggttgaacaggtcgtaccggagatccatttcctctactgtgcagcggcagctggagtcctttgattctcaccgtccatacttcacttattggctcactttcgttcacgtaatcattacacttctggtaatttgcacatatggtatagctcccgtgggattcgcacagcacgtgacaacccaactcgttctccgaaataagggagtgtacgaatccgtgaaatatattcaacaagagaatttctgggtgggtcccagcagtatagatctcatccatctcggggcaaagtttagtccatgtattcggaaggacggccagatcgagcagctcgtgttaagagagcgcgatctggagcgcgatagtggttgctgtgtacagaatgatcacagcgggtgcattcagactcagcgtaaggattgctcagagaccttggccaccttcgtaaagtggcaggacgacactgggccccccatggacaagtctgacctaggccagaagagaacttcaggcgccgtctgtcaccaggatccgcgtacttgcgaggaacctgccagtagcggggctcacatctggccggacgatatcaccaagtggcctatctgcaccgagcaggccaggtccaaccatacgggcttcctgcacatggactgtgagatcaaaggtcgtccctgctgtatcggaacaaagggctcttgcgagattacaacccgcgagtactgtgaatttatgcacggatattttcatgaagaagctacgctctgctcccaggtgcactgtttggacaaggtatgcgggctgctgccattcctgaatccagaggtgcccgaccaattttaccggctgtggttaagtctgttcctccacgctggtgtcgttcattgcctggtgagcgtcgtcttccaaatgactattctccgcgatctggaaaaacttgccggctggcataggattgccataatttttatcctttccggcatcactggtaacctcgcttctgccatctttctcccttatcgtgctgaggttggcccagcaggctcccagtttgggctgctcgcctgtctcttcgttgagttattccagagctggcccctgctcgaaaggccttggaaggcttttcttaacctgagcgcaatcgtattatttctgtttatctgcgggctactgccatggattgataacatcgcccacattttcggatttctatccgggctcctcttagcttttgccttcctgccttatataaccttcggaaccagcgacaagtaccggaaaagggctctaatccttgtgtccttgctggcgtttgcaggactgtttgcagccctggtgctgtggctctacatctaccctattaactggccatggatcgaacatttgacttgttttccttttacctcacgattctgcgaaaaatacgagctcgaccaggtgctgcattag

SEQ ID NO: 215873 - DNA, 2571 bp, Artificial Sequence
  derived and/or modified sequence
atggcctccgccgataagaacggcggttctgtgtcgtctgtgtcctcaagccgccttcagtctaggaagccaccaaacctgagcataactatcccccctccggaaaaagagactcaggcgcctggtgagcaggacagcatgctgccagagggtttccagaaccgcagactcaagaaaagccagccacgtacttgggccgctcacaccaccgcatgcccccctagctttctgcccaagcgcaagaatcccgcttacctaaagtccgtgagcttacaagaacctcggtctaggtggcaggaaagtagtgagaagcgccctggcttccggagacaggcctcactgagccagtcgattcggaaaggcgctgcacaatggtttggggtgagtggcgattgggagggacaacggcagcaatggcagagacgaagtctacatcactgttctatgcgttacggtcgactcaaagctagttgtcagcgagatctggagcttccctcgcaggaggccccatcctttcagggtactgagtcccccaagccttgtaagatgcctaagatcgtcgatccacttgctagaggtcgcgctttcaggcatcccgaagaaatggataggccgcacgccccacacccccctctcacccctggggtgttgtccttaacaagttttaccagtgtgagaagtggatattcccatctgcctagacgaaagagaatgagtgtggcccatatgtcactccaggcagccgcagctctgctaaagggccgtagcgtgctcgatgcaaccggacagcggtgcagagtggtgaaacgcagctttgcttttccaagctttctcgaggaggacgtcgtggacggagcggatacattcgattctagcttcttcagtaaggaggagatgtcaagtatgcccgatgacgtcttcgagagccccccactgagcgcgtcatacttccgcggaatcccacatagtgctagccctgtttcacctgacggtgttcagattccgctcaaggaatatggacgggcaccagtccccggacctcgacggggtaaacgcatagcgtcaaaggtcaagcatttcgctttcgatcggaaaaagcgacattatggcctgggcgtcgtggggaattggctcaacagaagctatcgtcgttcgatttcaagcacggtgcagagacagctggaatcctttgatagccacagaccttattttacttattggttaaccttcgtccatgttattatcactctcttggtcatttgtacctacggtatcgcacccgtgggatttgcacagcatgtgacaacccagctggtgctccggaataagggcgtgtatgagagtgtcaaatacatccaacaagaaaatttctgggtcggccctagtagcattgatcttatccatctgggggctaaattctctccatgcatcaggaaggatggacagatcgagcagctcgttctgcgggaacgcgatttggaacgcgactcgggttgttgcgtgcagaatgatcattcaggatgcatccagacccaacggaaagactgttcagagaccctggctaccttcgtgaaatggcaagacgataccgggccacctatggacaaatcagaccttggccagaaaagaacttcgggggcagtctgccaccaagacccacggacatgtgaggagcccgcttcctcaggcgcacacatttggcctgacgatattacaaagtggcctatttgtactgaacaagcccgaagtaaccacacaggctttctccatatggattgtgaaatcaagggcagaccctgttgtattggtactaagggctcgtgcgaaatcactacgcgggagtactgtgaattcatgcacggttattttcatgaagaggctacactctgctcgcaagtgcattgcctcgataaggtctgcggactgctgccatttctgaatcctgaggttccagatcagttttatcgcctgtggctttcccttttcctccacgcaggagtggtacattgtctggtatcggtcgttttccagatgacgattctcagagacctcgagaagctagccggttggcaccgcattgccatcatcttcattctctctggtattacaggcaacttagcaagtgctattttccttccataccgggcagaggttgggccagctgggagtcagtttgggcttctggcatgccttttcgttgaactgtttcagagttggcctttactcgagaggccctggaaggcatttctgaacctgtcggcaatcgtcctgtttctttttatttgtggcctgctgccctggattgacaacatcgcccacattttcgggtttctctctggactgttgcttgcttttgcgttcctgccctacatcaccttcggcacatcagacaagtaccgcaaaagggctttgatcttggtgtccctcttagcatttgcaggcctttttgcagctttagtgctgtggttgtacatttatccgattaactggccttggattgagcacctgacatgtttcccattcacctcccgcttctgcgaaaaatacgaactagatcaggtcttgcattag

SEQ ID NO: 215874 - DNA, 3603 bp, Artificial Sequence
  derived and/or modified sequence
cccgaggagccaccgcccagccgctcgcaggcgccgcacggagttgcgtcccggggacttggggccgcagggagctgtgagtacccaggaagctgcaccgtgtggcctggagctgtctatctgtccttccagccacctgtctgtccagccacccttccacagactgaggcttgacaccggagcatctgtacagagcaaggagaagacaagaacatgctctaaagcccttcacagcaagacccaggaagccgcgggcaaactcagactcgaagccctcccgcctcctgcccacaatggcctctgctgacaagaatggcgggagcgtgtcctctgtgtccagcagccgcctgcagagccggaagccacccaacctctccatcaccatcccgccacccgagaaagagacccaggcccctggcgagcaggacagcatgctgcctgagggttttcagaataggaggctaaagaaaagccagcccaggacctgggctgcacacaccaccgcctgccctccctccttcctccccaagaggaagaacccagcctacttgaagagcgtcagcctccaggagccacgcagccgatggcaggagagttcagagaagcgccctggcttccgccgccaggcctcactgtcccagagcatccgcaagggcgcagcccagtggtttggagtcagcggcgactgggaggggcagcggcagcagtggcagcgccgcagcctgcaccactgcagcatgcgctacggccgcctgaaggcctcgtgccagcgtgacctggagctccccagccaggaggcaccgtccttccagggcactgagtccccaaagccctgcaagatgcccaagattgtggatccgctggcccggggccgggccttccgccacccggaggagatggacaggccccacgccccgcacccaccgctgacccccggagtcctgtccctcacctccttcaccagtgtccgttctggctactcccacctgccacgccgcaagagaatgtctgtggcccacatgagcttgcaagctgccgctgccctcctcaaggggcgctcggtgctggatgccaccggacagcggtgccgggtggtcaagcgcagctttgccttcccgagcttcctggaggaggatgtggtcgatggggcagacacgtttgactcctccttttttagtaaggaagaaatgagctccatgcctgatgatgtctttgagtcccccccactctctgccagctacttccgagggatcccacactcagcctcccctgtctcccccgatggggtgcaaatccctctgaaggagtatggccgagccccagtccccgggccccggcgcggcaagcgcatcgcctccaaggtgaagcactttgcctttgatcggaagaagcggcactacggcctcggcgtggtgggcaactggctgaaccgcagctaccgccgcagcatcagcagcactgtgcagcggcagctggagagcttcgacagccaccggccctacttcacctactggctgaccttcgtccatgtcatcatcacgctgctggtgatttgcacgtatggcatcgcacccgtgggctttgcccagcacgtcaccacccagctggtgctgcggaacaaaggtgtgtacgagagcgtgaagtacatccagcaggagaacttctgggttggccccagctcgattgacctgatccacctgggggccaagttctcaccctgcatccggaaggacgggcagatcgagcagctggtgctgcgcgagcgagacctggagcgggactcaggctgctgtgtccagaatgaccactccggatgcatccagacccagcggaaggactgctcggagactttggccacttttgtcaagtggcaggatgacactgggccccccatggacaagtctgatctgggccagaagcggacttcgggggctgtctgccaccaggaccccaggacctgcgaggagccagcctccagcggtgcccacatctggcccgatgacatcactaagtggccgatctgcacagagcaggccaggagcaaccacacaggcttcctgcacatggactgcgagatcaagggccgcccctgctgcatcggcaccaagggcagctgtgagatcaccacccgggaatactgtgagttcatgcacggctatttccatgaggaagcaacactctgctcccaggtgcactgcttggacaaggtgtgtgggctgctgcccttcctcaaccctgaggtcccagatcagttctacaggctctggctgtctctcttcctacatgctggcgtggtgcactgcctcgtgtctgtggtctttcaaatgaccatcctgagggacctggagaagctggccggctggcaccgtatcgccatcatcttcatcctcagtggcatcacaggcaacctcgccagtgccatctttctcccataccgggcagaggtgggcccggccggctcacagttcggcctcctcgcctgcctcttcgtggagctcttccagagctggccgctgctggagaggccctggaaggccttcctcaacctctcggccatcgtgctcttcctgttcatctgtggcctcctgccctggatcgacaacatcgcccacatcttcggcttcctcagtggcctgctgctggccttcgccttcctgccctacatcaccttcggcaccagcgacaagtaccgcaagcgggcactcatcctggtgtcactgctggcctttgccggcctcttcgccgccctcgtgctgtggctgtacatctaccccattaactggccctggatcgagcacctcacctgcttccccttcaccagccgcttctgcgagaagtatgagctggaccaggtgctgcactgaccgctgggccacacggctgcccctcagccctgctggaacagggtctgcctgcgagggctgccctctgcagagcgctctctgtgtgccagagagccagagacccaagacagggcccgggctctggacctgggtgcccccctgccaggcgaggctgactccgcgtgagatggttggttaaggcggggtttttctggggcgtgaggcctgtgagatcctgacccaagctcaggcacacccaaggcacctgcctctctgagtcttgggtctcagttcctaatatcccgctccttgctgagaccatctcctggggcagggtccttttcttcccaggtcctcagcgctgcctctgctggtgccttctcccccactactactggagcgtgcccttgctggggacgtggctgtgccctcagttgcccccagggctgggtgcccaccatgccccttcctctttctcctcctacctctgccctgtgagcccatccataaggctctcagatgggacattgtgggaaaggctttggccatggtctgggggcagagaacaaggggggagacacaagtagacctcaggtagaacgacactgggcggagccaccccagggcctgctcccagggagtgctcgaggcgcatcaggcccgttttttaccagtttatatcacggtcttcatttttaaaagtaacgctaactttgtacggacgatgtctcatggattaaataatattctttatggcagt

SEQ ID NO: 215875 - DNA, 2571 bp, Artificial Sequence
  derived and/or modified sequence
atggccagcgccgacaagaacggcggcagcgtgagcagcgtgagcagcagcagactgcagagcagaaagccccccaacctgagcatcaccatccccccccccgagaaggagacccaggcccccggcgagcaggacagcatgctgcccgagggcttccagaacagaagactgaagaagagccagcccagaacctgggccgcccacaccaccgcctgcccccccagcttcctgcccaagagaaagaaccccgcctacctgaagagcgtgagcctgcaggagcccagaagcagatggcaggagagcagcgagaagagacccggcttcagaagacaggccagcctgagccagagcatcagaaagggcgccgcccagtggttcggcgtgagcggcgactgggagggccagagacagcagtggcagagaagaagcctgcaccactgcagcatgagatacggcagactgaaggccagctgccagagagacctggagctgcccagccaggaggcccccagcttccagggcaccgagagccccaagccctgcaagatgcccaagatcgtggaccccctggccagaggcagagccttcagacaccccgaggagatggacagaccccacgccccccacccccccctgacccccggcgtgctgagcctgaccagcttcaccagcgtgagaagcggctacagccacctgcccagaagaaagagaatgagcgtggcccacatgagcctgcaggccgccgccgccctgctgaagggcagaagcgtgctggacgccaccggccagagatgcagagtggtgaagagaagcttcgccttccccagcttcctggaggaggacgtggtggacggcgccgacaccttcgacagcagcttcttcagcaaggaggagatgagcagcatgcccgacgacgtgttcgagagcccccccctgagcgccagctacttcagaggcatcccccacagcgccagccccgtgagccccgacggcgtgcagatccccctgaaggagtacggcagagcccccgtgcccggccccagaagaggcaagagaatcgccagcaaggtgaagcacttcgccttcgacagaaagaagagacactacggcctgggcgtggtgggcaactggctgaacagaagctacagaagaagcatcagcagcaccgtgcagagacagctggagagcttcgacagccacagaccctacttcacctactggctgaccttcgtgcacgtgatcatcaccctgctggtgatctgcacctacggcatcgcccccgtgggcttcgcccagcacgtgaccacccagctggtgctgagaaacaagggcgtgtacgagagcgtgaagtacatccagcaggagaacttctgggtgggccccagcagcatcgacctgatccacctgggcgccaagttcagcccctgcatcagaaaggacggccagatcgagcagctggtgctgagagagagagacctggagagagacagcggctgctgcgtgcagaacgaccacagcggctgcatccagacccagagaaaggactgcagcgagaccctggccaccttcgtgaagtggcaggacgacaccggcccccccatggacaagagcgacctgggccagaagagaaccagcggcgccgtgtgccaccaggaccccagaacctgcgaggagcccgccagcagcggcgcccacatctggcccgacgacatcaccaagtggcccatctgcaccgagcaggccagaagcaaccacaccggcttcctgcacatggactgcgagatcaagggcagaccctgctgcatcggcaccaagggcagctgcgagatcaccaccagagagtactgcgagttcatgcacggctacttccacgaggaggccaccctgtgcagccaggtgcactgcctggacaaggtgtgcggcctgctgcccttcctgaaccccgaggtgcccgaccagttctacagactgtggctgagcctgttcctgcacgccggcgtggtgcactgcctggtgagcgtggtgttccagatgaccatcctgagagacctggagaagctggccggctggcacagaatcgccatcatcttcatcctgagcggcatcaccggcaacctggccagcgccatcttcctgccctacagagccgaggtgggccccgccggcagccagttcggcctgctggcctgcctgttcgtggagctgttccagagctggcccctgctggagagaccctggaaggccttcctgaacctgagcgccatcgtgctgttcctgttcatctgcggcctgctgccctggatcgacaacatcgcccacatcttcggcttcctgagcggcctgctgctggccttcgccttcctgccctacatcaccttcggcaccagcgacaagtacagaaagagagccctgatcctggtgagcctgctggccttcgccggcctgttcgccgccctggtgctgtggctgtacatctaccccatcaactggccctggatcgagcacctgacctgcttccccttcaccagcagattctgcgagaagtacgagctggaccaggtgctgcactag

SEQ ID NO: 215876 - protein, 786 aa, Artificial Sequence
  derived and/or modified sequence
MGLQPLEFSDCYLDSPWFRERIRAHEAELERTNKFIKELIKDGKNLIAATKSLSVAQRKFAHSLRDFKFEFIGDAVTDDERCIDASLREFSNFLKNLEEQREIMALSVTETLIKPLEKFRKEQLGAVKEEKKKFDKETEKNYSLIDKHLNLSAKKKDSHLQEADIQVEQNRQHFYELSLEYVCKLQEIQERKKFEFVEPMLSFFQGMFTFYHQGHELAKDFNHYKMELQINIQNTRNRFEGTRSEVEELMNKIRQNPKDHKRASQFTAEGYLYVQEKRPAPFGSSWVKHYCMYRKAAKKFNMIPFEHRSGGKLGDGEVFFLKECTKRHTDSIDRRFCFDIEAADRPGVSLTMQAFSEEERKQWLEALGGKEALSHSFNTAIIPRPEGNAQLDKMGFTIIRKCISAVETRGINDQGLYRVVGVSSKVQRLLSMLMDVKTCNEVDLENSADWEVKTITSALKQYLRSLPEPLMTYELHGDFIVPAKSGSPESRVNAIHFLVHKLPEKNKEMLDILVKHLTNVSNHSKQNLMTVANLGVVFGPTLMRPQEETVAALMDLKFQNIVVEILIENHEKIFRTPPDTTFPEPTCLSASPPNAPPRQSKRQGQRTKRPVAVYNLCLELEDGDNPYPSKEDTPTSSLDSLSSPSPVTTAVPGPPGPDKNHLLADGGSFGDWASTIPGQTRSSMVQWLNPQSPTTTSSNSAVTPLSPGSSPFPFSPPATVADKPPESIRSRKARAVYPCEAEHSSELSFEIGAIFEDVQTSREPGWLEGTLNGKRGLIPQNYVKLL

SEQ ID NO: 215877 - DNA, 2361 bp, Artificial Sequence
  derived and/or modified sequence
atggggttacaaccactggaattttccgattgctacttagactctccctggttccgagagaggatcagggcacatgaggcagagttggagcgcaccaacaagtttattaaagaactgataaaagatggaaagaatttaatcgccgcaaccaagagccttagcgttgcccagaggaagtttgcccacagcctgagggactttaaatttgagtttattggcgacgctgtgactgacgacgagcgttgcatcgacgccagtctcagggaattttccaatttcctcaagaatttggaagaacagagggagattatggccctctccgtgactgaaacactcataaagcccctggaaaagttccgtaaggaacagctcggggccgtaaaagaagagaaaaaaaaattcgacaaggagactgaaaagaattactctctcattgacaagcatttaaatctaagcgctaagaaaaaagactcccacctgcaggaggccgatatccaagttgagcagaacagacagcacttctatgaactgagcttggaatatgtatgtaagctccaagagatccaagagcgcaaaaagttcgaatttgttgagcccatgctgagcttctttcagggaatgttcacattttaccaccaaggtcacgaactagcaaaagactttaaccactacaaaatggagctccagatcaatattcagaacacaaggaacaggttcgagggaacccgaagtgaagttgaggagctgatgaacaaaataaggcagaaccctaaggatcacaaaagagcgtctcagtttacagcagagggttacctgtacgtgcaggagaagaggcccgccccgtttggcagctcctgggtaaagcactactgtatgtatcgcaaggccgctaaaaaatttaatatgatccccttcgaacaccggtctggcggaaagctgggcgacggcgaggtattctttttaaaagagtgcactaaacgacatacagatagcatcgacagaaggttttgtttcgacatagaggccgcagacaggcccggagtgtccctcaccatgcaggcgtttagcgaagaggagaggaaacaatggcttgaagcgttaggagggaaggaagctttgtcgcactccttcaatacagccataataccgcgccctgagggaaacgcccagctcgataaaatggggttcaccatcatacgaaaatgcatttctgccgtagagaccagaggaatcaacgatcagggcctgtatcgtgtagtaggggtgagcagtaaagtgcaacgcttactctccatgctgatggacgtcaagacctgcaatgaagtggatttagagaactctgctgactgggaggtcaagaccatcacctccgcacttaagcagtatttgcgatccttgcccgaacctcttatgacttatgagctccatggggatttcatcgttcccgcgaaatccggcagcccagaatctcgcgtgaacgcgattcacttccttgtgcacaagctgccagagaagaataaggagatgctagatatcttagttaaacacttaacgaatgtgagtaatcactctaaacagaacctgatgacggtggctaacctgggggtagtgtttggacccacactcatgaggcctcaggaagagaccgtagcagctttgatggatctcaagttccaaaacattgtggtagagatccttatcgagaaccatgagaagattttccgaactcctcctgacacaacctttccagagcctacttgcctgtccgccagccctccaaatgcgccacccagacagtccaagcgccaaggtcagagaacaaaacggcctgtcgctgtttataacctctgcctggaactcgaagatggggacaacccctatccctccaaagaggatacacccacctcttccttggattccttgtcatctccttctcctgtcaccacagcagtaccagggcccccaggacccgacaagaatcatttgttggcagatggcgggtcttttggagattgggcttctaccatcccagggcagaccaggtcaagtatggtccagtggctaaaccctcagagcccaactacaactagctccaatagcgctgtcacacctctgtctcctggcagcagtccatttccattttctcctcctgcaactgtggcggacaagccacctgagtcaatacgatctaggaaggctcgggctgtctatccttgcgaggctgagcattccagtgagcttagctttgagatcggcgctatcttcgaagatgttcagacatcaagagagcccggttggctcgagggaacattgaatggaaaacggggactgattccacagaactatgtgaagttgttatag

SEQ ID NO: 215878 - DNA, 2361 bp, Artificial Sequence
  derived and/or modified sequence
atgggcctgcagcccctggagttcagtgactgctacctggacagcccctggttccgggagcgcatccgggcccatgaagctgagctggagaggaccaacaagttcatcaaggagctgatcaaggatggcaagaacctgattgctgccaccaagagcctgtctgtggcccagaggaagtttgcccacagcctgcgggacttcaagtttgagttcatcggagatgctgtgacagatgatgagcgctgcattgatgccagcctgcgggagttcagcaacttcctgaagaacctggaggagcagcgggagatcatggccctgtctgtgacagagaccctcatcaagcccctggagaagttcaggaaggagcagctgggcgctgtgaaggaggagaagaagaagtttgacaaggagacagagaagaactacagcctgattgacaagcacctgaacctgagcgccaagaagaaggacagccacctgcaggaggccgacatccaggtggagcagaaccggcagcacttctatgagctgagcctggagtatgtgtgcaagctgcaggagatccaggagaggaagaagtttgaatttgtggagcccatgctgtccttcttccagggcatgttcaccttctaccaccagggccacgagctggccaaggacttcaaccactacaagatggagctgcagatcaacatccagaacaccaggaacagatttgagggcaccaggtctgaggtggaggagctgatgaacaagatccggcagaaccccaaggaccacaagagggccagccagttcaccgctgagggctacctgtatgtgcaggagaagaggcctgcccccttcggcagctcctgggtgaagcactactgcatgtacaggaaggccgccaagaagttcaacatgatcccctttgagcacaggtctgggggcaagctgggagatggagaggtgttcttcctgaaggaatgtaccaagaggcacacagacagcattgaccggcgcttctgctttgacatcgaggccgctgacaggcctggggtgtccctgaccatgcaggccttcagcgaggaggagaggaagcagtggctggaggccctgggcggcaaggaggccctgagccacagcttcaacacagccatcatccccaggcctgagggcaatgcccagctggacaagatgggcttcaccatcatcaggaagtgcatctctgctgtggagacccggggcatcaatgaccagggcctgtacagagtggtgggcgtgagcagcaaggtgcagaggctgctgtccatgctgatggatgtgaagacctgcaatgaggtggacctggagaacagcgctgactgggaggtgaagaccatcaccagcgccctgaagcagtacctgcggagcctgcctgagcccctgatgacctatgagctgcacggggacttcatcgtgcctgccaagagcggcagccctgagagccgggtgaatgccatccacttcctggtgcacaagctgcctgagaagaacaaggagatgctggacatcctggtgaagcacctgaccaacgtgagcaaccacagcaagcagaacctgatgacagtggccaacctgggcgtggtgtttggccccaccctgatgaggccccaggaggagaccgtggccgccctgatggacctgaagttccagaacatcgtggtggagatcctgattgagaaccacgagaagatcttccgcaccccaccagacaccaccttccctgagcccacctgcctgagcgccagccccccaaatgccccaccccggcagagcaagaggcagggccagaggaccaagaggcctgtggccgtgtacaacctgtgcctggagctggaggatggagacaacccctaccccagcaaagaagacacccccaccagcagcctggacagcctgagcagccccagccctgtgaccacagctgtgcccggccccccaggccctgacaagaaccacctgctggctgatggcggcagctttggagactgggccagcaccatccctggccagaccaggagctccatggtgcagtggctgaacccccagagccccaccaccaccagcagcaacagcgctgtgacccccctgagccctggcagcagccccttccccttcagccccccagccaccgtggccgacaagcccccagagagcatccgcagcaggaaggcccgggctgtgtacccctgtgaggccgagcacagcagcgagctgagctttgaaattggagccatctttgaagatgtgcagaccagccgggagcccggctggctggagggcaccctgaatggcaagaggggcctcatcccccagaactacgtgaagctgctgtag

SEQ ID NO: 215879 - DNA, 2361 bp, Artificial Sequence
  derived and/or modified sequence
atgggcctgcagcccctggagttcagcgactgctacctggacagcccgtggtttagggaacgtatacgagcacacgaggccgagctggagaggaccaacaaatttattaaagaactcatcaaggacggaaaaaacctgatcgccgctaccaagagtctatctgtcgcacagagaaagttcgctcattcccttagagactttaagttcgagtttatcggcgatgctgtgacagacgatgaaaggtgcattgatgcttccctgcgcgagttctcaaatttcctgaaaaacctggaagaacagcgagagatcatggccttgagcgtcaccgagaccttaatcaaacccctggaaaaatttaggaaagaacagttgggagcggtaaaagaagagaaaaaaaaattcgacaaggaaactgagaaaaattattccctaatagataagcacctgaacctttccgcaaagaagaaggatagccatctacaggaagccgatatacaagtggagcagaaccggcaacatttctatgaactctccctggagtacgtctgtaaactgcaggaaattcaggaaaggaagaaattcgagttcgtcgagccgatgctgtccttcttccagggcatgtttactttttatcaccagggccacgagcttgccaaggattttaaccactataagatggagttgcagattaacatccagaatacacgcaacagattcgagggcactcgcagcgaagtggaggaacttatgaacaaaattcgccaaaacccaaaggatcataagcgggcgtcccaatttactgctgaggggtatctgtatgtgcaggagaaacgcccggctcctttcggttcctcctgggtgaagcactattgcatgtaccgaaaggctgcaaagaagtttaacatgattccattcgagcaccgctcaggaggtaagttaggggacggggaagttttctttctgaaagagtgcacaaagcgacacacagatagcatagacagaaggttctgttttgacattgaagccgcagataggcctggtgtctcactgacgatgcaggctttctctgaagaagaacgtaaacaatggctggaggcccttggcggcaaggaggcgctttcccactcattcaatacggcaattatacctcgcccagaaggaaacgcccagctcgataagatggggttcaccatcattaggaagtgtatctccgctgttgagactagaggaatcaatgaccagggactgtaccgggtagtgggtgtctcttctaaggtccagcggttgctgtctatgctgatggacgtcaaaacctgcaacgaagtcgatctcgagaacagtgccgattgggaagtgaagactatcacatctgcactgaaacaatatctccgcagtctacccgaacctttgatgacctacgagttgcatggcgacttcattgtaccggccaaaagcggctccccagagagtcgcgttaacgcaatccactttctggtgcacaaactgcccgagaagaataaagagatgcttgatatcctggtgaagcacttaacaaacgtgtctaatcacagtaagcaaaacctcatgacagtggccaacctgggcgttgtctttggacctactctcatgcgcccacaggaagaaaccgtggccgctctgatggacttgaaatttcagaatattgtggtggagatcctgatcgagaaccatgagaagatttttcggacaccccccgataccacctttccagagccaacatgcctgtcagcatcacctccgaacgcaccgccacgccagtcaaagcgccaggggcagagaaccaaacggcccgtcgcggtgtataatctgtgcctggagctcgaggatggtgacaacccttatccaagcaaggaggacacccccacctcttccttggattccctctctagcccatcacctgttaccacggccgtacccggtccacctggccccgataagaaccatttacttgccgacggcggatctttcggggattgggcctccacaatccccgggcagacaaggtccagtatggtccagtggctgaatccgcagtccccaactacaacctcttccaactccgctgtaacacctctgagtcccggttcctctccctttccgttctcgccacctgctaccgtggcggacaagccccccgaatctattcgatcccgtaaggccagagccgtgtacccctgcgaagctgagcattcctcagagctctcttttgaaattggggcaatcttcgaagatgtgcaaacctcaagagagccaggatggctcgaagggaccctgaatggaaaacgcgggctgatccctcagaactacgtcaagctattgtag

SEQ ID NO: 215880 - DNA, 2361 bp, Artificial Sequence
  derived and/or modified sequence
atgggactgcaacctctggaattttctgattgttacctcgatagcccatggttcagggaacgaattcgggctcatgaggcagaactggagcggactaataagttcatcaaagagttaattaaggacggcaagaatctgatcgctgccaccaaaagtctaagcgtggcccaaaggaagtttgcccatagccttcgcgattttaaattcgagtttattggagatgcagtgacagatgacgaaagatgtatcgacgcttctctgagagagttctccaactttttgaagaaccttgaggaacagcgcgagattatggcactgtctgtgaccgaaacgctgatcaagccacttgaaaagtttagaaaggaacagctcggggctgtcaaggaggagaagaagaaatttgacaaggagacggagaaaaactactctctgatcgataaacacttgaatctatctgcaaaaaagaaggattcccacctgcaggaagctgacatccaggtggaacagaatcggcagcacttctacgagctctctttggagtacgtatgcaagcttcaagagatccaggagcggaagaaattcgaattcgttgaaccaatgctcagttttttccagggcatgttcacattttatcatcagggacacgaactggcgaaagacttcaatcactacaagatggagttacagatcaatatccagaatacccgaaaccgctttgaaggcaccagaagcgaggtggaggagctgatgaataagatcagacagaatcccaaagatcataagcgggcttcacaattcactgccgaaggctacctttacgtgcaggagaagcggccagctccgtttggcagttcttgggtcaagcactactgtatgtacagaaaggcggcaaaaaagttcaatatgattccttttgagcataggtcagggggaaagctcggtgacggcgaggttttctttctaaaagaatgcaccaagcgccacaccgattccattgacaggagattctgctttgatattgaagcagctgataggcctggcgtgtctctgaccatgcaagcttttagcgaagaggaacgcaaacagtggctggaagcgcttgggggaaaagaagccttgtcccactcatttaacacagcaataatcccccgacctgaaggtaatgcgcagttagataaaatgggcttcactattatccggaaatgcatttctgccgtggagacaaggggcattaatgatcagggactgtacagagtggtgggagtgtctagcaaagtgcagcggctcctgagcatgctgatggacgtcaaaacatgcaatgaagtggatctggagaacagcgcggattgggaggtgaagactatcacctcggccttgaagcaatatctgaggagcctccccgagcctcttatgacctacgagcttcacggagatttcattgtgccagctaaatcaggaagtcccgaaagccgcgtcaatgcaattcacttcttagttcacaaattacctgagaaaaataaggaaatgctggacattctggtgaagcacctgaccaatgtcagcaatcattcaaagcagaacctaatgactgttgccaacttgggtgtcgtgttcggtccgacactgatgcgccctcaggaggagacagtcgctgcccttatggatttaaaattccaaaatattgtcgttgaaattctgattgagaatcacgaaaaaatctttagaacacccccagacaccaccttccccgagcccacatgtctatcagcttcgcctcctaacgcccctcctcggcaaagcaagcgccagggccagcggactaagaggcccgtggccgtctacaacctctgtctggagttggaggacggagataatccatacccaagcaaagaggatacacccacaagctcgttggactccctctcctctcctagcccggttacaaccgctgtgcccggaccccctggaccagacaagaaccacctgcttgcagatggcggaagtttcggagactgggcaagcactatcccaggccagactcgctcctctatggtgcagtggctgaaccctcagtcgcccaccaccacatctagcaactccgccgtgactcctttgtcacctggctcaagccctttccctttctccccaccggctacagtagccgataagccccctgaatctatcaggtctaggaaggccagagcggtgtacccttgtgaggcggagcactcgtctgagctctcctttgagattggggctatatttgaggacgttcagacgagtagggaacctgggtggctggaaggcacactaaacggcaaaagagggctcatcccgcagaattatgtgaaactcctttag

SEQ ID NO: 215881 - DNA, 3299 bp, Artificial Sequence
  derived and/or modified sequence
gagctcggcgggggctgccgggattggggcgccgcagctagcgctggtctcggtggcagctcctccgcgccgcaggactcggctctacgggacatgtccgtgccgcgctcgccgcgcgcccgggcctgctagctcctctgtgctccctgaacgcgcggcgccgcacctggcagcggcctcggagctcggctcgggcaggagcgcgcggccgtgcgcaccgcgcagcgaccgctgccgtcatggggctgcagcccctggagttcagcgactgctacctcgacagcccgtggttccgggagaggatccgcgctcacgaagcggaactcgagaggaccaacaagttcatcaaagagctcattaaggacgggaagaacctcatcgctgcgacgaaaagtctgtcagtggcccagcggaagtttgctcattcactcagagactttaagtttgagtttatcggtgatgctgtgacagatgatgaacgatgcatagatgcttccttacgtgaattttcaaattttttgaagaatctggaggaacagagagaaattatggcattaagtgtaactgaaaccctgattaaacccttggaaaaattcagaaaagagcaacttggagctgtaaaggaagaaaaaaagaagtttgacaaagagacagaaaagaattatagtctaattgataaacatttgaatttatcagcaaaaaagaaagactcacatttacaagaggcagatatccaagtagagcagaaccggcaacacttctatgaactgtctctcgagtatgtgtgtaagctgcaggaaatccaagaaagaaagaagtttgagtttgtggaacctatgctgtcattttttcaggggatgtttaccttctatcatcagggccatgaacttgccaaagacttcaatcactacaaaatggaactacagatcaacattcagaatacacggaatcgatttgaaggaacaaggtcagaagtggaagagctcatgaacaaaatcagacagaatcccaaggaccacaaacgagcaagtcagtttacagccgaaggctacctgtatgtccaggaaaaaaggcctgctccgtttggttccagttgggtcaaacactattgcatgtatcgaaaagcagcaaagaagttcaacatgatcccatttgagcacagatctggagggaaacttggggacggagaggtgttctttttgaaagaatgtaccaagaggcatactgactccattgacagaaggttttgttttgacatagaagctgctgatcggcctggcgtttccttgaccatgcaggcattttccgaagaggaaaggaagcagtggttggaagctctgggtggaaaggaagctctgtcccatagttttaatacagccatcatcccaagaccagaaggaaatgcacagttggataagatggggttcacaattatcagaaaatgcatcagtgccgttgaaacacgaggtataaatgaccaaggattgtacagagttgtgggggtgagttcaaaggtccagagacttctgagtatgttgatggatgtaaaaacatgcaatgaggtggacctggagaattctgcagattgggaagtgaagacaataacaagtgccttgaaacagtatttgaggagtcttccagagcctctcatgacctatgagttacatggagatttcattgttccagccaaaagcggcagcccagaatctcgtgttaatgcgatccatttcttggtacacaaactgccagagaagaataaagagatgttggatattttggtgaaacacttaacaaatgtttcaaatcactccaagcagaacctgatgactgtggcaaacttaggagtggtgtttggaccaactctgatgaggccacaggaagaaactgtcgctgccctcatggacttgaagtttcagaatattgttgtggaaatcttaattgaaaaccatgaaaagatttttcggacgccgcccgatactacattccctgagcccacctgcctgtcagcatcacccccaaatgcgccaccaaggcagtcgaagagacaaggccagagaaccaagaggcccgtggccgtctacaatctttgtctggagctggaagatggtgacaatccttacccttccaaggaggacacccctaccagcagtctggactcactttcctccccgtctcccgtgactacagctgtccctgggcctcctggaccagacaaaaaccaccttctggcagatggagggagctttggagactgggcatccactatcccaggccagacccgatcgtctatggtccagtggcttaacccacagtctccaaccacaacaagctccaactcagctgtgacacctctttcacccgggtcgtcccctttccccttttctcctcctgctactgtagcggacaagccacctgaaagcatccgcagtcggaaggctcgagccgtgtatccgtgtgaagcagaacacagctcggaattatcttttgaaataggagcaatttttgaggatgtacaaacctccagggaacctggctggctagaagggactctgaacggcaagagggggctgattccacagaactacgtcaagctgctgtagctcctggcctcagagcccctgctgaccctggcacccagggacctgcctgggggcagagagctgtcttcctcctccgaggctctgggctgcacccacaggtacctccacacttgggagttaccatcatcacagtcagccctgggggtggggggtggtgggcagggatgggacgcaccacacagaactgtgattgtggatcaggaggggaatgtcaggattcgcaaaatggacttttcatttgtcaagtattgggacttgtgatttttaattatccagcatatagaatgagagggagggcagccttctgccacctgtgtcgcctccactggcagtcacgccaccagagccaccctggctccctctcctccctgagcacctgctgctgcgattttaaagggaactgtactactcgcagtgataggtttgcagagtgtgtgcttggctgtggcagcctagcttggagaagctgctgttggtgcaagggagatggtctcaagtcagagggaagcagagacgcgcgtctcaagcctgcccttcctagacggccacctgcaggaccccacactcactgcactggcagcgtgcactggcgtatttgtaacaggcttctcggtgctcctcacccgtgtgctgttttccaaacaccacctttttgcctcaaggtctctgtaaatgaaataaactgtaatttactatttg

SEQ ID NO: 215882 - DNA, 2361 bp, Artificial Sequence
  derived and/or modified sequence
atgggcctgcagcccctggagttcagcgactgctacctggacagcccctggttcagagagagaatcagagcccacgaggccgagctggagagaaccaacaagttcatcaaggagctgatcaaggacggcaagaacctgatcgccgccaccaagagcctgagcgtggcccagagaaagttcgcccacagcctgagagacttcaagttcgagttcatcggcgacgccgtgaccgacgacgagagatgcatcgacgccagcctgagagagttcagcaacttcctgaagaacctggaggagcagagagagatcatggccctgagcgtgaccgagaccctgatcaagcccctggagaagttcagaaaggagcagctgggcgccgtgaaggaggagaagaagaagttcgacaaggagaccgagaagaactacagcctgatcgacaagcacctgaacctgagcgccaagaagaaggacagccacctgcaggaggccgacatccaggtggagcagaacagacagcacttctacgagctgagcctggagtacgtgtgcaagctgcaggagatccaggagagaaagaagttcgagttcgtggagcccatgctgagcttcttccagggcatgttcaccttctaccaccagggccacgagctggccaaggacttcaaccactacaagatggagctgcagatcaacatccagaacaccagaaacagattcgagggcaccagaagcgaggtggaggagctgatgaacaagatcagacagaaccccaaggaccacaagagagccagccagttcaccgccgagggctacctgtacgtgcaggagaagagacccgcccccttcggcagcagctgggtgaagcactactgcatgtacagaaaggccgccaagaagttcaacatgatccccttcgagcacagaagcggcggcaagctgggcgacggcgaggtgttcttcctgaaggagtgcaccaagagacacaccgacagcatcgacagaagattctgcttcgacatcgaggccgccgacagacccggcgtgagcctgaccatgcaggccttcagcgaggaggagagaaagcagtggctggaggccctgggcggcaaggaggccctgagccacagcttcaacaccgccatcatccccagacccgagggcaacgcccagctggacaagatgggcttcaccatcatcagaaagtgcatcagcgccgtggagaccagaggcatcaacgaccagggcctgtacagagtggtgggcgtgagcagcaaggtgcagagactgctgagcatgctgatggacgtgaagacctgcaacgaggtggacctggagaacagcgccgactgggaggtgaagaccatcaccagcgccctgaagcagtacctgagaagcctgcccgagcccctgatgacctacgagctgcacggcgacttcatcgtgcccgccaagagcggcagccccgagagcagagtgaacgccatccacttcctggtgcacaagctgcccgagaagaacaaggagatgctggacatcctggtgaagcacctgaccaacgtgagcaaccacagcaagcagaacctgatgaccgtggccaacctgggcgtggtgttcggccccaccctgatgagaccccaggaggagaccgtggccgccctgatggacctgaagttccagaacatcgtggtggagatcctgatcgagaaccacgagaagatcttcagaaccccccccgacaccaccttccccgagcccacctgcctgagcgccagcccccccaacgccccccccagacagagcaagagacagggccagagaaccaagagacccgtggccgtgtacaacctgtgcctggagctggaggacggcgacaacccctaccccagcaaggaggacacccccaccagcagcctggacagcctgagcagccccagccccgtgaccaccgccgtgcccggcccccccggccccgacaagaaccacctgctggccgacggcggcagcttcggcgactgggccagcaccatccccggccagaccagaagcagcatggtgcagtggctgaacccccagagccccaccaccaccagcagcaacagcgccgtgacccccctgagccccggcagcagccccttccccttcagcccccccgccaccgtggccgacaagccccccgagagcatcagaagcagaaaggccagagccgtgtacccctgcgaggccgagcacagcagcgagctgagcttcgagatcggcgccatcttcgaggacgtgcagaccagcagagagcccggctggctggagggcaccctgaacggcaagagaggcctgatcccccagaactacgtgaagctgctgtag

SEQ ID NO: 215883 - protein, 285 aa, Artificial Sequence
  derived and/or modified sequence
MMAVDIEYRYNCMAPSLRQERFAFKISPKPSKPLRPCIQLSSKNEASGMVAPAVQEKKVKKRVSFADNQGLALTMVKVFSEFDDPLDMPFNITELLDNIVSLTTAESESFVLDFSQPSADYLDFRNRLQADHVCLENCVLKDKAIAGTVKVQNLAFEKTVKIRMTFDTWKSYTDFPCQYVKDTYAGSDRDTFSFDISLPEKIQSYERMEFAVYYECNGQTYWDSNRGKNYRIIRAELKSTQGMTKPHSGPDLGISFDQFGSPRCSYGLFPEWPSYLGYEKLGPYY

SEQ ID NO: 215884 - DNA, 858 bp, Artificial Sequence
  derived and/or modified sequence
atgatggccgtggacatcgagtacagatacaactgcatggcccccagcctgagacaggagagattcgccttcaagatcagccccaagcccagcaagcccctgagaccctgcatccagctgagcagcaagaacgaggccagcggcatggtggcccccgccgtgcaggagaagaaggtgaagaagagagtgagcttcgccgacaaccagggcctggccctgaccatggtgaaggtgttcagcgagttcgacgaccccctggacatgcccttcaacatcaccgagctgctggacaacatcgtgagcctgaccaccgccgagagcgagagcttcgtgctggacttcagccagcccagcgccgactacctggacttcagaaacagactgcaggccgaccacgtgtgcctggagaactgcgtgctgaaggacaaggccatcgccggcaccgtgaaggtgcagaacctggccttcgagaagaccgtgaagatcagaatgaccttcgacacctggaagagctacaccgacttcccctgccagtacgtgaaggacacctacgccggcagcgacagagacaccttcagcttcgacatcagcctgcccgagaagatccagagctacgagagaatggagttcgccgtgtactacgagtgcaacggccagacctactgggacagcaacagaggcaagaactacagaatcatcagagccgagctgaagagcacccagggcatgaccaagccccacagcggccccgacctgggcatcagcttcgaccagttcggcagccccagatgcagctacggcctgttccccgagtggcccagctacctgggctacgagaagctgggcccctactactag

SEQ ID NO: 215885 - DNA, 858 bp, Artificial Sequence
  derived and/or modified sequence
atgatggcggtggatatcgagtaccgctacaactgtatggcccctagccttcgtcaagaacgcttcgcgtttaaaattagccctaaaccttccaaacctttacgtccctgtatacagctcagttccaagaatgaggctagtgggatggtcgctcccgctgtccaagaaaaaaaagtgaaaaaaagggtaagtttcgccgataaccagggactagcgctcaccatggtaaaagtgttcagcgagttcgatgacccgctggacatgcccttcaacataacggaactcctggacaatatagtatcactaacgactgcggagtccgagtcctttgttttagacttctcccagcctagtgcggactacctggacttcagaaatcgcctgcaagccgaccacgtctgtctggaaaattgtgtcctcaaggacaaggccattgctggcactgtgaaagttcagaacctagccttcgaaaaaacggtaaaaattcgcatgaccttcgacacctggaagagctatactgattttccgtgtcaatatgtgaaggacacctatgctggcagcgaccgggacacattttccttcgacatctcactgccagaaaaaatccagtcttatgaacgtatggagttcgccgtctattatgagtgcaacggccagacttactgggatagtaatcgtggcaagaattatagaataatcagggctgaactgaaatcgacccagggaatgactaaaccacatagcggccctgaccttggtatcagcttcgaccagttcgggtccccacgatgctcctacggcctctttcctgagtggccttcttatctggggtatgaaaaactgggaccctattactag

SEQ ID NO: 215886 - DNA, 858 bp, Artificial Sequence
  derived and/or modified sequence
atgatggcagtggatatcgaatacagatataactgcatggctccctctctgcggcaggaaagattcgcgtttaaaatttccccgaaaccctctaaaccactccgaccatgtattcagctgagcagcaagaacgaggcctcaggcatggtcgctcctgccgtccaggaaaagaaagtcaagaagcgagtgagttttgctgataatcaggggttggccctcaccatggtgaaagtgttcagtgaattcgatgatcccctcgacatgccttttaatatcaccgaactcctcgacaacatagtgtctctaaccacagccgagtctgagtctttcgtgctggatttctcacagccgtctgccgactatctggatttccgtaaccgcttgcaggctgatcacgtctgcttagagaattgcgtgttgaaggacaaagccatcgcaggtaccgtgaaggttcagaacctggcttttgagaagaccgtaaaaattcgtatgaccttcgacacctggaagagttatactgatttcccatgtcaatatgtcaaggacacatatgccggctctgacagagacacattcagttttgacattagcttgcccgaaaagatacagtcatatgaacgaatggaattcgccgtctactacgagtgcaatggacaaacctattgggactccaatcgcggcaaaaattacagaattatacgcgccgaactcaagagcacgcaggggatgactaagcctcacagcggaccagacctaggcatctcgttcgaccaattcggttctcccaggtgtagctatggactgtttccagagtggccatcctacctgggttacgagaagctgggcccttactattag

SEQ ID NO: 215887 - DNA, 858 bp, Artificial Sequence
  derived and/or modified sequence
atgatggctgtggacatcgagtaccgctacaactgcatggcccccagcctgcggcaggagagatttgccttcaagatcagccccaagcccagcaagcccctgcggccctgcatccagctgagcagcaagaatgaggccagcggcatggtggccccagctgtgcaggagaagaaggtgaagaagagggtgtcctttgctgacaaccagggcctggccctgaccatggtgaaggtgttcagcgagtttgatgaccccctggacatgcccttcaacatcacagagctgctggacaacatcgtgtccctgaccacagctgagagcgagagctttgtgctggacttcagccagcccagcgctgactacctggacttcaggaaccggctgcaggccgaccacgtgtgcctggagaactgtgtgctgaaggacaaggccatcgccggcaccgtgaaggtgcagaacctggcctttgagaagacagtgaagatccgcatgacctttgacacctggaagagctacacagacttcccctgccagtatgtgaaggacacctacgccggcagtgaccgggacaccttctcctttgacatcagcctgcctgagaagatccagagctatgaaagaatggagtttgctgtgtactatgaatgtaatggccagacctactgggacagcaacagaggcaagaactaccgcatcatccgggcagagctgaagagcacccagggcatgaccaagccccacagcggccctgacctgggcatcagctttgaccagtttggcagcccccgctgcagctatggcctcttccctgagtggcccagctacctgggctatgagaagctgggcccctactactag

SEQ ID NO: 215888 - DNA, 858 bp, Artificial Sequence
  derived and/or modified sequence
atgatggccgtggacatcgagtaccggtacaactgcatggccccctctctacgccaggaaaggttcgcctttaagatctcgcccaagccctcaaaacctcttagaccgtgcatccaattatccagcaaaaatgaggcctccgggatggtagccccagccgtacaggaaaaaaaagtgaaaaagcgagtcagctttgccgacaaccaggggctggcactgaccatggtgaaggtctttagtgaatttgatgatcctctggacatgccattcaacatcacagagctgcttgataatatagtgtccctgactactgccgagtcagagagctttgtgctagacttcagccaacctagtgccgactatttagactttaggaacaggctccaggcagatcacgtctgcctggagaactgtgtgttgaaagataaagctatcgccggaaccgtcaaggtgcagaacttggcctttgaaaaaaccgtcaagatccgtatgacatttgatacatggaagtcatatacagatttcccctgccaatacgtcaaggacacttatgccggctctgacagagacacatttagcttcgatattagtctgcctgaaaaaattcagtcatacgaaaggatggagttcgccgtgtactacgagtgcaacggccaaacgtactgggacagtaatcggggtaaaaattaccgaattattagggcagaactcaagagcactcaagggatgacgaaaccccactctggccctgatctggggatctcctttgaccagtttggatcgcctcgatgctcctatggcttgttcccagagtggccgagctacttaggatatgagaaattggggccttattattag

SEQ ID NO: 215889 - DNA, 858 bp, Artificial Sequence
  derived and/or modified sequence
atgatggccgtggacatcgagtaccggtacaactgcatggcccccagcctgcggcaggagaggttcgcttttaagattagccctaagccttcaaaacctctaaggccttgtatccagctgtcctcaaaaaatgaggcaagcggtatggtggccccagccgtccaagaaaagaaggtgaaaaagagggtctcctttgccgacaaccaaggcctggccctcaccatggtgaaagtgttctctgaatttgacgatcccttggatatgccgtttaatatcacagagctgctggataatattgtcagtctgactaccgcagagagcgagtctttcgtcctcgatttctctcagccatccgcagactatttggacttccggaacagacttcaggccgaccacgtgtgcctcgaaaattgcgtgctcaaggacaaggctatcgctggtaccgtcaaggtccagaatcttgccttcgagaagacagtgaagattaggatgacctttgacacttggaaaagctacaccgattttccatgtcagtacgtgaaggatacctacgccggcagcgacagagatacattctcattcgacatctccctgccggagaagatacagtcctatgagagaatggagttcgcggtgtactacgaatgcaacggacagacctattgggatagtaatcgcggcaagaattaccgcattatccgcgcagaactgaagtctacccaagggatgactaagccacattccggaccggatctgggaatctcatttgatcaatttggcagcccccgctgctcctacggcttatttccagaatggccaagctatctgggatatgaaaagctcggcccttactattag

SEQ ID NO: 215890 - DNA, 858 bp, Artificial Sequence
  derived and/or modified sequence
atgatggctgtagacattgaatacagatataactgcatggcaccatctctcagacaggaacgtttcgcctttaaaatctctcctaaaccttctaagcccctgaggccatgcatccagttgtccagcaaaaacgaagcttcagggatggtagcccctgctgttcaggagaagaaggtgaaaaagagagtgagcttcgcagacaatcagggcctggcgctgacaatggtgaaggtcttctccgagtttgacgatcctctggacatgccattcaacataacagaactgcttgacaacatcgtgagccttactactgcagagtccgaatcattcgtgctggacttttcccagccatcggcggattatctcgactttaggaacagattacaagcggaccatgtgtgtctggagaattgcgttctgaaggataaagccatcgccggaacggtgaaggtgcagaatctggcatttgagaagaccgtgaaaatccgcatgacatttgacacatggaagtcttacaccgactttccatgccagtatgttaaggatacttacgccggaagcgaccgggacaccttctccttcgacatctctctacctgagaagattcagagctacgaacgcatggaattcgcagtctactacgagtgcaacgggcaaacctactgggacagtaaccgcggaaaaaactaccgcatcattcgggcagagttgaagtccacccagggaatgactaaaccacacagcggtccagacctggggatctctttcgaccagttcggctctccacgatgttcctatggcctctttccggaatggccatcctacctcggatacgagaaactcggtccttattactag

SEQ ID NO: 215891 - DNA, 858 bp, Artificial Sequence
  derived and/or modified sequence
atgatggccgttgatatcgagtaccgctataactgtatggctccgtctctgaggcaggaacgcttcgccttcaagatcagccccaaacccagcaaaccgctgaggccttgcatccaactgtcgagcaaaaacgaagcaagtgggatggtggcacctgctgtgcaggaaaagaaggtgaaaaagagagtgtcatttgccgacaaccagggcctcgctttgacaatggttaaggttttctcagaattcgatgatccattggacatgccatttaacatcacagaactgctagacaacattgtgtcactcactactgcagagtcggagtcttttgtgctggattttagtcagccatcagccgattacttagacttcaggaacaggttgcaggcagatcacgtgtgcctagaaaactgcgttctgaaagacaaagccatcgcaggaacagtaaaagtccaaaaccttgcctttgagaagaccgttaagatccgcatgacatttgatacgtggaaatcctacacagactttccctgccagtatgtgaaagacacctatgccggaagtgatagagacaccttctcatttgacattagtctcccagaaaagattcagagctacgagcgcatggaattcgcagtttattacgaatgtaatggtcagacatattgggattcaaaccgaggcaagaattaccgcatcattcgtgccgaactgaaatcaacgcagggaatgactaagccacacagcggtcccgaccttgggatctctttcgaccagtttggaagtccacggtgttcatatggactgttccccgaatggccaagttacctgggctacgagaagttaggcccttactactag

SEQ ID NO: 215892 - DNA, 5548 bp, Artificial Sequence
  derived and/or modified sequence
gacatctccgggaacccagcccaggccctgcctcccggacacaccgacgctcacgtagtcgcgcttgccacaaccctgcgggctctccgatgcggcgagcgagctggggagggggcttctccgcggcccaaaagcctgttcatctagccccatgatggctgtggacatcgagtacagatacaactgcatggctccttccttgcgccaagagaggtttgcctttaagatctcaccaaagcccagcaaaccactgaggccttgtattcagctgagcagcaagaatgaagccagtggaatggtggccccggctgtccaggagaagaaggtgaaaaagcgggtgtccttcgcagacaaccaggggctggccctgacaatggtcaaagtgttctcggaattcgatgacccgctagatatgccattcaacatcaccgagctcctagacaacattgtgagcttgacgacagcagagagcgagagctttgttctggatttttcccagccctctgcagattacttagactttagaaatcgacttcaggccgaccacgtctgccttgagaactgtgtgctcaaggacaaggccattgcaggcactgtgaaggttcagaacctcgcatttgagaagaccgtgaaaataaggatgacgttcgacacctggaagagctacacagactttccttgtcagtacgtgaaggacacttatgccggttcagacagggacacgttctccttcgacatcagcttgcccgagaagattcagtcttatgaaagaatggagtttgctgtgtactacgagtgcaatggacagacgtactgggacagcaacagaggcaagaactataggatcatccgggctgagttaaaatctacccagggaatgaccaagccccacagtggaccggatttgggaatatcctttgaccagttcggaagccctcggtgttcctatggtctgtttccagagtggccaagttacttaggatatgaaaagctagggccctactactagtgactgcaggtgacagggcgtggcggagctgccacagacaagcctagctctgctcactgtgcagtggagatggaaggccagggaggagcaacgtggaacttccatgaggccccgtttgggaaaataaaaggatcctcttcacttctttcttaaacagcaaatccagccaggttcagattacacaaccagtgtctcactcaaaggagcagtggtggctggcgcgctttcgcactgtggcagccacgagagtctgtgcacgtctgtgctggaaagggtatggatgggaatcaagcctatgccagtgctgatgaagctggaggagtctctcctctgctctccactcagatgtgggacatcagtcgccaaaagccactcagccccagccacctcgcgtgagaccctcactgttcattgtgttcatctttgggtgctctctgccagccaggcctttcctgcaagctgctgtgcttccccgtccacgtgtatctctgctgtgacacactgagctgacgcacatttccagtgcagctgcagaagagaaatgggattggctcttgttttctgcaagttcatgttttgcattttatgttcttccacaattgatctgatgttcaggaaaagataataaaggcaaattagttagtggttgagacaggcatttcctcctcccgcttcttgaccccacagatgtattccagcagagagcaacacaccagtcatcaaaacccactggctcctgtgcggtgtcacagattgcagggttctgacaaggcaggacagtcaagagtggggacactttcagcttctacttttgccttctagggggagctttctaagtccccacatttaccccgagtcaccggaaaaatctgatttttcccccgaaagctcaatgactttaacgtgcttggctggtttgtctcattctttatgaaagaattttggggccgggcgcggtggcttatgcctgtaatcccagcactttgggaggccgaggcaggtggatcacgaggtcaggagatcgagaccatcctggctaacacggtgaaaccctgtctctactaaaaatacaaaaaaattagccaggcgtggtggcgggcgcctgtagtcccagctacttgggaggctgaggcaggagaatggcgggaacctgggaggcggagcttacagtgaaccgagatcacaccactgcattcccgcctgggcagcagagcgagactccgtctcaaacagaaaaaaaaagagaattttgaatctcctttcccaaagagtcatcttttctgctgtgtttaggacatttgatttgcatatccaatatctcctcgaaaccttcagaaaatggttttatcgtgactgtgattcacactatctagaacactttaccagcacccagggacatggacttgggtgttcttatttatggtgtgtatgtaaagagataggggagaaaaacctcacccaagttcttatacgttattttaaacgtttgccaactctgaaatttcagagattcattgttcttaaccatattggactaaagtctgttggttagtgctgttgtaaaagagacctctggggccgagtgtggtggcttatgcctgtaatccctgcactttgggaagccaaggcgggcagctcacctgaggtcaggcgttcaagaccagcctggccaacatggtgaaacctcgtctgtactaaaaatacaaaatttagctgagtgtggtggcaggcgcctgtaatccagctactcgggaggctgaggcaggagaatcacttgaacccaggaggtggaggttgcagtgagccgagatcacgtcactgcatttcagcctgagcgacagagtgaaactgtctcaaaaaagagagacttccgggacagtcattatcagataggccccaaacctgtgatttttcttgggcaagattggtgtttacttaggggtgctttaaaaatatatttttacaagtatacttgtaggaagttggttttttattttctatttttgtttgtttttggagtttggttaaacgactcttttattttctgttttgccttatcttactaaagtgaagttttcctaaggcaagcaagaagaggagtggaagcacagttgcctggatttggaggcagagttgtcaggcttttcaagctaagagtcttgtgcttggattttccagattaatttgaaaagacctcccatttgtggctttgtacataaccaacaggcagatactgagtgccttggctcctagagttttgtggttgggttaggttgtttttgttgttgttttgttttggttttgttttcatttctgaagtttaagatgccttgactttttaaatgctcttaaggctattcgatgtaattcttactcctaaaactggctgttcttagcctgaaatctaatgctttgttttttgtacctctcccaggtgggtaacactctaggatgacatgatgttataattttaggggaaatcacatttttaccttatgctgttactgggcagaaccacgttttatgtaaacataccagacatcgggtaacagacagtactttaaatgttataaatttggtgatcagaactattaatagcataaatcgaactcaaatggaagcaaaactgatttcatgcaggtcctgaattttactttgccttaagaagtgccctccccacaatgcaggagaggcacagagtgcactgtcattgacatgttacccgactaaggatcactctgttcataagaaaaaggcctgaagtgactctgtttaataaagtcagtttaattttatctaataatgatcttaagacattcccatgtcaaaatttgaaatatggtaattcagtgataactatctcttctaaagcagccgtaaaccctccccactacccgtctttctcccagctcaccctggctttttttgctgggggtgctggatgcaagcccccagccagcacacctgggatgctcaccctgccgcacagttcagaaggcaagtcctcacctgctcgcaaagacccttcttctccaataaaagactctacttgcctgagtttcctcatcagggctgtcattcagtgatgtatgggggtctgaagaatactgccttctatctgtcttctgtttaccacttgctcctctgctaccctcctgccgcaaacagtcttcttccttttggcccagttctgtcccgtgaaattctcagaaggcctcgggagctgcgctgatgtattctctccttgtttgatagctcatcatcagtagataagcctacacacttcagagggtgacaggtttcttacttggagacttcactgcaccttgacttgtagatttgccttcagacagctcttggttatggttacaagtggcccccgagtcccagaatctttcccaggttgccccagaaagaccagccacctgtcacaggtgcagttgtccggcaatagggaagcaacttcatttttgttttatatttattccctcaagtgccctgaggagcatttgcaaactgggtacaataaataagctggattatacaaagatatttaataaataagctttcagtatctattggaagacatgaagcatttgagtgggtttctttatttaaaaaattattctactggagctggtgagaaataatgaagctgtacagttctccagaaattaaaacaatgtcagagtcaatgggagaatttaatttacctttaagatttcattttaatggtggcaaaattatacattcttagaagatgtaaatttggaactgttaggagattgctctgtggttttgatcttttcaaaccattttctttttgaaaaaaggcattagttgtagtcatggacattaaatgggccatatatgcttatcaatcaaaaaagtgttccttttttggaactgcccattttctggatcttccctctcaatggataggggatgaaaaccttggttgccttttatttgtttcctcttctaaaatttctcacctgaatgtagtcctgggagagtcccgatcacgtctctcctgacatgttcactgaaatcggagacaagaagttacatggatgatgggatcttatagggtcacacaaagacaatttggcagcttatcttaatttcctgcagtgagacaacacatgtggaactgggaaggacagctgttgttacgagcagtttttcctggtcatggttgtaaagctctgtaacccacattgtaaagccgtgaatgtttttagtcttgttgacgagtttttagagactgctggacctctgagggctttgagagtgcagctgtgatgatgtttcactattacttcagtgtgaatgtagaaccaaggactcatcttcattttatacctaaaagtgccttgtcaagaaatttttgcatgttttaaaagataaatatttttgtacacagagttcaaggggaaatgcactttaaaaatcccaagaatggatgttctttgtgtggtatgagaggttggtttgtatctcaaaagcaaaaatgtaataaaggaagacaaaacaaaa

SEQ ID NO: 215893 - DNA, 2334 bp, Artificial Sequence
  derived and/or modified sequence
aaagttaaagggggcagcgcggccgcggggagctcgagtcccgggtgactgctggagggaggaggtgaccgcgcagctctcgtgcacggacggacttcgccgcccgcggggggcgcgaacccgagcccgggcccagctcctgccgtcacggcagctgtccctgttcccccagggcgtatgctgccgcgggctggcgcgtctgccctcgggacttatgagctgaacccgcctgttcatctagccccatgatggctgtggacatcgagtacagatacaactgcatggctccttccttgcgccaagagaggtttgcctttaagatctcaccaaagcccagcaaaccactgaggccttgtattcagctgagcagcaagaatgaagccagtggaatggtggccccggctgtccaggagaagaaggtgaaaaagcgggtgtccttcgcagacaaccaggggctggccctgacaatggtcaaagtgttctcggaattcgatgacccgctagatatgccattcaacatcaccgagctcctagacaacattgtgagcttgacgacagcagagagcgagagctttgttctggatttttcccagccctctgcagattacttagactttagaaatcgacttcaggccgaccacgtctgccttgagaactgtgtgctcaaggacaaggccattgcaggcactgtgaaggttcagaacctcgcatttgagaagaccgtgaaaataaggatgacgttcgacacctggaagagctacacagactttccttgtcagtacgtgaaggacacttatgccggttcagacagggacacgttctccttcgacatcagcttgcccgagaagattcagtcttatgaaagaatggagtttgctgtgtactacgagtgcaatggacagacgtactgggacagcaacagaggcaagaactataggatcatccgggctgagttaaaatctacccagggaatgaccaagccccacagtggaccggatttgggaatatcctttgaccagttcggaagccctcggtgttcctatggtctgtttccagagtggccaagttacttaggatatgaaaagctagggccctactactagtgactgcaggtgacagggcgtggcggagctgccacagacaagcctagctctgctcactgtgcagtggagatggaaggccagggaggagcaacgtggaacttccatgaggccccgtttgggaaaataaaaggatcctcttcacttctttcttaaacagcaaatccagccaggttcagattacacaaccagtgtctcactcaaaggagcagtggtggctggcgcgctttcgcactgtggcagccacgagagtctgtgcacgtctgtgctggaaagggtatggatgggaatcaagcctatgccagtgctgatgaagctggaggagtctctcctctgctctccactcagatgtgggacatcagtcgccaaaagccactcagccccagccacctcgcgtgagaccctcactgttcattgtgttcatctttgggtgctctctgccagccaggcctttcctgcaagctgctgtgcttccccgtccacgtgtatctctgctgtgacacactgagctgacgcacatttccagtgcagctgcagaagagaaatgggattggctcttgttttctgcaagttcatgttttgcattttatgttcttccacaattgatctgatgttcaggaaaagataataaaggcaaattagttagtggttgagacaggcatttcctcctcccgcttcttgaccccacagatgtattccagcagagagcaacacaccagtcatcaaaacccactggctcctgtgcggtgtcacagattgcagggttctgacaaggcaggacagtcaagagtggggacactttcagcttctacttttgccttctagggggagctttctaagtccccacatttaccccgagtcaccggaaaaatctgatttttcccccgaaagctcaatgactttaacgtgcttggctggtttgtctcattctttatgaaagaattttggggccgggcgcggtggcttatgcctgtaatcccagcactttgggaggccgaggcaggtggatcacgaggtcaggagatcgagaccatcctggctaacacggtgaaaccctgtctctactaaaaatacaaaaaaattagccaggcgtggtggcgggcgcctgtagtcccagctacttgggaggctgaggcaggagaatggcgggaacctgggaggcggagcttacagtgaaccgagatcacaccactgcattcccgcctgggcagcagagcgagactccgtctcaaac

SEQ ID NO: 215894 - DNA, 420 bp, Artificial Sequence
  derived and/or modified sequence
atgcccgagggccccgagctgcacctggccagccagttcgtgaacgaggcctgcagagccctggtgttcggcggctgcgtggagaagagcagcgtgagcagaaaccccgaggtgcccttcgagagcagcgcctacagaatcagcgccagcgccagaggcaaggagctgagactgatcctgagccccctgcccggcgcccagccccagcaggagcccagagcccccagaggcgccgccaccccctgcccccccgccctgctgcacggccccgcctggccccccgccagacccatgttcagaggccacccccccgtgagacccctgggcccctggggcaaggtggccgccggccccagagccctgtgcctggccggcgtgcccgccgtgcagggcgagtgcgccaccaagcccagcggctag

SEQ ID NO: 215895 - DNA, 1173 bp, Artificial Sequence
  derived and/or modified sequence
atgcccgagggccccgagctgcacctggccagccagttcgtgaacgaggcctgcagagccctggtgttcggcggctgcgtggagaagagcagcgtgagcagaaaccccgaggtgcccttcgagagcagcgcctacagaatcagcgccagcgccagaggcaaggagctgagactgatcctgagccccctgcccggcgcccagccccagcaggagcccctggccctggtgttcagattcggcatgagcggcagcttccagctggtgcccagagaggagctgcccagacacgcccacctgagattctacaccgccccccccggccccagactggccctgtgcttcgtggacatcagaagattcggcagatgggacctgggcggcaagtggcagcccggcagaggcccctgcgtgctgcaggagtaccagcagttcagagagaacgtgctgagaaacctggccgacaaggccttcgacagacccatctgcgaggccctgctggaccagagattcttcaacggcatcggcaactacctgagagccgagatcctgtacagactgaagatcccccccttcgagaaggccagaagcgtgctggaggccctgcagcagcacagacccagccccgagctgaccctgagccagaagatcagaaccaagctgcagaaccccgacctgctggagctgtgccacagcgtgcccaaggaggtggtgcagctgggcggcaagggctacggcagcgagagcggcgaggaggacttcgccgccttcagagcctggctgagatgctacggcatgcccggcatgagcagcctgcaggacagacacggcagaaccatctggttccagggcgaccccggccccctggcccccaagggcagaaagagcagaaagaagaagagcaaggccacccagctgagccccgaggacagagtggaggacgccctgccccccagcaaggcccccagcagaaccagaagagccaagagagacctgcccaagagaaccgccacccagagacccgagggcaccagcctgcagcaggaccccgaggcccccaccgtgcccaagaagggcagaagaaagggcagacaggccgccagcggccactgcagacccagaaaggtgaaggccgacatccccagcctggagcccgagggcaccagcgccagctag

SEQ ID NO: 215896 - DNA, 420 bp, Artificial Sequence
  derived and/or modified sequence
atgccagaaggcccagagctgcatctggcgagtcagttcgtgaacgaagcatgtagggccctggtcttcgggggatgcgtggagaaaagctctgtctctcggaaccctgaagtgccttttgaaagcagcgcttatcgaatatcagccagcgctagaggcaaggagctgcgacttatcctgtccccactacccggagctcagccacagcaagagccgcgggccccccgtggcgcagccactccttgcccccccgccctgcttcacggcccagcgtggcccccagccagacctatgttcagaggccaccctcccgtacgacccctgggtccatgggggaaggtagccgccgggccgcgggctttgtgtctcgccggggtccctgccgtccagggagaatgcgctacaaagcccagcgggtag

SEQ ID NO: 215897 - DNA, 1173 bp, Artificial Sequence
  derived and/or modified sequence
atgcctgagggaccagaattacacttagctagtcaatttgtgaatgaagcctgcagagctcttgtcttcggaggttgcgtggagaaaagcagcgtgtctcggaatcctgaagttcccttcgagagttccgcctaccggatctctgcctcagctcgcggtaaagaactgcgcctaatcttgagccctttgccaggggctcagccacagcaagaaccgctggcattggtgttccgcttcggtatgtcgggatcctttcagctggtgcctcgggaagaactgcctcggcacgctcatctccgcttctacactgctcctccagggccacgtcttgcgctgtgtttcgtggatattcggcgctttggtagatgggatctcggcggaaaatggcaacccgggcgggggccgtgtgttttgcaggagtaccagcagttcagagagaatgtcttgagaaatctcgccgacaaggcatttgatcgtcctatctgcgaagcacttttagaccaacgcttcttcaatggaatcggaaattatctgagagctgagatcctatatagactgaagattccgccctttgagaaagcaaggtccgtcctcgaggccctgcagcaacacagaccttctcccgagttgactttgtcacagaagatcagaacaaaattgcagaaccctgacctgctcgagctgtgtcattccgtgcctaaggaggtggtccaacttggtgggaagggatacggctccgagagtggcgaagaggacttcgcggcctttagagcctggttgaggtgttacggtatgcctggcatgtctagcctgcaggaccggcacggccggacgatctggttccagggggaccctggacctctggctcctaaggggcgcaaatctaggaagaagaaatccaaagccactcagctcagtcctgaagaccgagttgaggatgccctgcctccaagcaaggcaccatcccggacacggcgggctaagcgcgatctgcccaagagaaccgctacacagcggcccgaggggacctccctgcaacaggatcccgaggcaccgactgtgcctaaaaaggggaggcggaaaggcaggcaggcagcaagcgggcactgccggcccaggaaagtgaaagccgatataccaagtctggaacctgagggcacatcagcttcctag

SEQ ID NO: 215898 - DNA, 1173 bp, Artificial Sequence
  derived and/or modified sequence
atgcccgagggcccagaacttcatttagcgagccagttcgtaaatgaagcctgtcgcgcactggtctttgggggctgcgtggaaaaatcttcagtgagccgaaaccccgaagtcccttttgaaagctctgcataccggatatctgcgtcagccaggggaaaggaactgaggttgatcttgagtcctttgccaggtgcccagcctcagcaagagcctctggcactggtcttccgctttggcatgtccggaagcttccaactggtgcctcgggaagaacttccccgtcacgcccacctccggttctataccgcccccccggggcctcgacttgcgctgtgcttcgtcgatatacgaaggttcggccggtgggatctgggcgggaaatggcagcctggtaggggaccgtgcgtgctgcaggagtaccaacagttcagggaaaatgtcctccggaatctggctgacaaagcctttgaccggccaatatgcgaggccctcctggaccaacggttcttcaacgggattgggaactacttacgggctgaaattctgtacaggctgaaaatccccccttttgagaaggccaggagcgtcctcgaggcacttcagcagcacagaccaagcccagaattgacactctcgcagaagatacgcaccaagctgcagaaccccgacctcttggaactctgtcattcggtgccaaaggaagtcgttcagttgggcggaaagggatatgggtccgagagtggagaggaggatttcgctgcatttcgcgcttggctgaggtgctatggtatgcccggcatgtctagcctgcaggataggcatggccgaactatttggtttcagggtgatccaggcccgctggctcccaaaggccgcaaaagccgaaagaaaaagtcgaaggccacgcagttgagtcctgaagacagggtcgaggacgcacttcccccatccaaggctcctagccggacaaggagggcgaaaagagacctgcccaagagaaccgctacacagaggccagagggcacgtcactgcagcaggaccccgaagctccaacggtgcccaagaaaggcaggaggaaaggacgacaggccgcttccggacactgcagaccaaggaaagtcaaggctgatattccgagcctcgaacctgaaggcacatcggccagttag

SEQ ID NO: 215899 - DNA, 420 bp, Artificial Sequence
  derived and/or modified sequence
atgcctgagggccctgagctgcacctggccagccagtttgtgaatgaggcctgccgggccctggtgtttggaggctgtgtggagaagagctctgtgtccaggaaccctgaggtgccctttgagagcagcgcctaccgcatcagcgccagcgcccggggcaaggagctgcggctcatcctgagccccctgcccggggcccagccccagcaggagccccgggcccccaggggggccgccaccccctgccccccagccctgctgcacggccctgcctggcccccagcccggcccatgttccggggccacccccctgtgcggcccctgggcccctggggcaaggtggccgccggcccccgggccctgtgcctggccggcgtgcctgctgtgcagggagaatgtgccaccaagcccagcggctag

SEQ ID NO: 215900 - DNA, 1173 bp, Artificial Sequence
  derived and/or modified sequence
atgcctgagggccctgagctgcacctggccagccagtttgtgaatgaggcctgccgggccctggtgtttggaggctgtgtggagaagagctctgtgtccaggaaccctgaggtgccctttgagagcagcgcctaccgcatcagcgccagcgcccggggcaaggagctgcggctcatcctgagccccctgcccggggcccagccccagcaggagcccctggccctggtgttccgcttcggcatgagcggcagcttccagctggtgccccgggaggagctgcccaggcatgcccacctgcgcttctacacagcccctcctggcccccggctggccctgtgctttgtggacatccgccgcttcggccgctgggacctgggcggcaagtggcagcccggccggggcccctgtgtgctgcaggagtaccagcagttccgggagaatgtgctgaggaacctggccgacaaggcctttgaccggcccatctgtgaggccctgctggaccagcgcttcttcaacggcatcggcaactacctgcgggcagagatcctgtaccgcctgaagatccccccatttgagaaggcccggtctgtgctggaggccctgcagcagcaccggcccagccctgagctgaccctgagccagaagatccgcaccaagctgcagaacccagacctgctggagctgtgccacagcgtgcccaaggaggtggtgcagctgggcggcaagggctacggcagcgagagcggggaggaggactttgctgccttccgggcctggctgcgctgctacggcatgcctggcatgagcagcctgcaggacagacatggccgcaccatctggttccagggcgaccccggccccctggcccccaagggcaggaagagcaggaagaagaagagcaaggccacccagctgagccctgaggacagagtggaggatgccctgccccccagcaaggcccccagcaggacccggcgggccaagagggacctgcccaagaggacagccacccagaggcctgagggcaccagcctgcagcaggaccctgaggcccccaccgtgcccaagaagggccgcaggaagggccggcaggccgccagcggccactgccggcccaggaaggtgaaggctgacatccccagcctggagcctgagggcaccagcgccagctag

SEQ ID NO: 215901 - DNA, 420 bp, Artificial Sequence
  derived and/or modified sequence
atgcccgagggccccgagctgcacctggccagccagttcgtgaacgaagcttgtagagcccttgtttttggtggatgtgtcgagaaaagtagcgtgagccgcaatcctgaagttcccttcgagtcaagtgcctaccgtatttctgcctctgcccgagggaaggagctgcgccttattttgtcaccgctgccgggagcacagccccagcaggagccccgtgctccaaggggagccgcgaccccttgtccccccgctctgcttcacgggcctgcctggccacccgcgaggcccatgtttaggggtcacccacccgttcggccactaggaccctggggcaaggtggccgcaggacctagggccctttgcctggctggcgtccccgccgtgcagggtgagtgtgcgacaaagccgtccggatag

SEQ ID NO: 215902 - DNA, 1173 bp, Artificial Sequence
  derived and/or modified sequence
atgcccgagggccccgagctgcacctggccagccagttcgtgaacgaggcatgccgtgcccttgtcttcggggggtgcgttgaaaaaagctcagtttctcgtaacccagaggtgcccttcgaaagtagtgcctaccggatttctgcttcagctagggggaaagaacttcgcctgatcctgagtcctctgccgggggcccagccacagcaggagcccctggccttagtgtttaggtttggaatgagcgggtcgttccagctggtcccgcgagaggaactgccacgacacgcacacttgcgattttacacagctccccctggaccccggctagctctatgctttgtcgatatcaggcggttcggtaggtgggatctgggtgggaagtggcaacctggaaggggaccttgcgtgttgcaagaataccagcagtttagagagaacgttcttcgcaatctcgctgataaggcttttgaccggccaatttgtgaggccctgctggatcagcgcttcttcaacggtatcggaaattacctgcgcgccgaaattctgtacagactcaaaattccacccttcgaaaaggctaggtccgtgctggaggcactgcagcagcataggccctcaccagagctgaccctgtcacaaaaaattaggacgaaactgcagaaccctgacttactggaactttgccactccgtaccaaaggaggtggtgcagctgggcggcaaaggttatggaagtgaatccggagaggaggattttgccgccttcagggcctggctcagatgctacggtatgccaggcatgtccagcttacaagataggcacggacggacaatttggttccagggcgatcccggacctctcgccccaaaaggaagaaaaagccgtaaaaagaagagcaaagcaactcagcttagcccagaagaccgggtggaagatgccctacctccctctaaagcccccagcaggaccagaagagctaagagggatctgccgaagagaacagcaacccagcgaccagagggcaccagcctgcaacaggaccccgaggctcctaccgtgcctaaaaagggcaggaggaaagggaggcaagccgcctccggccactgtcgaccacgcaaggtcaaggccgacataccatctttggaaccagaaggcacctctgcctcttag

SEQ ID NO: 215903 - DNA, 1173 bp, Artificial Sequence
  derived and/or modified sequence
atgcccgagggccccgagctgcacctggccagccagttcgtgaacgaggcgtgcagagcattggtcttcggaggatgcgtggaaaagtccagcgtaagccgtaaccccgaagtcccttttgaatcctccgcttatcgaatcagtgcaagcgcgcggggaaaagagctgaggctgattctatctcctctacctggtgcccagccacagcaggagcccctcgcactggtgtttcgattcgggatgagtggatcatttcagctcgtgcctagagaagaacttccccgtcatgcacacctacggttctatactgccccaccaggccctcgactcgccttatgcttcgtggacatccggaggtttggccgctgggacctgggtggcaaatggcagccagggaggggcccctgtgtgcttcaggagtatcaacagttccgcgagaacgtcctgcgcaacttggccgataaggcgttcgaccgccctatttgtgaagccctcctggaccagcgcttttttaatggtatcgggaactatctgagggccgagattctctataggctgaagatcccacctttcgaaaaggccaggagtgtgttagaggctctgcaacaacaccgcccttctcccgaactgactctctctcagaagatcaggaccaagctacagaatcccgatctgttagagctgtgccatagcgtaccgaaagaagtggtacagctcggcgggaaaggttatggttcggaatcaggcgaggaggatttcgccgccttcagggcttggctaagatgttatggaatgcccggaatgagcagtctgcaggaccggcatgggagaacaatttggtttcagggggacccggggcccttggcccccaaaggacgcaaatcacgtaagaagaaatccaaggccacacagctgtcgcctgaagaccgggtggaagatgcccttcctccctccaaggcaccaagtcgcacacggcgtgcaaaaagggaccttcctaaacgcacagccacccagagacctgagggaacatcactgcagcaagaccctgaggcacctactgtgcccaaaaaggggcggcgaaaaggcagacaagcagccagcgggcattgccggccgaggaaagtcaaggccgatatcccttcactcgaacccgaaggcactagcgcaagctag

SEQ ID NO: 215904 - DNA, 1340 bp, Artificial Sequence
  derived and/or modified sequence
atgcctgagggccccgagctgcacctggccagccagtttgtgaatgaggcctgcagggcgctggtgttcggcggctgcgtggagaagtcctctgtcagccgcaaccctgaggtgccctttgagagcagtgcctaccgcatctcagcttcagcccgcggcaaggagctgcgcctgatactgagccctctgcctggggcccagccccaacaggagccacgtgccccgcgaggagctgccacgccatgcccacctgcgcttttacacggccccgcctggcccccggctcgccctatgtttcgtggacatccgccggttcggccgctgggaccttgggggaaagtggcagccgggccgcgggccctgtgtcttgcaggagtaccagcagttcagggagaatgtgctacgaaacctagcggataaggcctttgaccggcccatctgcgaggccctcctggaccagaggttcttcaatggcattggcaactatctgcgggcagagatcctgtaccggctgaagatccccccctttgagaaggcccgctcggtcctggaggccctgcagcagcacaggccgagcccggagctgaccctgagccagaagataaggaccaagctgcagaatccagacctgctggagctatgtcactcagtgcccaaggaagtggtccagttggggggcaaaggctacgggtcagagagcggggaggaggactttgctgcctttcgagcctggctgcgctgctatggcatgccaggcatgagctccctgcaggaccggcatggccgtaccatctggttccagggggatcctggaccgttggcacccaaagggcgcaagtcccgcaaaaagaaatccaaggccacacagctgagtcctgaggacagagtggaggacgctttgcctccaagcaaggccccttccaggacacgaagggcaaagagagaccttcctaagaggactgcaacccagcggcctgaggggaccagcctccagcaggacccagaagctcccacagtgcccaagaaggggaggaggaaggggcgacaggcagcctctggccactgcagaccccggaaggtcaaggctgacatcccatccttggaaccagaggggacctcagcctcttagcaggaggctctccttgcttgcactcaccctttcttattgtcttgccctgcatctgggggtctgaatttttgggagcaggcaatatctgaaggtgcaaacaggccctacggctgttccctgcacaactctcatggttttaattgtaccccatcttccacatctttaaagctcatgtgaaaaatgctgcatttttaataaactgatacatttg

SEQ ID NO: 215905 - DNA, 420 bp, Artificial Sequence
  derived and/or modified sequence
atgccagagggtcccgaattacatctcgcaagtcagtttgtgaacgaagcttgccgcgctctggtgtttgggggatgtgtggagaagtcctcagtgtctcggaaccctgaggtgcccttcgaatcttctgcctatagaatctcggcctcggcacgaggaaaagaactgcgcctgatcctgtccccgctgcctggtgctcaaccccagcaggagccacgcgcacctcgcggagccgctactccatgccccccagcactgctgcacggacctgcttggcctccagccaggccaatgttccgaggccacccgccagttcggcctctcggcccatggggcaaggtcgccgctggacctagggcgctgtgcctcgccggagtaccagctgttcagggggagtgcgccactaagccatctggttag

SEQ ID NO: 215906 - DNA, 1173 bp, Artificial Sequence
  derived and/or modified sequence
atgccggaaggccctgaattgcaccttgcttctcagtttgttaacgaggcctgtagagctttagtgttcggcggatgtgttgaaaagtcaagcgtctccaggaaccctgaggtcccgttcgagagcagcgcttatagaatttccgcatctgccaggggtaaagagttgcgactaattctttcccctctgccaggcgcacagccccaacaggaaccgctggctctggtgttccggttcggcatgtcaggtagcttccagctcgttcctcgtgaagagcttccaagacacgcacatcttaggttttataccgctccccctggcccaagattggcgttatgctttgttgatatccggaggttcgggcgatgggacctggggggaaaatggcagcctggcagaggtccttgtgtactgcaggaataccaacagtttagggagaatgtgttaaggaatcttgccgataaggcttttgacaggcctatttgcgaagccctgttagaccagcgctttttcaacgggatcgggaactacctcagagccgaaatactgtacaggctcaagatcccaccatttgagaaggcccgatcagttctggaggcccttcagcagcatagaccttctcctgagttgaccctgtcccagaagatcagaactaagttacagaacccggatctgctggaactgtgtcactccgtgccaaaggaggtggtgcagttgggcggtaaaggttatggatccgaaagtggagaagaagactttgcagccttccgagcatggctgcgatgttacgggatgccaggcatgagctctctgcaagacagacacggcaggacgatatggttccaaggtgatcctggccctctggcaccaaaaggcagaaagtcccgtaaaaaaaagtccaaggctactcaactgtcacccgaagaccgcgtcgaggatgcccttcctcctagcaaagccccatcgcgaacaaggagggctaagagagatctccctaagagaacagccacccaacggcctgagggcacctctcttcagcaggatccagaggctcctactgtgcccaaaaaagggaggaggaaggggcgacaggctgcatccggccattgcagacccaggaaagtgaaggccgacattccttcgctcgagccagagggaacaagtgcatcctag

SEQ ID NO: 215907 - DNA, 1173 bp, Artificial Sequence
  derived and/or modified sequence
atgccagaaggcccagagctacacctggcaagccagttcgtcaatgaagcttgcagggcccttgtcttcggtggatgtgtagaaaaatcctctgtgtcccggaacccggaggtcccctttgagtcttctgcctaccggataagcgcctccgcaaggggcaaagaactgcgtttaattttatcccctctgccaggagcacaacctcagcaggagccccttgcactggtgtttaggtttggtatgagcggatcctttcaattggtgccccgagaagaacttccacgacatgcccacttacgattctacacagcgcctcccggtcccaggttggccttgtgcttcgtggacatccgacgatttggcaggtgggatctggggggtaaatggcagccaggaagagggccttgcgtgctacaagagtaccaacaattccgtgagaacgtgctgagaaacctggcagacaaggccttcgatagacccatttgtgaagccctcctggatcagcggttctttaacgggattggaaactacctgagggcagagatactgtatcgcctgaaaattcctcccttcgaaaaggctagatccgtgctcgaagcccttcaacagcaccggcctagcccagagctcactctctctcagaagatccgcaccaaattgcagaacccagacctgctcgaattatgccactccgtgccaaaggaggttgtccagctgggtgggaaaggatatggcagcgaatctggcgaagaggacttcgccgcatttagagcatggctgcgctgctacggaatgccgggtatgagttccctgcaggataggcatgggagaaccatatggttccagggcgatcccggtcccctggcgcctaaagggcgtaagtcacgcaaaaaaaaatctaaggcaacacaattaagccccgaagatcgagtggaggatgccctgcctccaagcaaggcaccatctagaacccgcagagcaaaaagagatctgcctaaaagaaccgccacacaacggccagaaggcacctcccttcaacaagatcccgaagcgccaacagtgcctaagaagggtcgcaggaaagggaggcaggccgcttccggacactgtcgtccaaggaaagtcaaagccgacattccctctctggagccggaggggacctctgcctcatag

SEQ ID NO: 215908 - protein, 488 aa, Artificial Sequence
  derived and/or modified sequence
MAAGSEATTPVIVAAGAGGEEGEHVKPFKPEKAKEIIMSLQQPAIFCNMVFDWPARHWNAKYLSQVLHGKQIRFRMGMKSMSTVPQFETTCNYVEATLEEFLTWNCDQSSISGPFRDYDHSKFWAYADYKYFVSLFEDKTDLFQDVKWSDFGFPGRNGQESTLWIGSLGAHTPCHLDSYGCNLVFQVQGRKRWHLFPPEDTPFLYPTRIPYEESSVFSKINVVNPDLKRFPQFRKAQRHAVTLSPGQVLFVPRHWWHYVESIDPVTVSINSWIELEEDHLARVEEAITRMLVCALKTAENPQNTRAWLNPTEVEETSHAVNCCYLNAAVSAFFDRCRTSEVVEIQALRTDGEHMKKEELNVCNHMEVGQTGSQNLTTGTDKPEAASPFGPDLVPVAQRSEEPPSERGGIFGSDGKDFVDKDGEHFGKLHCAKRQQIMSNSENAIEEQIASNTTTTPQTFISTDDLLDCLVNPQVTRIVAQLLIQGRSL

SEQ ID NO: 215909 - DNA, 1467 bp, Artificial Sequence
  derived and/or modified sequence
atggctgctggctcagaggccactacacccgtgattgtcgctgcaggggcaggcggagaggaaggtgagcatgtcaagccttttaagcctgagaaggctaaagaaattatcatgtcattacagcagccagccatcttttgtaacatggtctttgattggcccgctcgacactggaacgccaaatatttgagccaagtgctgcacggaaagcagattaggttccgtatgggtatgaagtccatgtccactgttccccaatttgagacaacatgcaactatgtagaggccactctcgaggagttcctgacctggaattgcgatcagtccagtatctctggtccgttccgggattacgaccattccaagttctgggcctatgctgactacaaatacttcgtgagtcttttcgaggataagaccgacctgttccaagatgtaaagtggtcagacttcgggttccctgggcgcaatggacaagagtctactctgtggattggaagcctcggggcccatacaccctgccacctggattcatatgggtgcaacttggtctttcaggtccagggaaggaagagatggcacctcttcccccccgaggatactccctttctgtatccgactagaattccttacgaagaaagctccgtgttctctaaaataaacgttgtaaatcccgacctgaaaagattcccgcagttcagaaaggcccagcggcacgccgtgactctctctccaggccaggtgctgtttgtgccacgacactggtggcactatgtggaatccatcgacccggtgactgtgtctatcaacagttggatagagttggaagaagatcacctcgctcgggtcgaagaggccatcactaggatgctggtctgcgcgctgaaaaccgctgaaaacccacagaacaccagggcttggcttaatcctactgaagtggaggagacctctcatgccgtgaactgttgttacttaaacgctgccgtgagtgcatttttcgatcggtgcagaacaagtgaggtggttgagatccaagccttgaggacagatggggaacatatgaagaaggaagagcttaatgtttgtaatcacatggaggtggggcagaccgggtcgcagaacttaacaaccgggacagacaagccagaggccgcttctccattcgggcctgacctggttcccgtcgcccaacggtctgaggagcctcccagcgaacgtggcgggattttcggaagcgacggaaaggattttgtggataaggacggggaacattttggaaagctgcattgtgctaaaagacagcagattatgtccaatagcgagaatgcaatcgaggaacagatcgcttctaacacaaccacaaccccccaaaccttcattagcactgacgatctgctggactgtctggtaaaccctcaggtgactcgcatcgtcgctcagctactcattcagggccggtccctttag

SEQ ID NO: 215910 - DNA, 1467 bp, Artificial Sequence
  derived and/or modified sequence
atggctgctggcagcgaggccaccacccctgtgattgtggccgccggggccggcggggaggagggggagcacgtgaagcccttcaagccagagaaggccaaggagatcatcatgagcctgcagcagcctgccatcttctgcaacatggtgtttgactggccagcccggcactggaatgccaagtacctgagccaggtgctgcacggcaagcagatccgcttcaggatgggcatgaagtccatgagcacagtgccccagtttgagaccacctgcaactacgtggaggccaccctggaggagttcctgacctggaactgtgaccagagcagcatcagcggccccttccgggactatgaccacagcaagttctgggcctatgctgactacaagtactttgtgtccctgtttgaggacaagacagacctcttccaggatgtgaagtggagcgactttggcttccctggaagaaatggccaggagagcaccctgtggattggcagcctgggcgcccacaccccctgccacctggacagctatggctgcaacctggtgttccaggtgcagggcaggaagcgctggcacctgtttcctcctgaggacacccccttcctgtaccccacccgcatcccctatgaggagagctctgtgttcagcaagatcaacgtggtgaacccagacctgaagcgcttcccccagttcaggaaggcccagagacatgctgtgaccctgagccctggccaggtgctgtttgtgcccaggcactggtggcactacgtggagagcattgatcctgtgacagtgtccatcaacagctggattgagctggaggaggaccacctggcccgggtggaggaggccatcaccaggatgctggtgtgtgccctgaagacagctgagaacccccagaacacccgggcctggctgaaccccacagaggtggaggagaccagccatgctgtgaactgctgctacctgaatgctgctgtgtctgccttctttgaccgctgcaggaccagcgaggtggtggagatccaggccctgaggacagatggagagcacatgaagaaggaggagctgaatgtgtgcaaccacatggaggtgggccagacaggcagccagaacctgaccactggaacagacaagccagaggccgccagccccttcggccctgacctggtgcctgtggcccagaggtctgaggagccccccagcgagcggggcggcatcttcggcagtgatggcaaggactttgtggacaaggatggagagcactttgggaagctgcactgtgccaagaggcagcagatcatgagcaacagtgaaaatgccatcgaggagcagatcgccagcaacaccaccaccaccccccagaccttcatcagcacagatgacctgctggactgcctggtgaacccccaggtgaccagaattgtggcccagctgctgatccagggccgcagcctgtag

SEQ ID NO: 215911 - DNA, 1467 bp, Artificial Sequence
  derived and/or modified sequence
atggccgccggcagcgaggccaccacccccgtgatcgtggccgccggtgccgggggcgaagagggcgagcacgtcaagccattcaaacctgagaaggccaaagaaataataatgtctctgcagcagcctgccattttctgcaacatggtttttgattggcccgcccgccactggaacgcaaaatatctgagtcaggtcttgcatgggaagcagattcggttccgtatgggtatgaagagcatgtcaaccgttccccagtttgagaccacctgtaattatgtggaagccactctggaggagttcttaacgtggaattgtgatcaatcctcaatcagcggtccctttagagactacgatcactcaaagttctgggcttatgctgattacaagtacttcgtgagtctgttcgaggataagaccgatctgttccaagacgtgaagtggagcgactttggctttcctggcaggaacggacaggaaagtaccttatggataggttccctgggggcacacactccctgccatttagatagctatggctgcaacctggtgttccaggtgcagggccgcaagagatggcacctctttccgcccgaggacaccccttttctctaccccacccgcattccctatgaggaatcctcagttttctctaaaattaatgttgttaaccctgacctcaaaaggtttcctcagttcagaaaggcccagcgtcacgccgtcacattaagtcctggacaggtacttttcgttcctagacattggtggcactacgtggagagcatcgaccccgtcacagtatcgattaattcctggatcgagcttgaggaggaccacttggctcgagtcgaggaggccatcacacggatgctcgtctgcgcactaaaaactgccgaaaatccccagaatactcgagcgtggctgaacccaactgaagttgaggaaaccagtcatgccgttaattgctgctacctgaatgctgcagtgtctgccttcttcgacagatgtcgcacatctgaggtcgtcgaaatacaggccctgagaactgacggagagcatatgaaaaaagaagaactgaacgtttgcaatcatatggaggttgggcaaaccggcagtcagaatctgaccaccggcacggacaagcccgaagccgcctctccttttgggcccgatttagtgccggtagctcagagatcagaagagccaccttccgagcgaggggggatattcggaagcgacggcaaagacttcgtggacaaggacggggaacactttggtaagttgcactgtgccaagcgccaacaaattatgagtaattctgagaacgcaatcgaggaacagatcgccagtaacacaactactacgccacagacctttatatctacagatgacctgctagactgtctggtgaatccacaggtcacacggatagttgcccagcttctgatccaggggcgctcgctgtag

SEQ ID NO: 215912 - DNA, 1467 bp, Artificial Sequence
  derived and/or modified sequence
atggccgctggcagcgaggccacaaccccagtcattgtggctgccggagccggaggagaagaaggtgaacatgtgaaaccttttaagcctgaaaaggcgaaagagatcattatgagtctgcagcagcccgcaatattttgtaacatggtgtttgactggcccgctagacattggaacgcaaaatatctgtcccaagtgctgcatgggaagcaaatacggtttaggatgggaatgaagagcatgagcacagtgccgcagttcgagacaacgtgcaattacgtagaagccaccctcgaagagtttctgacgtggaactgcgatcaatctagtatcagcgggccatttagagattatgaccactcgaagttctgggcctatgcagactacaaatacttcgtttctttgttcgaagacaaaaccgacctgtttcaggacgtgaagtggagcgatttcggatttccgggtaggaacggtcaggaatccaccctgtggataggatcgctcggggctcacaccccatgtcaccttgacagttatgggtgcaacttagtttttcaggtgcagggtcgcaaaaggtggcacctgtttccccctgaggatacgccgtttctgtacccgacgcgcattccctacgaggagtcgagcgttttttcaaaaattaacgtggtgaaccccgatcttaaacggtttcctcagttcaggaaggcccagagacatgccgtcacgctctctccgggacaggtcctcttcgtcccacgccattggtggcactatgtggagagcattgaccccgtgacagtgagcattaactcctggattgaactcgaagaggaccacctggctcgggttgaggaggcaatcacccggatgctggtgtgcgctcttaaaactgcggagaatcctcagaatacgagggcttggctgaatccaaccgaggttgaagaaacttcccacgccgttaactgctgctacttgaatgccgctgtgtctgcattcttcgacaggtgccgcacaagcgaagttgtggagattcaagccctgaggacagacggtgagcacatgaaaaaagaagaactgaacgtgtgcaaccatatggaggtcggacagacaggcagtcagaatctgacaacgggcacggataagcctgaggctgcctccccctttgggcctgatctcgttcctgtggcccagcgatctgaagaaccgccaagcgaaagaggtggcatctttgggtccgacggaaaagatttcgtggataaagacggcgagcacttcggtaagctgcactgcgctaagagacagcagattatgtctaattctgagaatgccattgaggagcagattgcatccaacacaaccactaccccccaaactttcatatcgacagatgacttgctcgattgtctggtcaatcctcaagtgaccaggatcgtagcccagctccttatccagggccgatctttgtag

SEQ ID NO: 215913 - DNA, 1953 bp, Artificial Sequence
  derived and/or modified sequence
ccggcgtttccgtaggagccgggcgggagtcgccggggctccttcctgtggtgcagcttcgggtctcggagtttggcccctactctgaccccaccccagctccgctccgccttgggttccggcagaacccgccttgcggtagccatggcagcaggctccgaggcgaccactcctgtgatcgttgcggctggggctggaggggaggaaggtgaacatgtcaaaccttttaagccagagaaagcaaaagaaattatcatgtctttacaacaacctgcaatcttctgtaacatggtgtttgattggccagcacgacactggaatgctaaatacctttcgcaggtccttcatggcaagcagatacgattcagaatggggatgaaaagcatgagcacagttcctcagtttgaaactacatgtaattacgtagaagctacactcgaagagtttctgacctggaactgtgaccagtctagtatttctggaccatttagagattatgaccattccaagttctgggcttatgctgactataaatattttgtcagtctatttgaagacaagacagatcttttccaggatgtgaaatggtctgacttcgggtttcctggaagaaatggacaggaaagtacattgtggattggctccttgggagcccacacaccctgtcatctggactcctatggttgtaacttggtattccaggtacaaggaaggaaacgatggcatctctttcctcctgaagatactcctttcctttatccaactagaatcccttatgaagaatctagtgtgttcagtaaaatcaatgttgtcaatcctgatttaaagcgttttcctcagttccggaaagctcaaagacatgcggttacactgagcccaggacaggttctctttgttcccagacactggtggcattacgtagaatccattgatcctgtcactgtcagtataaactcatggattgaactggaagaggatcacctagcccgggtagaagaggcaatcacccgtatgcttgtgtgtgccctgaaaactgcagagaatccacaaaataccagagcctggttaaaccccactgaggttgaggaaacgtcccatgcagtcaactgttgctacttaaatgcagctgtttctgcattttttgatcgctgcagaacatctgaggtagtagaaatccaagcactgagaacagatggagagcacatgaaaaaggaagaattaaatgtgtgcaaccacatggaggtgggccaaacaggtagccagaacttgaccacaggaacagacaaaccggaggcagcaagtccctttggccctgatctggtccctgtagcacagaggtccgaagaaccgccttcagaaagaggaggcatatttggaagtgatgggaaagactttgtggacaaggatggagaacactttggaaaattgcattgtgccaagagacaacaaataatgagcaacagtgaaaatgcaattgaggaacagattgcctcaaatactactacgactcctcaaacattcatttctacggatgacttgctggactgcttggtgaatccacaagtaaccaggatagtggcacaacttttgatacaaggaagaagtttatgattcaagtggaagatgacttttaaaataatattttttaaatatatatttttaagtagtatgactaaaataaagatgaaccagcaaaaggtcagtttgcacatttgtaaatgtatttatccttaccgaattacatgtcagtctgttgccaccttctttcatgcacattcctctttggccaaactggctgctctttgtttgtaagcttttgttcctctctcatcccatacttttagcctgtgtcaaatgtaagtcccaagtatttccagcaggaagtaatgtcttcctcagcctcaaccagggaccaaccggctgcttacttttgcaaataaaattttactagaa

SEQ ID NO: 215914 - DNA, 1467 bp, Artificial Sequence
  derived and/or modified sequence
atggccgccggcagcgaggccaccacccccgtgatcgtggccgccggcgccggcggcgaggagggcgagcacgtgaagcccttcaagcccgagaaggccaaggagatcatcatgagcctgcagcagcccgccatcttctgcaacatggtgttcgactggcccgccagacactggaacgccaagtacctgagccaggtgctgcacggcaagcagatcagattcagaatgggcatgaagagcatgagcaccgtgccccagttcgagaccacctgcaactacgtggaggccaccctggaggagttcctgacctggaactgcgaccagagcagcatcagcggccccttcagagactacgaccacagcaagttctgggcctacgccgactacaagtacttcgtgagcctgttcgaggacaagaccgacctgttccaggacgtgaagtggagcgacttcggcttccccggcagaaacggccaggagagcaccctgtggatcggcagcctgggcgcccacaccccctgccacctggacagctacggctgcaacctggtgttccaggtgcagggcagaaagagatggcacctgttcccccccgaggacacccccttcctgtaccccaccagaatcccctacgaggagagcagcgtgttcagcaagatcaacgtggtgaaccccgacctgaagagattcccccagttcagaaaggcccagagacacgccgtgaccctgagccccggccaggtgctgttcgtgcccagacactggtggcactacgtggagagcatcgaccccgtgaccgtgagcatcaacagctggatcgagctggaggaggaccacctggccagagtggaggaggccatcaccagaatgctggtgtgcgccctgaagaccgccgagaacccccagaacaccagagcctggctgaaccccaccgaggtggaggagaccagccacgccgtgaactgctgctacctgaacgccgccgtgagcgccttcttcgacagatgcagaaccagcgaggtggtggagatccaggccctgagaaccgacggcgagcacatgaagaaggaggagctgaacgtgtgcaaccacatggaggtgggccagaccggcagccagaacctgaccaccggcaccgacaagcccgaggccgccagccccttcggccccgacctggtgcccgtggcccagagaagcgaggagccccccagcgagagaggcggcatcttcggcagcgacggcaaggacttcgtggacaaggacggcgagcacttcggcaagctgcactgcgccaagagacagcagatcatgagcaacagcgagaacgccatcgaggagcagatcgccagcaacaccaccaccaccccccagaccttcatcagcaccgacgacctgctggactgcctggtgaacccccaggtgaccagaatcgtggcccagctgctgatccagggcagaagcctgtag

SEQ ID NO: 215915 - protein, 982 aa, Artificial Sequence
  derived and/or modified sequence
MSSKMVISEPGLNWDISPKNGLKTFFSRENYKDHSMAPSLKELRVLSNRRIGENLNASASSVENEPAVSSATQAKEKVKTTIGMVLLPKPRVPYPRFSRFSQREQRSYVDLLVKYAKIPANSKAVGINKNDYLQYLDMKKHVNEEVTEFLKFLQNSAKKCAQDYNMLSDDARLFTEKILRACIEQVKKYSEFYTLHEVTSLMGFFPFRVEMGLKLEKTLLALGSVKYVKTVFPSMPIKLQLSKDDIATIETSEQTAEAMHYDISKDPNAEKLVSRYHPQIALTSQSLFTLLNNHGPTYKEQWEIPVCIQVIPVAGSKPVKVIYINSPLPQKKMTMRERNQIFHEVPLKFMMSKNTSVPVSAVFMDKPEEFISEMDMSCEVNECRKIESLENLYLDFDDDVTELETFGVTTTKVSKSPSPASTSTVPNMTDAPTAPKAGTTTVAPSAPDISANSRSLSQILMEQLQKEKQLVTGMDGGPEECKNKDDQGFESCEKVSNSDKPLIQDSDLKTSDALQLENSQEIETSNKNDMTIDILHADGERPNVLENLDNSKEKTVGSEAAKTEDTVLCSSDTDEECLIIDTECKNNSDGKTAVVGSNLSSRPASPNSSSGQASVGNQTNTACSPEESCVLKKPIKRVYKKFDPVGEILKMQDELLKPISRKVPELPLMNLENSKQPSVSEQLSGPSDSSSWPKSGWPSAFQKPKGRLPYELQDYVEDTSEYLAPQEGNFVYKLFSLQDLLLLVRCSVQRIETRPRSKKRKKIRRQFPVYVLPKVEYQACYGVEALTESELCRLWTESLLHSNSSFYVGHIDAFTSKLFLLEEITSEELKEKLSALKISNLFNILQHILKKLSSLQEGSYLLSHAAEDSSLLIYKASDGKVTRTAYNLYKTHCGLPGVPSSLSVPWVPLDPSLLLPYHIHHGRIPCTFPPKSLDTTTQQKIGGTRMPTRSHRNPVSMETKSSCLPAQQVETEGVAPHKRKIT

SEQ ID NO: 215916 - protein, 845 aa, Artificial Sequence
  derived and/or modified sequence
MKKHVNEEVTEFLKFLQNSAKKCAQDYNMLSDDARLFTEKILRACIEQVKKYSEFYTLHEVTSLMGFFPFRVEMGLKLEKTLLALGSVKYVKTVFPSMPIKLQLSKDDIATIETSEQTAEAMHYDISKDPNAEKLVSRYHPQIALTSQSLFTLLNNHGPTYKEQWEIPVCIQVIPVAGSKPVKVIYINSPLPQKKMTMRERNQIFHEVPLKFMMSKNTSVPVSAVFMDKPEEFISEMDMSCEVNECRKIESLENLYLDFDDDVTELETFGVTTTKVSKSPSPASTSTVPNMTDAPTAPKAGTTTVAPSAPDISANSRSLSQILMEQLQKEKQLVTGMDGGPEECKNKDDQGFESCEKVSNSDKPLIQDSDLKTSDALQLENSQEIETSNKNDMTIDILHADGERPNVLENLDNSKEKTVGSEAAKTEDTVLCSSDTDEECLIIDTECKNNSDGKTAVVGSNLSSRPASPNSSSGQASVGNQTNTACSPEESCVLKKPIKRVYKKFDPVGEILKMQDELLKPISRKVPELPLMNLENSKQPSVSEQLSGPSDSSSWPKSGWPSAFQKPKGRLPYELQDYVEDTSEYLAPQEGNFVYKLFSLQDLLLLVRCSVQRIETRPRSKKRKKIRRQFPVYVLPKVEYQACYGVEALTESELCRLWTESLLHSNSSFYVGHIDAFTSKLFLLEEITSEELKEKLSALKISNLFNILQHILKKLSSLQEGSYLLSHAAEDSSLLIYKASDGKVTRTAYNLYKTHCGLPGVPSSLSVPWVPLDPSLLLPYHIHHGRIPCTFPPKSLDTTTQQKIGGTRMPTRSHRNPVSMETKSSCLPAQQVETEGVAPHKRKIT

SEQ ID NO: 215917 - protein, 338 aa, Artificial Sequence
  derived and/or modified sequence
MSSKMVISEPGLNWDISPKNGLKTFFSRENYKDHSMAPSLKELRVLSNRRIGENLNASASSVENEPAVSSATQAKEKVKTTIGMVLLPKPRVPYPRFSRFSQREQRSYVDLLVKYAKIPANSKAVGINKNDYLQYLDMKKHVNEEVTEFLKFLQNSAKKCAQDYNMLSDDARLFTEKILRACIEQVKKYSEFYTLHEVTSLMGFFPFRVEMGLKLEKTLLALGSVKYVKTVFPSMPIKLQLSKDDIATIETSEQTAEAMHYDISKDPNAEKLVSRYHPQIALTSQSLFTLLNNHGPTYKEQWEIPVCIQVIPVAGSKPVKVIYINSPLPQKKMTMRER

SEQ ID NO: 215918 - protein, 145 aa, Artificial Sequence
  derived and/or modified sequence
MSSKMVISEPGLNWDISPKNGLKTFFSRENYKDHSMAPSLKELRVLSNRRIGENLNASASSVENEPAVSSATQAKEKVKTTIGMVLLPKPRVPYPRFSRFSQREQRSYVDLLVKYAKIPANSKAVGINKNDYLQYLDMKKHVNEE

SEQ ID NO: 215919 - protein, 99 aa, Artificial Sequence
  derived and/or modified sequence
MSSKMVISEPGLNWDISPKNGLKTFFSRENYKDHSMAPSLKELRVLSNRRIGENLNASASSVENEPAVSSATQAKEKVKTTIGMVLLPKPRVPYPRFSR

SEQ ID NO: 215920 - protein, 94 aa, Artificial Sequence
  derived and/or modified sequence
MSSKMVISEPGLNWDISPKNGLKTFFSRENYKDHSMAPSLKELRVLSNRRIGENLNASASSVENEPAVSSATQAKEKVKTTIGMVLLPKPRVPY

SEQ ID NO: 215921 - DNA, 2949 bp, Artificial Sequence
  derived and/or modified sequence
atgtccagtaagatggtgatcagcgaacctggtctcaattgggacatctctcctaaaaacggcctgaaaacctttttttctagagaaaattacaaggaccatagtatggcgcctagcctgaaggaactgcgcgtgttatctaatcggagaatcggcgagaacctaaatgccagtgctagctcagttgagaatgaaccggctgtatcaagtgcgacccaggcgaaggagaaggtgaagacaacaattggtatggttctgctgcctaagccccgagtcccctacccgagattcagccgcttctcccagagggagcagcggagttatgtcgatctcttggttaagtatgccaaaatacccgcaaattccaaggcagttggaatcaataaaaatgactacctgcagtatcttgatatgaaaaaacacgtgaatgaagaagtgaccgaattcctgaaatttctccagaatagcgctaagaagtgtgcacaagattataatatgctctcagatgacgcccgcctgttcactgaaaagattctgcgtgcttgcattgaacaggtcaagaagtactcagaattctataccttgcacgaggtgactagtctgatgggcttctttccattccgggtggagatgggattgaagctcgaaaagactttgttggcattaggctctgttaagtatgtcaagactgtattcccatctatgcctatcaaattacaactgtcaaaggacgatattgccactatagagacttctgagcagactgcggaggctatgcattacgacatatcaaaggaccctaacgcggaaaaactggtttcccggtaccatccacaaatcgccttgacctcccagtcgcttttcactttgttgaacaaccatggaccaacatataaagagcagtgggagatccccgtgtgcatccaggtcatcccagtggcggggtctaagcctgttaaagtgatatatataaattcgccactgccccagaagaagatgacaatgagagagcgcaaccaaatctttcacgaggtgccgctgaaattcatgatgtctaagaacactagcgtacccgtgtccgccgtctttatggacaaaccagaggagttcatttccgaaatggatatgagttgcgaagtgaacgagtgccgcaagatcgaatccctggagaacctatatcttgacttcgatgatgacgtgactgagttggagacttttggggtcactaccacgaaggtatccaaatccccatcacctgcatcaacatccacagttcctaatatgaccgatgcaccgacggccccaaaggccgggacaactacagtcgccccttctgctcccgacattagtgcaaatagccgcagcttgagccagattctcatggagcagcttcaaaaggaaaaacaattggtcaccgggatggatggtggacccgaagaatgcaagaacaaggacgaccagggatttgagagttgtgaaaaggtgtcaaatagcgacaagccgctgatccaagactcagacctcaaaacttcagatgccctgcagctggagaactctcaggagatcgaaactagtaataaaaatgatatgactattgatatcctccatgctgacggtgagcgcccgaacgtattagagaatttagataattctaaagaaaaaactgtcggcagtgaagctgccaagaccgaggacactgtactgtgttccagcgataccgacgaagagtgcctcatcatcgatactgagtgcaagaacaattccgacgggaaaactgccgtggtaggtagtaatctatccagcagaccagcctctccaaactctagttctggccaggccagcgtggggaatcagactaacactgcttgctctcctgaggagtcttgcgtgcttaagaaacctattaaaagagtgtacaaaaagttcgatccagtgggagaaatccttaaaatgcaggatgagctgctgaaacctatttcacgaaaagtgcccgagctccctctgatgaacctggaaaactccaagcagccaagcgtgtccgaacagctgtccggcccaagcgattcctcctcctggcccaagtcaggctggccatccgccttccagaaacctaagggccggcttccctacgagctgcaggattacgttgaggacacaagcgagtacctggcgccgcaagaagggaatttcgtttacaagctgttctctctgcaggaccttttactcctggtccggtgcagtgtccagagaattgagacccggccccgttctaaaaagagaaagaagatcaggcgacagttccctgtttatgtactgccaaaggtagaataccaggcatgttacggggtggaggccctgaccgaatccgaactttgcagattgtggaccgagagcctgctgcacagtaattccagcttttatgtcgggcacattgacgcctttaccagtaagctgttcctcctggaggaaatcacgagcgaagaattgaaggagaaattaagcgccctgaaaatttcaaatctcttcaacattctgcagcacatcttgaagaagttgtcttccctgcaggaaggctcttatctgttgtctcacgcggcagaggactccagcttactgatctacaaagcttccgatggcaaagtaacccgtacagcatacaacctctacaagactcactgcggactccctggtgtcccttcctcgctctccgtaccatgggtgccactcgatcccagcctgcttctgccataccacatccatcacggcaggatcccatgtacttttccacccaagtcccttgacacaacgacgcagcagaagataggggggacacggatgcccaccagaagccatcgtaatcccgttagtatggaaacaaaaagcagctgcctccctgctcagcaagtggagacagagggagtggctccccacaagagaaagattacctag

SEQ ID NO: 215922 - DNA, 2538 bp, Artificial Sequence
  derived and/or modified sequence
atgaaaaaacacgtgaacgaggaggtgacagagtttctgaagttcctgcagaattccgccaaaaaatgcgcccaggattataatatgctgtctgacgacgctaggctattcaccgaaaagatcctccgcgcatgcattgaacaggtgaaaaagtacagtgagttttacacgctgcatgaagtaacgagcttgatgggcttctttccctttcgtgttgaaatgggcttaaaacttgaaaaaacgcttctggctttgggctctgtgaaatacgtaaaaaccgtgttccccagtatgccgattaaactgcaactgagtaaggatgatatcgctactattgaaacttctgagcaaaccgctgaggccatgcactatgacatctctaaggaccctaatgcagagaaattggtgagccggtaccatccgcagattgcgctgacatcacagtctctgtttaccctgctgaacaatcatggcccaacctacaaggaacaatgggaaatcccagtttgtattcaggttatcccagtggcgggatcgaagcccgtgaaggttatttacatcaattcaccactacctcaaaaaaagatgaccatgagagaaaggaaccaaatcttccacgaagtgcctctgaagttcatgatgtccaaaaacacatccgtgccagtgtctgccgtgtttatggacaaacccgaggaatttatctccgaaatggatatgtcatgtgaagttaacgaatgccgcaagattgaatcactggaaaatctgtaccttgatttcgatgacgatgtgactgagctggaaaccttcggagtgaccaccacaaaggtctccaaatcaccatcaccggccagcacttccacggtccccaacatgacagatgcgcccacagcccccaaggccggtacaactactgttgcaccatctgcgcctgacatttctgcaaactcacggagtctgtcacagatcttaatggagcagctgcaaaaagagaaacagctggtcacagggatggacggcgggccagaggaatgcaaaaacaaggatgaccaggggtttgagtcatgtgaaaaggtgtccaactcagataaacctttaatacaagacagtgacctgaagacgtctgatgcactgcagctggaaaatagtcaggaaattgaaacctccaataaaaacgacatgacaatcgatattctacacgccgacggcgaaaggcccaatgtcttagagaacctcgacaactccaaggagaaaactgtgggcagcgaggccgctaaaaccgaagacacagttctttgtagttcagatactgatgaagagtgtcttatcatagacactgagtgtaagaataattctgacggcaagacggctgtcgtgggttctaacctctcctcacgacccgccagtcctaatagctcaagcggacaggcttccgtaggaaatcagactaacacagcttgtagccccgaagagtcatgcgtgctgaagaagccaatcaagcgtgtctacaaaaaatttgatcccgttggggagatcctgaaaatgcaagatgaactcctgaagcccatcagccgcaaagtgcctgagctgcctctgatgaacctcgagaactccaaacagccgagcgtatcagaacagctcagcgggccatccgattcgtcttcttggcccaaatccggctggccatcagcttttcagaagccaaagggacgcttaccttatgagcttcaggactacgttgaagataccagcgaatacctggccccacaggaaggcaatttcgtgtacaagctcttttccctccaagacctgctcctcttggtccgatgtagcgtgcagcgaatagagaccagaccgaggtccaagaagaggaagaagataaggcgacagtttcccgtctatgtcctgccaaaagtggagtaccaagcttgttacggggtcgaggcgctgactgaatccgagttgtgtcgactgtggactgaaagccttttgcacagcaattcaagcttctacgtcggacacatcgacgctttcacttcaaagctgttcttacttgaggagatcacttcagaagaacttaaggaaaaactgagcgcattaaagatttccaatctttttaacatcctccagcatatcttgaagaaactgtcttcactccaagaggggagctacctgctgtcacacgcagcagaggatagctctctgctgatctataaagcctctgatggcaaggtcacccgtacagcctataatctgtacaagacgcactgcgggctgccaggagttcctagcagtctgtccgtcccatgggtccccctggatccttctctgctattaccataccacatccaccatggcagaatcccctgtaccttcccaccaaaaagccttgacacgaccacccaacagaagatcgggggaacacgtatgccaacacgctcgcaccgcaatcctgtgtctatggaaacaaaatcaagctgtttgcctgcccagcaggttgaaaccgagggagtcgcaccacataaacggaagatcacctag

SEQ ID NO: 215923 - DNA, 2949 bp, Artificial Sequence
  derived and/or modified sequence
atgagcagcaagatggtgatcagcgagcccggcctgaactgggacatcagccccaagaatggcctgaagaccttcttcagccgggagaactacaaggaccacagcatggcccccagcctgaaggagctgcgggtgctgagcaacagaagaattggagagaacctgaatgccagcgccagctctgtggagaatgaacctgctgtgagcagcgccacccaggccaaggagaaggtgaagaccaccatcggcatggtgctgctgcccaagccccgggtgccctacccccgcttcagccgcttcagccagcgggagcagaggagctatgtggacctgctggtgaagtatgccaagatcccagccaacagcaaggctgtgggcatcaacaagaatgactacctgcagtacctggacatgaagaagcacgtgaatgaggaggtgacagagttcctgaagttcctgcagaacagcgccaagaagtgtgcccaggactacaacatgctgagtgatgatgcccggctcttcacagagaagatcctgcgggcctgcatcgagcaggtgaagaagtacagcgagttctacaccctgcacgaggtgaccagcctgatgggcttcttccccttccgggtggagatgggcctgaagctggagaagaccctgctggccctgggctctgtgaagtatgtgaagacagtgttccccagcatgcccatcaagctgcagctgagcaaggatgacatcgccaccatcgagaccagcgagcagacagctgaggccatgcactatgacatcagcaaggaccccaatgctgagaagctggtgagccgctaccacccccagatcgccctgaccagccagagcctcttcaccctgctgaacaaccacggccccacctacaaggagcagtgggagatccctgtgtgcatccaggtgattcctgtggccggcagcaagcctgtgaaggtgatctacatcaacagccccctgccccagaagaagatgaccatgagggagaggaaccagatcttccacgaggtgcccctgaagttcatgatgagcaagaacacctctgtgcctgtgtctgctgtgttcatggacaagccagaggagttcatcagcgagatggacatgagctgtgaggtgaatgaatgtaggaagattgagagcctggagaacctgtacctggactttgatgatgatgtgacagagctggagaccttcggcgtgaccaccaccaaggtgtccaagagccccagccctgccagcaccagcacagtgcccaacatgacagatgcccccacagcccccaaggccggcaccaccaccgtggcccccagcgccccagacatcagcgccaacagccgcagcctgagccagatcctgatggagcagctgcagaaggagaagcagctggtgacaggcatggatggcggccctgaggagtgcaagaacaaggatgaccagggctttgagagctgtgagaaggtgagcaacagcgacaagcccctcatccaggacagcgacctgaagaccagtgatgccctgcagctggagaacagccaggagattgagaccagcaacaagaatgacatgaccatcgacatcctgcatgctgatggagagcggcccaacgtgctggagaacctggacaacagcaaggagaagacagtgggcagcgaggccgccaagacagaggacacagtgctgtgcagcagtgacacagatgaggagtgcctgatcatcgacacagagtgcaagaacaacagtgatggcaagacagctgtggtgggcagcaacctgagcagcaggcctgccagccccaacagcagcagcggccaggcctctgtgggcaaccagaccaacacagcctgcagccctgaggagagctgtgtgctgaagaagcccatcaagagggtgtacaagaagtttgatcctgtgggggagatcctgaagatgcaggatgagctgctgaagcccatcagcaggaaggtgcctgagctgcccctgatgaacctggagaacagcaagcagcccagcgtgtctgagcagctgagcggccccagcgacagcagctcctggcccaagagcggctggcccagcgccttccagaagcccaagggccgcctgccctatgagctgcaggactatgtggaggacaccagcgagtacctggccccccaggagggcaactttgtgtacaagctgttcagcctgcaggacctgctgctgctggtgcgctgcagcgtgcagagaattgagacccggcccaggagcaagaagaggaagaagatccggcggcagtttcctgtgtatgtgctgcccaaggtggagtaccaggcctgctatggagtggaggccctgacagaaagtgagctgtgccgcctgtggacagagagcctgctgcacagcaacagcagcttctacgtgggccacattgatgccttcaccagcaagctgttcctgctggaggagatcaccagcgaggagctgaaggagaagctgagcgccctgaagatcagcaacctcttcaacatcctgcagcacatcctgaagaagctgagcagcctgcaggagggcagctacctgctgagccatgctgctgaggacagcagcctgctgatctacaaggccagtgatggcaaggtgaccaggacagcctacaacctgtacaagacccactgcggcctgcccggggtgcccagcagcctgtctgtgccctgggtgcccctggaccccagcctgctgctgccctaccacatccaccacggccgcatcccctgcaccttcccccccaagagcctggacaccaccacccagcagaagattggaggcaccaggatgcccaccaggagccacaggaaccctgtgtccatggagaccaagagcagctgcctgcctgcccagcaggtggagacagaaggagtggccccccacaagaggaagatcacctag

SEQ ID NO: 215924 - DNA, 2538 bp, Artificial Sequence
  derived and/or modified sequence
atgaagaagcacgtgaatgaggaggtgacagagttcctgaagttcctgcagaacagcgccaagaagtgtgcccaggactacaacatgctgagtgatgatgcccggctcttcacagagaagatcctgcgggcctgcatcgagcaggtgaagaagtacagcgagttctacaccctgcacgaggtgaccagcctgatgggcttcttccccttccgggtggagatgggcctgaagctggagaagaccctgctggccctgggctctgtgaagtatgtgaagacagtgttccccagcatgcccatcaagctgcagctgagcaaggatgacatcgccaccatcgagaccagcgagcagacagctgaggccatgcactatgacatcagcaaggaccccaatgctgagaagctggtgagccgctaccacccccagatcgccctgaccagccagagcctcttcaccctgctgaacaaccacggccccacctacaaggagcagtgggagatccctgtgtgcatccaggtgattcctgtggccggcagcaagcctgtgaaggtgatctacatcaacagccccctgccccagaagaagatgaccatgagggagaggaaccagatcttccacgaggtgcccctgaagttcatgatgagcaagaacacctctgtgcctgtgtctgctgtgttcatggacaagccagaggagttcatcagcgagatggacatgagctgtgaggtgaatgaatgtaggaagattgagagcctggagaacctgtacctggactttgatgatgatgtgacagagctggagacctttggagtgaccaccaccaaggtgtccaagagccccagccctgccagcaccagcacagtgcccaacatgacagatgcccccacagcccccaaggccggcaccaccaccgtggcccccagcgccccagacatcagcgccaacagccgcagcctgagccagatcctgatggagcagctgcagaaggagaagcagctggtgacaggcatggatggcggccctgaggagtgcaagaacaaggatgaccagggctttgagagctgtgagaaggtgagcaacagcgacaagcccctcatccaggacagcgacctgaagaccagtgatgccctgcagctggagaacagccaggagattgagaccagcaacaagaatgacatgaccatcgacatcctgcacgcagatggagagcggcccaacgtgctggagaacctggacaacagcaaggagaagacagtgggcagcgaggccgccaagacagaagatactgtgctgtgcagcagtgacacagatgaagaatgtctcatcatcgacacagagtgcaagaacaacagtgatggcaagacagctgtggtgggcagcaacctgagcagcaggcctgccagccccaacagcagcagcggccaggcctctgtgggcaaccagaccaacacagcctgcagccctgaggagagctgtgtgctgaagaagcccatcaagagggtgtacaagaagtttgatcctgtgggggagatcctgaagatgcaggatgagctgctgaagcccatcagcaggaaggtgcctgagctgcccctgatgaacctggagaacagcaagcagcccagcgtgtctgagcagctgagcggccccagcgacagcagctcctggcccaagagcggctggcccagcgccttccagaagcccaagggccgcctgccctatgagctgcaggactatgtggaggacaccagcgagtacctggccccccaggagggcaactttgtgtacaagctgttcagcctgcaggacctgctgctgctggtgcgctgcagcgtgcagagaattgagacccggcccaggagcaagaagaggaagaagatccggcggcagtttcctgtgtatgtgctgcccaaggtggagtaccaggcctgctacggcgtggaggccctgacagagagcgagctgtgccgcctgtggacagagagcctgctgcacagcaacagcagcttctacgtgggccacattgatgccttcaccagcaagctgttcctgctggaggagatcaccagcgaggagctgaaggagaagctgagcgccctgaagatcagcaacctcttcaacatcctgcagcacatcctgaagaagctgagcagcctgcaggagggcagctacctgctgagccacgccgctgaggacagcagcctgctgatctacaaggccagtgatggcaaggtgaccaggacagcctacaacctgtacaagacccactgcggcctgcccggggtgcccagcagcctgtctgtgccctgggtgcccctggaccccagcctgctgctgccctaccacatccaccacggccgcatcccctgcaccttcccccccaagagcctggacaccaccacccagcagaagattggaggcaccaggatgcccaccaggagccacagaaatcctgtgtccatggagaccaagagcagctgcctgcctgcccagcaggtggagacagagggcgtggccccccacaagaggaagatcacctag

SEQ ID NO: 215925 - DNA, 2949 bp, Artificial Sequence
  derived and/or modified sequence
atgagcagcaagatggtgatcagcgagcccggcctgaactgggacatttcaccaaagaacggattgaaaaccttcttctcaagggaaaactacaaggaccatagcatggccccctctctgaaggaactgcgagttctgagcaaccggcgcataggggagaacctgaatgcctccgctagtagcgtcgagaacgagccggcagtaagctccgcgacccaagccaaggaaaaggtgaagaccactattggcatggtgctactgcccaagccacgcgtgccctacccacgcttctcccgattttcccaaagagaacagagatcatacgttgatctcctcgttaagtacgctaaaattccagctaattcaaaagctgtgggtattaataagaatgactatctgcagtacctggacatgaagaagcacgtaaacgaagaggtgactgagttcctgaaattcttacagaatagcgccaaaaagtgtgcccaggactataatatgctctctgatgacgcgcgactgtttaccgaaaaaatattgcgtgcgtgcatagaacaggtaaagaagtattctgagttttacacactgcacgaagtaactagtctgatgggattctttccatttagagtcgaaatgggccttaagctcgaaaagacgcttctggcattgggctccgtgaagtatgtgaaaactgtattcccatcaatgccaattaagctccagctctccaaagacgatatcgccaccatcgagacctcggaacaaaccgcagaggccatgcactatgatatttcgaaggatccaaatgccgagaaactcgtttcacggtaccatccacagattgccctgacttcccagtcattattcacactgttgaacaatcacggtcccacatacaaagagcagtgggagatacctgtttgcattcaagtcattcccgttgcagggtcaaaacctgtcaaggtgatctacatcaactcccccctgccacaaaaaaagatgaccatgcgcgagcggaatcagatttttcatgaggtacctcttaagtttatgatgtcaaagaacacaagcgtccccgtgagtgcagttttcatggacaaaccagaggaatttatatctgagatggatatgagctgcgaggtcaacgagtgcagaaaaattgagagcctcgagaacctgtatctggactttgacgatgatgtaacagaactcgagacattcggggtgacaacaaccaaggtgtctaagagccctagccccgcttcgacgtcgaccgtccctaacatgaccgacgcccccacggcacctaaggcaggcactaccacagtggcccctagcgcgcctgacatctccgcgaatagccgttccctgagccaaatcttgatggagcagctgcagaaggagaaacagctggtgaccggcatggatggtgggccagaggaatgcaaaaacaaagacgaccaggggttcgagtcttgcgagaaggtgagcaacagtgataagcccttgattcaggactccgatctgaagacctcggatgccttgcagttggagaactctcaggaaatagagacaagcaataagaacgacatgaccattgacatcctacacgccgacggagagcggcccaatgttctggagaatctggacaattccaaggagaagacggtgggctccgaagcagctaaaaccgaggacaccgtgctctgctcgagcgacaccgatgaagagtgcttaattattgataccgaatgcaaaaataattctgacggaaagaccgctgttgtggggtcaaatttgagcagtaggccagcctccccaaactcctcctcaggtcaggcatccgtgggaaaccagacaaataccgcctgttccccagaagagagctgcgtgctgaagaaacctataaaacgggtgtacaaaaagttcgacccagtcggagagattctgaagatgcaggatgagctgctgaagcccatttcacggaaggtgcccgagctccccctgatgaatctggaaaattctaagcaaccttccgtgtctgagcagttgtcaggcccaagtgattctagtagttggcctaaaagtggctggccctccgcctttcagaagcctaaggggcgactcccttatgagctccaggattacgtggaagacacctcagaatatctagcgccccaggagggaaacttcgtatacaagctattttctctgcaggacctgctgttgctggttcggtgtagcgtgcagcggatcgagacgcgaccccgttccaaaaaacgtaagaaaatacggcgccagtttccagtgtacgtcctgcccaaggtggagtaccaggcgtgttatggggtggaagcgctcaccgaaagtgaactttgcaggctctggacagagtcacttttgcacagtaattcgagcttttacgtgggccacattgacgcattcacttcgaaactgtttctgctggaagaaatcacctccgaagaactaaaagagaaactgagcgccctcaaaatttccaatctcttcaatattcttcagcacattctgaagaagctctcctcattacaggaaggctcctacctcctgtcacatgctgctgaggattctagcctgctaatttacaaggcatccgatgggaaggttacccgcacagcttacaatctgtacaaaacccattgtggcctcccaggtgtaccatccagcttatccgtgccatgggtccccctggatccctcactcctcctcccctatcatatacatcacggaaggatcccctgtacgtttcctccaaaatcactcgacaccactacccagcagaagatcggcgggacgcgtatgcctacccggagccatcggaatccagtgtccatggaaacaaagagctcctgtctcccggcacagcaagtggagactgaaggtgttgcccctcacaaacgcaagatcacttag

SEQ ID NO: 215926 - DNA, 2538 bp, Artificial Sequence
  derived and/or modified sequence
atgaagaagcacgtgaacgaggaggtgaccgagttcctgaagttccttcagaactccgcaaagaaatgtgcccaagactataacatgcttagcgatgatgccaggctcttcactgagaaaattctgagggcctgtatcgagcaggtcaagaagtactctgaattctacacgctgcatgaagtaacctccctgatggggtttttcccattccgggtggaaatgggtctcaagctggagaaaacgttgctggcgctgggatcagtcaagtacgtgaaaacggtgttccctagcatgcctatcaaactccagttgtccaaagatgacatagctactattgaaacatctgagcaaacagccgaagctatgcactatgacatcagcaaagacccaaacgccgaaaagcttgtctccagatatcacccacaaatcgcattgactagccaaagtctcttcactcttctgaataaccacggtccaacctataaggaacagtgggaaataccggtctgtattcaggtaatccccgttgctggcagtaaacctgtgaaggtgatatatataaacagcccacttccccaaaaaaagatgaccatgcgggaacggaaccagatttttcatgaggtgccactgaaatttatgatgtccaagaatactagcgtgcctgtgagcgctgtgtttatggataagcctgaggagttcattagcgagatggatatgtcctgtgaggtaaacgagtgccgaaagatcgaatccctcgagaacctgtatcttgacttcgatgatgacgttaccgagctcgagacttttggagtcactacaacgaaagtttccaagtctccctctcccgccagtaccagcactgtccctaacatgacagacgcccccaccgccccaaaggctggaaccacaacagtagctcctagtgctccagacatcagcgctaattcccgctctctgtcacaaatcttgatggaacagttacagaaggaaaagcagctcgtgaccggcatggatggcgggcccgaagaatgtaagaataaagatgatcaaggcttcgagagttgtgagaaggtttctaactccgataaacccctaattcaggacagcgatctcaagacgagcgatgccctgcagctcgagaatagccaggagatagagacctctaacaagaatgacatgacaattgatatcctgcacgctgatggcgagcggccaaacgtgctggaaaacctggacaatagcaaggagaaaaccgtcggcagcgaggcggccaagaccgaggacacagtgttatgttcttcagataccgatgaagagtgcctgatcattgataccgagtgtaagaataactcagatggcaagactgccgttgtcgggtctaacttatcaagcaggcctgcttctcctaatagctccagtggacaagccagtgtgggcaaccagactaatactgcctgcagcccagaggagtcttgtgtgctgaagaaaccgattaaaagagtgtacaagaaatttgaccctgtgggcgagatattgaaaatgcaagatgagctccttaaacccatctcaagaaaagtgcccgagttgccattaatgaatttagaaaactccaagcagccctcagttagcgaacaactgagcggcccaagtgattctagctcctggcctaaatccggatggccatccgcctttcaaaaacctaaaggcagactgccctacgaactgcaggattatgtcgaagacacatcagaatatctcgctccccaagaggggaatttcgtctataagctgttcagcctccaggatctgctgttgttggtcagatgttccgtccagcgcatcgaaacacgaccccgcagcaagaaacggaagaagatcagacgccaattcccagtgtatgtgcttcctaaagtagagtatcaggcatgctacggtgtggaggccctcactgaatcggaactttgcaggctgtggaccgagtccctcctgcattctaattctagcttttatgttgggcatattgatgcattcactagcaagctgttcctactagaggagattacttcagaagagcttaaagagaaactctcagccctcaagatcagtaatctgtttaacatactgcagcatatactaaagaagcttagctctcttcaggagggaagctatctgctcagccacgccgcggaagacagcagtctgctcatttataaggccagcgacgggaaagtcactcgcaccgcctataacttatacaagactcattgcggccttcccggcgtaccttcttccctctccgtgccctgggtgccactggacccgtccctactgcttccctaccacatccatcatggcagaattccgtgtactttccctcctaaatctttggataccaccactcagcagaagattggaggtacaaggatgccaacgagaagtcacagaaatccagtctccatggagacaaaaagttcctgtctgccagctcaacaggttgaaacggagggagtagccccccataagcgaaagattacctag

SEQ ID NO: 215927 - DNA, 7209 bp, Artificial Sequence
  derived and/or modified sequence
gacgtcatcacgcagggccgagtcggcgcggccacatcctttaaatatggtcttttttgggcgcgcgcgacaatgtgaggagtggggtggagcgtgtgtggtgtgtggctgcggcctgggcaagagccgccgcggaccatgagctgagtaagttctggagggatcctgcctcttggagccttcgcagccaggcagctgtgaactgtgagctagagtgaagcagaaatctaggaagatgagctccaagatggtcataagtgaaccaggactgaattgggatatttcccccaaaaatggccttaagacatttttctctcgagaaaattataaagatcattccatggctccaagtttaaaagaactacgtgttttatccaacagacgtataggagaaaatttgaatgcctcagcaagttctgtagaaaatgagccggcagttagttcagcaactcaagcaaaggaaaaagttaaaaccacaattggaatggttcttcttccaaaaccaagagttccttatcctcgtttctctcgtttctcacagagagagcagaggagttatgtggacttgttggttaaatacgcaaagattcctgcaaattccaaagctgttggaataaataaaaatgactacttgcagtacttggatatgaaaaaacatgtgaacgaagaagttactgagttcctaaagtttttgcagaattctgcaaagaaatgtgcgcaggattataatatgctttctgatgatgcccgtctcttcacagagaaaattttaagagcttgcattgaacaagtgaaaaagtattcagaattctatactctccacgaggtcaccagcttaatgggattcttcccattcagagtagagatgggattaaagttagaaaaaactcttctcgcattgggcagtgtaaaatatgtgaaaacagtatttccctcaatgcctataaagttgcagctgtcaaaggacgatatagctaccattgaaacgtcagaacaaacagctgaagctatgcattatgatattagtaaagatccaaatgcagagaagcttgtttccagatatcaccctcagatagctctaactagtcagtcattatttaccttattaaataatcatggaccaacgtacaaggaacagtgggaaattccagtgtgtattcaagtaatacctgttgcaggttcaaaaccagttaaagtaatatatattaattcaccacttccccaaaagaaaatgactatgagagagagaaatcaaatctttcatgaagttccattaaaatttatgatgtccaaaaacacatctgttccagtctctgcagtctttatggacaaacctgaagagtttatatctgaaatggacatgtcctgtgaagtcaacgagtgccgaaaaattgagagtcttgaaaacttgtatttggattttgatgatgatgtcacagaacttgaaacttttggagtaaccaccaccaaagtatcaaaatcaccaagtccagcaagtacttccacagtacctaacatgacagatgctcctacagcccccaaagcaggaactacaactgtggcaccaagtgcaccagacatttctgctaattctagaagtttatctcagattctgatggaacaattgcaaaaggagaaacagctggtcactggtatggatggtggccctgaggaatgcaaaaataaagatgatcagggatttgaatcatgtgaaaaggtatcaaattctgacaagcctttgatacaagatagtgacttgaaaacatctgatgccttacagttagaaaattctcaggaaattgaaacttctaataaaaatgatatgactatagatatattacatgctgatggtgaaagacctaatgttctagaaaacctagacaactcaaaggaaaagactgttggatcagaagcagcaaaaactgaagatacagttctctgcagcagtgatacagatgaggagtgtttaatcattgatacagaatgtaaaaataatagtgatggaaagacagctgttgtgggttctaacttaagttccagaccagctagtccaaattcttcctcaggacaggcttctgtaggaaaccagactaatactgcttgtagtcctgaagagtcatgtgttttaaaaaaacctatcaaacgagtatataaaaaatttgatccagttggagagattttaaaaatgcaggatgagctcttaaagccaatttccagaaaagtaccagaattgcccttaatgaatttagaaaattctaaacagccttctgtttctgagcaattgtctggtccttcagactcctctagttggccgaaatctggatggccttctgcatttcagaagccaaaaggacgattgccatatgaacttcaggactatgttgaagatacatcggaatacctagctcctcaggaaggaaattttgtttataagttatttagcctgcaagacctgttgttactcgtacgctgcagtgtccagaggatagagacaagaccacgttctaaaaaacggaagaaaatcagaagacaatttccagtttatgtactaccaaaagtagagtatcaagcttgttatggagttgaagctctgactgaaagtgaactttgtcgcttatggactgaaagtttattgcattccaacagctcattttatgttgggcatatcgatgcatttacttcaaaactttttctactggaagaaattacctcagaagaattaaaagaaaagctttcagcactcaagatttccaatttatttaacatcctccaacacattctaaagaaactaagtagcttgcaggagggttcctacttgttatctcatgcagcagaagattcttcactcctgatttataaggcctctgatggaaaagttactaggacagcatacaatttgtataaaacacattgcggccttcctggtgtaccttccagtctctcagttccctgggtcccattagatcccagcctgttattaccatatcatatccatcatggaagaataccttgtacttttccaccgaaatcactggataccacaacacaacaaaagattggtggaacgagaatgcctacacgcagccacaggaatccagtttccatggaaaccaaaagcagttgcttgcctgctcagcaagttgaaactgaaggagtggctccacataaaagaaaaataacttgaggactgtaccatggaaaactaaatttaaaaaaacagttataacagtgtttaatttagataagtttgagggaaaataatcagtaggcaagaggaacatttttcctgtagtagctagagtgccttgaaaaaatgtgttggctatgtgaaggaatatttcaactaaaatggaatggtatgcttttcacccttgaagtttgaggaggatcttgatatgttttaacattatcatggcagggaaatatataaagaagaaaaatatttttacattaaaccttttctaaaaattgtaaatagaaaaataatttggttttttatcaagaacaacacttatcgttatgtattgtgttagttatattgccagtctgttgcgactgactcaaaaagttaaatgttgccactgctgaagatgattatgagcatcgcaaactttgtttctgacccattttgacagtttttatatactcctttaaaatgatgaatgttacaggttaataaagttaatacctttaaaaacttggtgaaattccattacagaagccaaaaataaaaactccctgcctctgaaaagtcagattactgacttcttgtttggcaaccatcagtttgtttaataaaagaaaaaatttggtggtataacatgtttgatgacagatgcctctatctctagattcaagctgagtgttgaaatacactgctgaaagcaaagagataggtatgttttccagaaaaaaagtcagtgtcattgctccagatgacaaggttaatgtggtaaagcataagcttttttttttttttgagatggagtctcgctctgttgcccaggctggagtgcagtggcatgatctcagctcaccacaacatccacctcctggattaaagcgattctcctgcctcatcctcccgagtagctgggactacaggcacctaccaccaggcttggctaatttttttttgtatttttagtagagacagggtgttaccatgttggccgggctggtctcaaactcctgaccttgtgatccgcctgccttggcctcccaaagtgctgggattacaggggtaagccaccgtgcctggccagcataagctatttttatcctcatctatactgattgatttaaattttccgggcctgcagatgaatttggaaaagggcataatcaactgatgttgctgtagcaaatttggacttaagaaactacagacagggccgggcgtggtggctcacacctgtaattccagcacttcgcaaggccgaggcgggagaatcacttgagtccaggggttggagaccagtctgggcaacacagacctcatctctacaaataaaaaagttagccgggtgtggtggggtgtgcctgtagtcccagctactcaaaaggctgaggcagaagaattgcttgagcccaagaagtcaaggctacagtgagttgtgatcgcaccacagaactcagcttgagtatcagagtgtgaccctgtctcaaagaaaaaaaaaaacaggacaggcttgtttaatctttagaacccttacactaaaattttcagaaattatgtatgtcatttgtaaaatataagttttgtaatcctagataattgcttcacattgaaattttttagctattctgtgtaaagaatagctattcttttggcctaatttctgagaaattagaccgaaaaatctcctcaagtattgtaacagttgaaaatacttatattcaactaccaagttttgtttcattttgattttttgttataaaacatttttaagttatttgagaagtaattattagtaaaattgtatcttgataaatcatttcctcatcctgccattcccttttataaaacactgagtttttttattccttaagtcacatatcccagaaatgttttggttgtgaatcatttgccagcgagccaagggagaggcagggattcccttgaaatgtactcttacacttttttattttatttttaatgtacatttgtgtgcaccagaatggaatgtgctctttttaaagagctggacagtggttgcttcagacttctgaataccagaaagacttgccttttaatttttaaatattactttttacatcataaaatgtgttatcttatccatgtatttgaataacatcatatataaaggtagttttttgcttgtgcttagtgaagcctccttttttaacatacatttgatatgctttatgttctttttcttgatttttagtactgagaatttataagccaagaagtaactgacaatatgtttagcaggatgtaatcccagctacttgggaagctgaggtgggaggatcgcttgagtctaggagtttgaggctgcagtgagctatgatggtgccactgcactccatcctgggtgagagatcaagaccctatctcaaaaaatgagcaagttttttttttttttttaaatcagacttagggctagcaaggatgtgatcaccctggcccatttatacctcagcagtgaaggtgtaatttatacacacctctttgaaaacagtttaattcagtaagtgagtgcaactatgtgccatgcactccaaagtaggtccccacagttattctctcatagccttgttttttcagatctcaccatatttatttgtttctttgattttcttttcttatagattacaagctctgcaaggacaggggcatatttgttttgttcaccattaagtaataaacacctaatacagtgcctgtcatgtagttgcttagcagatattagttagatgcatgaatgtgtaggtatcaaagattttttttttcaggagatcacattctagtggaagacactatactgctttatgtgataagtgctttgataaagtaagcaagtcatctaaccagatcttggtagttaaggttttctgagatagaacttgagctgagtcttttaaaaatagtaggatttataagggaaaattaaaggtcttccacaaagaaactaagtgaaactaagcagcctatgaaaaggtgaaagttggagagattataggctatgaacatgggagatgagagagaaaactgcaggatagggacagaaacactgtgctaagacatttgaactttgtcctgtgcaatgtgggaaccagtagtgaaggttaattaactgacatgatcagatatgtatttgaaaagggctcttgttggcattagtctagagaatgcgatggagctgggaagcgaaagaagaaatgttgggagcctgtgttgtagtaactgaaaaatggcaatggcccagaattaaagcagcaagaataggagtgggctcaagtgatgtataaggaaaaaaaaaaaaatgacaactcagttttgttgttggtaaggagagtaaagtatggcttctgggtttctcatttgagatactgagtaaatgatggtgttaacccattgagaaaatagtgtggttagagtgggaagaaagttaatttaaaatgttcatttttttttttagtcatttctacttttggattctaggtttgtgtgctatattggttataaccaatttgctgaataataaattatcccaaaacttagctacttaaaacaacaaacattatctcacagtttctgtaagtcaaaagtccaggtctctcatgaagttgcagtcaggctcttggctagggctgcagtcatctgaaggattagtaagtcgctaagcccacacttaagctccacccttgaagggagaagtttggaaagaatttgtgaacatatttttaaatcacatatgctatgaacaggtttaggggagggagaggaaagaaaactttaacttttcattagcatactgcatctgtagttcctaatgggcatgttgtaaagatgttaagacgttttctatgcattataggtatatagtagtattttgttttgttctgtttttttgtttggtatgtagtagtttttaatcaaaccttaacgtatttgatattaagatttattgagtttcttgttgagatgtagaaataaaggggatccatttcatttatcca

SEQ ID NO: 215928 - DNA, 7049 bp, Artificial Sequence
  derived and/or modified sequence
gacgtcatcacgcagggccgagtcggcgcggccacatcctttaaatatggtcttttttgggcgcgcgcgacaatgtgaggagtggggtggagcgtgtgtggtgtgtggctgcggcctgggcaagagccgccgcggaccatgagctgagtaagttctggagggatcctgcctcttggagccttcgcagccaggcagctgtgaactgtgagctagagtgaagcagaaatctaggaagatgagctccaagatggtcataagtgaaccaggactgaattgggatatttcccccaaaaatggccttaagacatttttctctcgagaaaattataaagatcattccatggctccaagtttaaaagaactacgtgttttatccaacagagagagcagaggagttatgtggacttgttggttaaatacgcaaagattcctgcaaattccaaagctgttggaataaataaaaatgactacttgcagtacttggatatgaaaaaacatgtgaacgaagaagttactgagttcctaaagtttttgcagaattctgcaaagaaatgtgcgcaggattataatatgctttctgatgatgcccgtctcttcacagagaaaattttaagagcttgcattgaacaagtgaaaaagtattcagaattctatactctccacgaggtcaccagcttaatgggattcttcccattcagagtagagatgggattaaagttagaaaaaactcttctcgcattgggcagtgtaaaatatgtgaaaacagtatttccctcaatgcctataaagttgcagctgtcaaaggacgatatagctaccattgaaacgtcagaacaaacagctgaagctatgcattatgatattagtaaagatccaaatgcagagaagcttgtttccagatatcaccctcagatagctctaactagtcagtcattatttaccttattaaataatcatggaccaacgtacaaggaacagtgggaaattccagtgtgtattcaagtaatacctgttgcaggttcaaaaccagttaaagtaatatatattaattcaccacttccccaaaagaaaatgactatgagagagagaaatcaaatctttcatgaagttccattaaaatttatgatgtccaaaaacacatctgttccagtctctgcagtctttatggacaaacctgaagagtttatatctgaaatggacatgtcctgtgaagtcaacgagtgccgaaaaattgagagtcttgaaaacttgtatttggattttgatgatgatgtcacagaacttgaaacttttggagtaaccaccaccaaagtatcaaaatcaccaagtccagcaagtacttccacagtacctaacatgacagatgctcctacagcccccaaagcaggaactacaactgtggcaccaagtgcaccagacatttctgctaattctagaagtttatctcagattctgatggaacaattgcaaaaggagaaacagctggtcactggtatggatggtggccctgaggaatgcaaaaataaagatgatcagggatttgaatcatgtgaaaaggtatcaaattctgacaagcctttgatacaagatagtgacttgaaaacatctgatgccttacagttagaaaattctcaggaaattgaaacttctaataaaaatgatatgactatagatatattacatgctgatggtgaaagacctaatgttctagaaaacctagacaactcaaaggaaaagactgttggatcagaagcagcaaaaactgaagatacagttctctgcagcagtgatacagatgaggagtgtttaatcattgatacagaatgtaaaaataatagtgatggaaagacagctgttgtgggttctaacttaagttccagaccagctagtccaaattcttcctcaggacaggcttctgtaggaaaccagactaatactgcttgtagtcctgaagagtcatgtgttttaaaaaaacctatcaaacgagtatataaaaaatttgatccagttggagagattttaaaaatgcaggatgagctcttaaagccaatttccagaaaagtaccagaattgcccttaatgaatttagaaaattctaaacagccttctgtttctgagcaattgtctggtccttcagactcctctagttggccgaaatctggatggccttctgcatttcagaagccaaaaggacgattgccatatgaacttcaggactatgttgaagatacatcggaatacctagctcctcaggaaggaaattttgtttataagttatttagcctgcaagacctgttgttactcgtacgctgcagtgtccagaggatagagacaagaccacgttctaaaaaacggaagaaaatcagaagacaatttccagtttatgtactaccaaaagtagagtatcaagcttgttatggagttgaagctctgactgaaagtgaactttgtcgcttatggactgaaagtttattgcattccaacagctcattttatgttgggcatatcgatgcatttacttcaaaactttttctactggaagaaattacctcagaagaattaaaagaaaagctttcagcactcaagatttccaatttatttaacatcctccaacacattctaaagaaactaagtagcttgcaggagggttcctacttgttatctcatgcagcagaagattcttcactcctgatttataaggcctctgatggaaaagttactaggacagcatacaatttgtataaaacacattgcggccttcctggtgtaccttccagtctctcagttccctgggtcccattagatcccagcctgttattaccatatcatatccatcatggaagaataccttgtacttttccaccgaaatcactggataccacaacacaacaaaagattggtggaacgagaatgcctacacgcagccacaggaatccagtttccatggaaaccaaaagcagttgcttgcctgctcagcaagttgaaactgaaggagtggctccacataaaagaaaaataacttgaggactgtaccatggaaaactaaatttaaaaaaacagttataacagtgtttaatttagataagtttgagggaaaataatcagtaggcaagaggaacatttttcctgtagtagctagagtgccttgaaaaaatgtgttggctatgtgaaggaatatttcaactaaaatggaatggtatgcttttcacccttgaagtttgaggaggatcttgatatgttttaacattatcatggcagggaaatatataaagaagaaaaatatttttacattaaaccttttctaaaaattgtaaatagaaaaataatttggttttttatcaagaacaacacttatcgttatgtattgtgttagttatattgccagtctgttgcgactgactcaaaaagttaaatgttgccactgctgaagatgattatgagcatcgcaaactttgtttctgacccattttgacagtttttatatactcctttaaaatgatgaatgttacaggttaataaagttaatacctttaaaaacttggtgaaattccattacagaagccaaaaataaaaactccctgcctctgaaaagtcagattactgacttcttgtttggcaaccatcagtttgtttaataaaagaaaaaatttggtggtataacatgtttgatgacagatgcctctatctctagattcaagctgagtgttgaaatacactgctgaaagcaaagagataggtatgttttccagaaaaaaagtcagtgtcattgctccagatgacaaggttaatgtggtaaagcataagcttttttttttttttgagatggagtctcgctctgttgcccaggctggagtgcagtggcatgatctcagctcaccacaacatccacctcctggattaaagcgattctcctgcctcatcctcccgagtagctgggactacaggcacctaccaccaggcttggctaatttttttttgtatttttagtagagacagggtgttaccatgttggccgggctggtctcaaactcctgaccttgtgatccgcctgccttggcctcccaaagtgctgggattacaggggtaagccaccgtgcctggccagcataagctatttttatcctcatctatactgattgatttaaattttccgggcctgcagatgaatttggaaaagggcataatcaactgatgttgctgtagcaaatttggacttaagaaactacagacagggccgggcgtggtggctcacacctgtaattccagcacttcgcaaggccgaggcgggagaatcacttgagtccaggggttggagaccagtctgggcaacacagacctcatctctacaaataaaaaagttagccgggtgtggtggggtgtgcctgtagtcccagctactcaaaaggctgaggcagaagaattgcttgagcccaagaagtcaaggctacagtgagttgtgatcgcaccacagaactcagcttgagtatcagagtgtgaccctgtctcaaagaaaaaaaaaaacaggacaggcttgtttaatctttagaacccttacactaaaattttcagaaattatgtatgtcatttgtaaaatataagttttgtaatcctagataattgcttcacattgaaattttttagctattctgtgtaaagaatagctattcttttggcctaatttctgagaaattagaccgaaaaatctcctcaagtattgtaacagttgaaaatacttatattcaactaccaagttttgtttcattttgattttttgttataaaacatttttaagttatttgagaagtaattattagtaaaattgtatcttgataaatcatttcctcatcctgccattcccttttataaaacactgagtttttttattccttaagtcacatatcccagaaatgttttggttgtgaatcatttgccagcgagccaagggagaggcagggattcccttgaaatgtactcttacacttttttattttatttttaatgtacatttgtgtgcaccagaatggaatgtgctctttttaaagagctggacagtggttgcttcagacttctgaataccagaaagacttgccttttaatttttaaatattactttttacatcataaaatgtgttatcttatccatgtatttgaataacatcatatataaaggtagttttttgcttgtgcttagtgaagcctccttttttaacatacatttgatatgctttatgttctttttcttgatttttagtactgagaatttataagccaagaagtaactgacaatatgtttagcaggatgtaatcccagctacttgggaagctgaggtgggaggatcgcttgagtctaggagtttgaggctgcagtgagctatgatggtgccactgcactccatcctgggtgagagatcaagaccctatctcaaaaaatgagcaagttttttttttttttttaaatcagacttagggctagcaaggatgtgatcaccctggcccatttatacctcagcagtgaaggtgtaatttatacacacctctttgaaaacagtttaattcagtaagtgagtgcaactatgtgccatgcactccaaagtaggtccccacagttattctctcatagccttgttttttcagatctcaccatatttatttgtttctttgattttcttttcttatagattacaagctctgcaaggacaggggcatatttgttttgttcaccattaagtaataaacacctaatacagtgcctgtcatgtagttgcttagcagatattagttagatgcatgaatgtgtaggtatcaaagattttttttttcaggagatcacattctagtggaagacactatactgctttatgtgataagtgctttgataaagtaagcaagtcatctaaccagatcttggtagttaaggttttctgagatagaacttgagctgagtcttttaaaaatagtaggatttataagggaaaattaaaggtcttccacaaagaaactaagtgaaactaagcagcctatgaaaaggtgaaagttggagagattataggctatgaacatgggagatgagagagaaaactgcaggatagggacagaaacactgtgctaagacatttgaactttgtcctgtgcaatgtgggaaccagtagtgaaggttaattaactgacatgatcagatatgtatttgaaaagggctcttgttggcattagtctagagaatgcgatggagctgggaagcgaaagaagaaatgttgggagcctgtgttgtagtaactgaaaaatggcaatggcccagaattaaagcagcaagaataggagtgggctcaagtgatgtataaggaaaaaaaaaaaaatgacaactcagttttgttgttggtaaggagagtaaagtatggcttctgggtttctcatttgagatactgagtaaatgatggtgttaacccattgagaaaatagtgtggttagagtgggaagaaagttaatttaaaatgttcatttttttttttagtcatttctacttttggattctaggtttgtgtgctatattggttataaccaatttgctgaataataaattatcccaaaacttagctacttaaaacaacaaacattatctcacagtttctgtaagtcaaaagtccaggtctctcatgaagttgcagtcaggctcttggctagggctgcagtcatctgaaggattagtaagtcgctaagcccacacttaagctccacccttgaagggagaagtttggaaagaatttgtgaacatatttttaaatcacatatgctatgaacaggtttaggggagggagaggaaagaaaactttaacttttcattagcatactgcatctgtagttcctaatgggcatgttgtaaagatgttaagacgttttctatgcattataggtatatagtagtattttgttttgttctgtttttttgtttggtatgtagtagtttttaatcaaaccttaacgtatttgatattaagatttattgagtttcttgttgagatgtagaaataaaggggatccatttcatttatcca

SEQ ID NO: 215929 - DNA, 2949 bp, Artificial Sequence
  derived and/or modified sequence
atgagcagcaaaatggtaatttcagaacctggcctcaattgggacatctcacccaaaaatgggctaaagaccttcttcagtagggaaaattacaaggaccacagtatggccccttctctcaaagagcttcgggtgctgtccaataggcgcattggcgagaatttaaacgccagtgcaagcagcgtcgaaaacgagccggctgtgtcttcagctacacaggccaaggagaaagttaagacaactattggaatggtactgcttcctaagcccagggtgccttaccccaggttttccagattttctcagcgggaacaacggtcttatgtggatctccttgtgaaatacgctaagattcctgctaacagcaaagccgttggaatcaataagaatgactacctgcagtacctcgatatgaaaaaacatgtgaacgaggaggtcacagaatttctgaagtttctgcagaactctgccaagaaatgcgcacaggattacaatatgttatcagatgatgcaagacttttcactgaaaagatccttcgagcctgtattgagcaggtaaagaaatacagtgaattctacacactccacgaggtgactagtctgatggggtttttcccctttagagttgagatgggcctcaaactggagaagactcttctggcactgggaagcgtcaagtacgtgaagactgtgtttccatctatgccgatcaagctgcaacttagcaaggacgacatcgctactatcgagactagcgagcagactgctgaggccatgcattacgacatttccaaggatccaaatgcggagaagctagtctcgcgttatcaccctcagatcgcacttacgtctcaatcgctattcacactgctcaataatcatgggcctacgtataaggagcaatgggagatacccgtctgcatccaagtaatcccggtggccggatccaaaccagtgaaggtgatctatatcaatagccccctgccccaaaagaagatgactatgagagagcgtaaccagatctttcacgaggtccccttgaaattcatgatgtctaagaacacaagcgtccctgttagtgccgttttcatggacaagcctgaagaatttatctccgagatggacatgtcttgcgaagttaatgagtgccgaaagatagagtctctggagaatctttatctggactttgatgatgacgtcactgagctggagacatttggggtgacaaccactaaagtgagtaagtcaccttctcctgcatccacctccacagtgcctaacatgacagacgctcccactgccccaaaggcgggtacaaccactgtcgctcctagtgctccagacataagcgcaaacagcagatcactgtcacaaatcttgatggaacaattgcagaaggagaagcagctcgtaacaggaatggatggtggtcccgaagagtgcaagaataaggacgatcaaggctttgagtcttgcgaaaaagtcagcaattcagataaacctctaattcaggacagcgacctgaagacctctgacgctcttcagctcgagaattcccaggagatcgagaccagcaacaagaacgatatgacgattgacattctccatgcagacggcgaacgccctaatgttctagagaatctagataatagcaaagaaaagaccgtcggcagcgaagccgcaaagaccgaggatacagtactatgtagttccgacactgatgaggagtgcctgatcatcgatacagagtgcaagaataactcagacggaaaaaccgcagtggtcggctccaacctcagttcgcggcctgcctcacccaatagctcatcgggccaggctagcgtcggcaaccagactaataccgcatgctctcctgaggaatcctgcgtgctgaagaaacccattaaacgggtatacaaaaagttcgacccagtcggcgaaatcctaaagatgcaggacgaactgctcaaacccatcagccgcaaagtcccagagctacctctgatgaacctggagaattcaaagcagccaagcgtgtccgagcagctgagtggtccatcagactcctcttcttggccaaaatctgggtggccgtcagctttccagaaacccaagggccgattgccatacgagctacaagactacgtggaggacacctcagagtacctggcaccacaagaggggaactttgtgtacaagttattcagtctgcaggatttgttgctgctcgtcagatgttcagtgcagcgcatcgaaacccgccctcgaagtaagaaacgcaagaagataagaagacaattccctgtctatgttttgccaaaagtcgagtatcaagcatgctacggtgtcgaggccctgaccgaatccgagctgtgtcgcctttggacggaatctttgctgcactcgaattcctctttttatgtgggacatattgatgcctttacgagtaaactgttccttcttgaggagatcaccagtgaagagctgaaggagaagttgagcgcgctgaagatcagcaatttgtttaacatcttgcaacatattcttaaaaaacttagctcactgcaagaggggagttacctactgtcacacgccgctgaggactcctctttactgatttacaaagcctccgatggaaaggtcaccagaactgcatacaatctgtacaaaacacactgtggacttccgggagtacctagcagtctatcagtcccctgggtgcctctggaccctagtctgttgctaccatatcacatccatcatggacggatcccgtgcaccttcccccctaagtctctggatacgacaacccagcagaaaatcggtggaacaaggatgccgacacggtcccaccggaatcccgtgtctatggagaccaagtcctcatgtctgcccgctcaacaggtagaaacagaaggggtggcaccgcataaaagaaaaattacctag

SEQ ID NO: 215930 - DNA, 2538 bp, Artificial Sequence
  derived and/or modified sequence
atgaaaaaacacgtgaatgaagaggtaaccgagttcttgaaatttctgcagaactccgcaaaaaagtgcgcccaggattacaatatgctgagtgacgacgctcggctgtttaccgaaaaaattttacgtgcgtgcatcgaacaggtaaagaagtactccgagttctatacactgcacgaggtgacctccttgatgggcttctttcccttccgggtggaaatgggacttaagctggaaaaaacccttcttgcgctgggctcggtgaagtatgtcaagaccgtgttcccaagcatgcccattaaacttcagctctccaaagatgacatcgccactattgaaactagcgagcagaccgcggaggccatgcactatgatatctcaaaggatccgaatgccgagaagctcgtttctcggtatcatccacaaatcgcacttactagtcagtctttgttcactttactgaacaaccacggcccaacgtacaaggaacagtgggagatccctgtatgcattcaggtcatacctgttgctggctccaagccggttaaagtcatttacatcaatagccctttgccacaaaaaaaaatgacaatgcgtgagcgaaaccagatcttccacgaggtgcctctcaagttcatgatgtcaaagaacactagtgtaccagtctcggctgtgttcatggataaacccgaggaattcatctctgaaatggacatgtcctgcgaggtgaacgaatgccggaagatcgagtctctggagaatctttacctcgattttgacgatgacgtgacagaactcgagactttcggagtcacaaccaccaaagtgagcaaaagtccctcccccgcatccacatctactgttcccaacatgactgatgcgcctactgcccctaaggctgggaccaccacagtagccccaagcgccccagatatatccgccaactcacgctcactctcccaaatcctgatggagcaactgcagaaggagaagcaactcgtgacaggcatggacggagggccagaggagtgcaaaaacaaggacgaccagggatttgagtcatgtgagaaggttagcaactcggacaagcctctcattcaggactccgatctgaagacaagcgacgccctgcagctcgaaaactcccaggagatcgagacatctaataagaacgatatgaccattgacatcctgcatgcagatggcgaacgtcccaatgtgcttgaaaacttggataacagcaaggagaaaacggtgggcagcgaggctgcaaagactgaggacacagtattgtgttcctctgatactgacgaagaatgcttgattatcgatacagaatgcaaaaataacagtgacggaaagaccgcagtcgttgggagcaatctcagctcgagacccgcttcacccaatagcagttctggtcaagcatccgtgggcaatcagacaaacacagcctgcagtcctgaggaaagctgcgtactgaagaagccaattaaaagggtgtataaaaagttcgatcctgttggagagatcctgaaaatgcaggatgagctgctgaagcctatttctaggaaggtccctgagctgcctcttatgaaccttgaaaacagcaaacaaccctctgtgtcagaacagctgtccgggccatcagattcctcctcatggccaaagtctggttggccaagcgcgttccagaaaccgaaggggaggctgccctacgagctgcaggactacgtggaggatacttcggagtaccttgccccacaagaaggaaattttgtttataaactgtttagcctccaggacttgttgctcctggtgagatgctcggtgcaaaggattgagactaggccaaggtccaagaagcgaaagaagataagacggcagtttcccgtgtatgttctgccaaaggtagagtatcaggcctgttacggagttgaggcactgactgagagtgaactgtgtcgtctctggaccgaatcactcctgcattcaaacagcagcttctacgtaggccatattgatgcgttcacctctaagttgttcctgctcgaggagattacatctgaagagctgaaagaaaagctcagtgcacttaagattagcaacctctttaacatccttcaacatattcttaagaagttaagtagtttacaggagggttcttatttgctctctcacgccgctgaggattcctccctcctcatctacaaagcgtccgacggcaaagtcactcgtacagcttacaatctctataaaacacactgcgggttgcctggggtgccgtcaagcttgagtgtcccgtgggtacctttagacccttcactgctgttgccctaccacattcaccacggcaggattccatgtaccttcccacctaagtcattagacacgacgactcaacagaagatagggggtacccgcatgcccacacgaagccaccgtaatccagtctccatggaaaccaagagtagctgtttaccagctcagcaggtcgagaccgagggtgtggccccacacaaaagaaagataacgtag

SEQ ID NO: 215931 - DNA, 2949 bp, Artificial Sequence
  derived and/or modified sequence
atgagcagcaagatggtgatcagcgagcccggcctgaactgggacatcagccccaagaacggcctgaagaccttcttcagcagagagaactacaaggaccacagcatggcccccagcctgaaggagctgagagtgctgagcaacagaagaatcggcgagaacctgaacgccagcgccagcagcgtggagaacgagcccgccgtgagcagcgccacccaggccaaggagaaggtgaagaccaccatcggcatggtgctgctgcccaagcccagagtgccctaccccagattcagcagattcagccagagagagcagagaagctacgtggacctgctggtgaagtacgccaagatccccgccaacagcaaggccgtgggcatcaacaagaacgactacctgcagtacctggacatgaagaagcacgtgaacgaggaggtgaccgagttcctgaagttcctgcagaacagcgccaagaagtgcgcccaggactacaacatgctgagcgacgacgccagactgttcaccgagaagatcctgagagcctgcatcgagcaggtgaagaagtacagcgagttctacaccctgcacgaggtgaccagcctgatgggcttcttccccttcagagtggagatgggcctgaagctggagaagaccctgctggccctgggcagcgtgaagtacgtgaagaccgtgttccccagcatgcccatcaagctgcagctgagcaaggacgacatcgccaccatcgagaccagcgagcagaccgccgaggccatgcactacgacatcagcaaggaccccaacgccgagaagctggtgagcagataccacccccagatcgccctgaccagccagagcctgttcaccctgctgaacaaccacggccccacctacaaggagcagtgggagatccccgtgtgcatccaggtgatccccgtggccggcagcaagcccgtgaaggtgatctacatcaacagccccctgccccagaagaagatgaccatgagagagagaaaccagatcttccacgaggtgcccctgaagttcatgatgagcaagaacaccagcgtgcccgtgagcgccgtgttcatggacaagcccgaggagttcatcagcgagatggacatgagctgcgaggtgaacgagtgcagaaagatcgagagcctggagaacctgtacctggacttcgacgacgacgtgaccgagctggagaccttcggcgtgaccaccaccaaggtgagcaagagccccagccccgccagcaccagcaccgtgcccaacatgaccgacgcccccaccgcccccaaggccggcaccaccaccgtggcccccagcgcccccgacatcagcgccaacagcagaagcctgagccagatcctgatggagcagctgcagaaggagaagcagctggtgaccggcatggacggcggccccgaggagtgcaagaacaaggacgaccagggcttcgagagctgcgagaaggtgagcaacagcgacaagcccctgatccaggacagcgacctgaagaccagcgacgccctgcagctggagaacagccaggagatcgagaccagcaacaagaacgacatgaccatcgacatcctgcacgccgacggcgagagacccaacgtgctggagaacctggacaacagcaaggagaagaccgtgggcagcgaggccgccaagaccgaggacaccgtgctgtgcagcagcgacaccgacgaggagtgcctgatcatcgacaccgagtgcaagaacaacagcgacggcaagaccgccgtggtgggcagcaacctgagcagcagacccgccagccccaacagcagcagcggccaggccagcgtgggcaaccagaccaacaccgcctgcagccccgaggagagctgcgtgctgaagaagcccatcaagagagtgtacaagaagttcgaccccgtgggcgagatcctgaagatgcaggacgagctgctgaagcccatcagcagaaaggtgcccgagctgcccctgatgaacctggagaacagcaagcagcccagcgtgagcgagcagctgagcggccccagcgacagcagcagctggcccaagagcggctggcccagcgccttccagaagcccaagggcagactgccctacgagctgcaggactacgtggaggacaccagcgagtacctggccccccaggagggcaacttcgtgtacaagctgttcagcctgcaggacctgctgctgctggtgagatgcagcgtgcagagaatcgagaccagacccagaagcaagaagagaaagaagatcagaagacagttccccgtgtacgtgctgcccaaggtggagtaccaggcctgctacggcgtggaggccctgaccgagagcgagctgtgcagactgtggaccgagagcctgctgcacagcaacagcagcttctacgtgggccacatcgacgccttcaccagcaagctgttcctgctggaggagatcaccagcgaggagctgaaggagaagctgagcgccctgaagatcagcaacctgttcaacatcctgcagcacatcctgaagaagctgagcagcctgcaggagggcagctacctgctgagccacgccgccgaggacagcagcctgctgatctacaaggccagcgacggcaaggtgaccagaaccgcctacaacctgtacaagacccactgcggcctgcccggcgtgcccagcagcctgagcgtgccctgggtgcccctggaccccagcctgctgctgccctaccacatccaccacggcagaatcccctgcaccttcccccccaagagcctggacaccaccacccagcagaagatcggcggcaccagaatgcccaccagaagccacagaaaccccgtgagcatggagaccaagagcagctgcctgcccgcccagcaggtggagaccgagggcgtggccccccacaagagaaagatcacctag

SEQ ID NO: 215932 - DNA, 2538 bp, Artificial Sequence
  derived and/or modified sequence
atgaagaagcacgtgaacgaggaggtgaccgagttcctgaagttcctgcagaacagcgccaagaagtgcgcccaggactacaacatgctgagcgacgacgccagactgttcaccgagaagatcctgagagcctgcatcgagcaggtgaagaagtacagcgagttctacaccctgcacgaggtgaccagcctgatgggcttcttccccttcagagtggagatgggcctgaagctggagaagaccctgctggccctgggcagcgtgaagtacgtgaagaccgtgttccccagcatgcccatcaagctgcagctgagcaaggacgacatcgccaccatcgagaccagcgagcagaccgccgaggccatgcactacgacatcagcaaggaccccaacgccgagaagctggtgagcagataccacccccagatcgccctgaccagccagagcctgttcaccctgctgaacaaccacggccccacctacaaggagcagtgggagatccccgtgtgcatccaggtgatccccgtggccggcagcaagcccgtgaaggtgatctacatcaacagccccctgccccagaagaagatgaccatgagagagagaaaccagatcttccacgaggtgcccctgaagttcatgatgagcaagaacaccagcgtgcccgtgagcgccgtgttcatggacaagcccgaggagttcatcagcgagatggacatgagctgcgaggtgaacgagtgcagaaagatcgagagcctggagaacctgtacctggacttcgacgacgacgtgaccgagctggagaccttcggcgtgaccaccaccaaggtgagcaagagccccagccccgccagcaccagcaccgtgcccaacatgaccgacgcccccaccgcccccaaggccggcaccaccaccgtggcccccagcgcccccgacatcagcgccaacagcagaagcctgagccagatcctgatggagcagctgcagaaggagaagcagctggtgaccggcatggacggcggccccgaggagtgcaagaacaaggacgaccagggcttcgagagctgcgagaaggtgagcaacagcgacaagcccctgatccaggacagcgacctgaagaccagcgacgccctgcagctggagaacagccaggagatcgagaccagcaacaagaacgacatgaccatcgacatcctgcacgccgacggcgagagacccaacgtgctggagaacctggacaacagcaaggagaagaccgtgggcagcgaggccgccaagaccgaggacaccgtgctgtgcagcagcgacaccgacgaggagtgcctgatcatcgacaccgagtgcaagaacaacagcgacggcaagaccgccgtggtgggcagcaacctgagcagcagacccgccagccccaacagcagcagcggccaggccagcgtgggcaaccagaccaacaccgcctgcagccccgaggagagctgcgtgctgaagaagcccatcaagagagtgtacaagaagttcgaccccgtgggcgagatcctgaagatgcaggacgagctgctgaagcccatcagcagaaaggtgcccgagctgcccctgatgaacctggagaacagcaagcagcccagcgtgagcgagcagctgagcggccccagcgacagcagcagctggcccaagagcggctggcccagcgccttccagaagcccaagggcagactgccctacgagctgcaggactacgtggaggacaccagcgagtacctggccccccaggagggcaacttcgtgtacaagctgttcagcctgcaggacctgctgctgctggtgagatgcagcgtgcagagaatcgagaccagacccagaagcaagaagagaaagaagatcagaagacagttccccgtgtacgtgctgcccaaggtggagtaccaggcctgctacggcgtggaggccctgaccgagagcgagctgtgcagactgtggaccgagagcctgctgcacagcaacagcagcttctacgtgggccacatcgacgccttcaccagcaagctgttcctgctggaggagatcaccagcgaggagctgaaggagaagctgagcgccctgaagatcagcaacctgttcaacatcctgcagcacatcctgaagaagctgagcagcctgcaggagggcagctacctgctgagccacgccgccgaggacagcagcctgctgatctacaaggccagcgacggcaaggtgaccagaaccgcctacaacctgtacaagacccactgcggcctgcccggcgtgcccagcagcctgagcgtgccctgggtgcccctggaccccagcctgctgctgccctaccacatccaccacggcagaatcccctgcaccttcccccccaagagcctggacaccaccacccagcagaagatcggcggcaccagaatgcccaccagaagccacagaaaccccgtgagcatggagaccaagagcagctgcctgcccgcccagcaggtggagaccgagggcgtggccccccacaagagaaagatcacctag

SEQ ID NO: 215933 - protein, 779 aa, Artificial Sequence
  derived and/or modified sequence
MSRFPAVAGRAPRRQEEGERSRDLQEERLSAVCIADREEKGCTSQEGGTTPTFPIQKQRKKIIQAVRDNSFLIVTGNTGSGKTTQLPKYLYEAGFSQHGMIGVTQPRKVAAISVAQRVAEEMKCTLGSKVGYQVRFDDCSSKETAIKYMTDGCLLKHILGDPNLTKFSVIILDEAHERTLTTDILFGLLKKLFQEKSPNRKEHLKVVVMSATMELAKLSAFFGNCPIFDIPGRLYPVREKFCNLIGPRDRENTAYIQAIVKVTMDIHLNEMAGDILVFLTGQFEIEKSCELLFQMAESVDYDYDVQDTTLDGLLILPCYGSMTTDQQRRIFLPPPPGIRKCVISTNISATSLTIDGIRYVVDGGFVKQLNHNPRLGLDILEVVPISKSEALQRSGRAGRTSSGKCFRIYSKDFWNQCMPDHVIPEIKRTSLTSVVLTLKCLAIHDVIRFPYLDPPNERLILEALKQLYQCDAIDRSGHVTRLGLSMVEFPLPPHLTCAVIKAASLDCEDLLLPIAAMLSVENVFIRPVDPEYQKEAEQRHRELAAKAGGFNDFATLAVIFEQCKSSGAPASWCQKHWIHWRCLFSAFRVEAQLRELIRKLKQQSDFPKETFEGPKHEVLRRCLCAGYFKNVARRSVGRTFCTMDGRGSPVHIHPSSALHEQETKLEWIIFHEVLVTTKVYARIVCPIRYEWVRDLLPKLHEFNAHDLSSVARREVREDARRRWTNKENVKQLKDGISKDVLKKMQRRNDDKSISDARARFLERKQQRTQDHSDTRKETG

SEQ ID NO: 215934 - protein, 722 aa, Artificial Sequence
  derived and/or modified sequence
MSRFPAVAGRAPRRQEEGERSRDLQEERLSAVCIADREEKGCTSQEGGTTPTFPIQKQRKKIIQAVRDNSFLIVTGNTGSGKTTQLPKYLYEAGFSQHGMIGVTQPRKVAAISVAQRVAEEMKCTLGSKVGYQVRFDDCSSKETAIKYMTDGCLLKHILGDPNLTKFSVIILDEAHERTLTTDILFGLLKKLFQEKSPNRKEHLKVVVMSATMELAKLSAFFGNCPIFDIPGRLYPVREKFCNLIGPRDRENTAYIQAIVKVTMDIHLNEMAGDILVFLTGQFEIEKSCELLFQMAESVDYDYDVQDTTLDGLLILPCYGSMTTDQQRRIFLPPPPGIRKCVISTNISATSLTIDGIRYVVDGGFVKQLNHNPRLGLDILEVVPISKSEALQRSGRAGRTSSGKCFRIYSKDFWNQCMPDHVIPEIKRTSLTSVVLTLKCLAIHDVIRFPYLDPPNERLILEALKQLYQCDAIDRSGHVTRLGLSMVEFPLPPHLTCAVIKAASLDCEDLLLPIAAMLSVENVFIRPVDPEYQKEAEQRHRELAAKAGGFNDFATLAVIFEQCKSSGAPASWCQKHWIHWRCLFSAFRVEAQLRELIRKLKQQSDFPKETFEGPKHEVLRRCLCAGYFKNVARRSVGRTFCTMDGRGSPVHIHPSSALHEQETKLEWIIFHEVLVTTKVYARIVCPIRYEWVRDLLPKLHEFNAHDLSSVARREVSKIKLFQ

SEQ ID NO: 215935 - protein, 731 aa, Artificial Sequence
  derived and/or modified sequence
MIGVTQPRKVAAISVAQRVAEEMKCTLGSKVGYQVRFDDCSSKETAIKYMTDGCLLKHILGDPNLTKFSVIILDEAHERTLTTDILFGLLKKLFQEKSPNRKEHLKVVVMSATMELAKLSAFFGNCPIFDIPGRLYPVREKFCNLIGPRDRENTAYIQAIVKVTMDIHLNEMAGDILVFLTGQFEIEKSCELLFQMAESVDYDYDVQDTTLDGLLILPCYGSMTTVSQTSLTFVTHIQIMKQISENQHSLTGLTIAGITGVSHHARPRNMTCNEKLNQQRRIFLPPPPGIRKCVISTNISATSLTIDGIRYVVDGGFVKQLNHNPRLGLDILEVVPISKSEALQRSGRAGRTSSGKCFRIYSKDFWNQCMPDHVIPEIKRTSLTSVVLTLKCLAIHDVIRFPYLDPPNERLILEALKQLYQCDAIDRSGHVTRLGLSMVEFPLPPHLTCAVIKAASLDCEDLLLPIAAMLSVENVFIRPVDPEYQKEAEQRHRELAAKAGGFNDFATLAVIFEQCKSSGAPASWCQKHWIHWRCLFSAFRVEAQLRELIRKLKQQSDFPKETFEGPKHEVLRRCLCAGYFKNVARRSVGRTFCTMDGRGSPVHIHPSSALHEQETKLEWIIFHEVLVTTKVYARIVCPIRYEWVRDLLPKLHEFNAHDLSSVARREVREDARRRWTNKENVKQLKDGISKDVLKKMQRRNDDKSISDARARFLERKQQRTQDHSDTRKETG

SEQ ID NO: 215936 - DNA, 2340 bp, Artificial Sequence
  derived and/or modified sequence
atgtcacgattccctgcagtggccgggcgggctccacggcgccaggaggagggtgagcggtcccgcgacctgcaggaggaaaggctgagtgccgtgtgcatagctgaccgcgaggagaagggatgcacatctcaggaaggaggaaccactccaaccttccccatacagaaacagcgcaaaaagataatccaagccgttagagataattcattcctcatcgtcaccggcaacaccgggtcaggcaaaaccacacagttaccaaagtatctctatgaagccgggttctcccagcacggaatgattggtgtcactcagccaaggaaggtggccgccatcagtgtggcacagcgtgtggctgaagagatgaaatgcactctaggatctaaggtaggttaccaggtcagattcgacgattgttcatcaaaggagactgcaatcaagtacatgaccgatggatgtctccttaaacacatcctaggtgatcctaacctaacaaagttctctgtcattatactggatgaagcgcacgagcgaactttgactaccgatattctgtttgggctgctaaaaaagctgttccaggagaaatcacccaaccgcaaggagcacctcaaagtcgtcgttatgtcagccaccatggaacttgccaagctgtccgccttttttgggaattgccctatcttcgatatcccgggacgcctctatccagtacgggaaaaattctgcaatttgataggtcctagagaccgtgagaacaccgcctacatccaggccatagtgaaagtcacaatggatattcatctgaatgagatggctggagatattctagtgttcctgaccgggcagtttgaaattgagaagtcttgtgagctgctctttcagatggcggaatcagtggattacgattatgacgtacaagacaccaccctggatggtctgctgattctgccctgttacggctcaatgaccaccgaccaacagaggcgtatttttctcccacccccacccgggatacggaagtgtgttatttctacgaacatatctgctacttctctaacaatcgacgggatccgctatgtggtggacggcgggttcgtgaagcagctcaatcacaaccccagactcgggcttgacatcctggaagttgttcccatcagtaagagcgaggccctccagcggagcggtcgagctggaagaacttcttcaggaaagtgcttccggatatactcaaaagatttctggaaccagtgcatgcctgaccacgtgattcccgagattaaacgaaccagcctgacaagtgttgttttaaccctgaaatgcctcgccattcacgatgtaatacgcttcccgtacctggacccacctaatgaacggttaatcctcgaggccttgaaacagttgtatcaatgcgatgctattgatagatcaggacatgtgacgagattgggactttctatggtggaatttcccctccccccacacctcacctgtgcggtcatcaaagcagcctccctcgattgtgaagacctgctcctcccaattgcagcgatgctgtcagtggagaacgtcttcattcgccccgtggatcccgagtaccagaaagaagccgagcagcgacacagggagctggctgctaaagccggcggtttcaacgactttgcaacattagctgtgatctttgagcaatgtaaaagttcaggagcccctgcttcttggtgtcaaaaacactggatacactggaggtgtttgtttagtgcattccgggtcgaagcgcagcttcgggaacttataaggaagcttaagcaacagagtgattttccaaaagaaacatttgagggtccgaagcacgaggtcctgaggagatgcctgtgtgccggatacttcaaaaacgtcgctcggagaagtgtcgggaggactttttgtactatggatggcagaggttccccagtgcatatacatccatcgtcagctctccacgagcaggaaaccaagctcgaatggatcatttttcatgaagtgctggttactacaaaggtctacgcccgaatcgtatgccccattaggtatgaatgggtaagggacctgctgcctaaactgcacgagttcaacgcccacgatctgagtagcgtagcccggcgagaagtcagggaagatgcccgccgacgttggactaacaaggagaacgtgaagcaactcaaagatgggataagcaaagatgtgttaaagaagatgcagcggcgtaacgacgataagtccatctccgatgctagggcccgattcctggagcggaaacagcagagaacacaggaccactccgacacaagaaaggagaccggttag

SEQ ID NO: 215937 - DNA, 2169 bp, Artificial Sequence
  derived and/or modified sequence
atgagccggtttccggctgtcgctggccgcgctccgaggcggcaggaggagggggagcgcagtagagatctgcaggaagaaagattgagcgctgtgtgcatagctgacagggaggaaaaggggtgtacaagtcaggagggtggcactacccccacatttccaatccagaagcagcgaaaaaaaattatccaagccgtgcgcgacaactcatttttgatcgtgaccggcaacaccggctccgggaaaacaacgcagctgcccaaatacctgtatgaggccggattttctcagcatggcatgataggcgtaacacaaccgagaaaagttgcagccattagcgtggcgcaacgggtcgcggaggaaatgaagtgcacactgggttccaaggtcgggtaccaggtccgcttcgatgactgttccagcaaggagaccgccattaagtacatgacggacggctgcttgctcaaacacattctgggggacccaaacctgactaagttctcagtaatcattcttgacgaagcccacgaacgtaccctgaccacggacattctttttggactattgaagaaactttttcaggagaagagccccaacagaaaagagcatcttaaagtggtggtgatgtccgccacaatggagctggcgaagctgagcgccttctttggaaattgcccaatcttcgacatccctgggcgtctctatccagtgagagaaaaattttgtaatcttattgggccccgggaccgcgaaaacacggcttacatacaggctatcgttaaagtgacaatggacatccatcttaacgaaatggccggagacattctggtgtttctcacgggtcaatttgagatagagaagtcttgcgaactgctgtttcaaatggcagagagcgtcgactacgactacgatgtgcaggacactactctcgatgggctgctcatactgccctgctacggcagtatgactaccgatcagcagaggcgcatctttctgcccccaccgcccgggattaggaagtgtgtcatctcaacaaatatcagcgccacctcactgaccatagacggcatacgttacgtggtggatggaggcttcgtgaagcagctcaaccacaacccaagacttggtctcgacatcctggaggtggtgcccatcagcaagtctgaggctctgcagcgcagtggtagagcaggacggacgtcgtccggtaagtgtttcagaatttattcaaaggacttctggaatcaatgcatgcccgatcacgtcatacctgagattaagcgaacatctcttacctccgtggtgctcaccctcaagtgtctggccattcatgacgtgatccgttttccatacctggacccgcctaatgagcgtctgattctggaggctctgaagcaattgtaccagtgcgacgccatagaccgttctggtcacgtaactcgtctcggactatcaatggtcgaatttcctttgcccccacacctgacttgtgcagtcatcaaagccgcatccctcgattgtgaagatttgttgctccctattgccgccatgctgtctgtggagaatgttttcatccggccagttgacccggagtatcagaaggaagcagagcaacgccacagggagctagctgctaaggctgggggattcaacgactttgctaccttagcagtgatttttgagcagtgtaaatctagcggcgccccggctagttggtgtcagaagcactggattcactggcgctgtctgttctcagcgttcagggtagaagcccagctgagggaactcattcggaagctcaaacagcagagcgattttcccaaggagacgttcgaaggacctaaacatgaagtactccgaaggtgcctgtgcgctgggtacttcaaaaatgtggcacgccgttcagtcgggaggaccttttgtactatggacggtagggggagcccggtgcatatccatccctcctcagccctgcacgaacaggaaacaaagctggagtggatcatcttccacgaggtgctggtcactacaaaggtgtacgctcgcattgtgtgcccgattagatacgaatgggtccgcgacctgttaccgaagctccacgagtttaacgcacacgatctgtcatctgttgcccgccgggaagtttcaaagattaaactgtttcagtag

SEQ ID NO: 215938 - DNA, 2196 bp, Artificial Sequence
  derived and/or modified sequence
atgattggcgtgacacaacctaggaaggtcgcagctatcagcgtagctcaaagagttgccgaagagatgaagtgtacactgggctcaaaggtgggctaccaggtgcgttttgatgactgcagctccaaggagacagccataaagtacatgaccgacggctgccttctcaagcacattctcggcgacccgaacctaaccaagttctccgtgatcattctggatgaggctcacgaacggacccttactaccgacattctcttcggcctactgaaaaaactcttccaagagaagtccccaaatcggaaagagcatctcaaagttgtcgtgatgtccgctacgatggagctagccaaactgagtgccttttttgggaactgtcctattttcgacatccccggccgtctctacccagtgcgcgaaaaattctgtaacctgatcggtcctcgcgacagagaaaacactgcatacattcaggcgatcgtgaaagtgaccatggatatacatctcaacgaaatggccggcgacattctcgtatttctgacggggcaattcgagattgagaagagctgcgaactacttttccagatggcagagtccgtggattacgattacgatgtgcaggacaccactctggacgggctgctgatactcccctgttatggcagtatgactacagtgagccaaacctccctgaccttcgtgacacacatacaaataatgaagcagatatccgagaaccagcactcattgacagggcttaccattgccggcatcacgggcgtgtctcaccacgctaggcccagaaacatgacctgtaatgagaagctgaatcagcagcggaggatcttcctcccacccccacccggcattcgaaagtgtgtgatcagcactaacataagcgctacctctttaaccatcgacggcatcagatacgtcgtggatgggggcttcgtgaaacaactgaaccataaccctcgattggggctcgatattctcgaagtggtgccaatctccaagtccgaggccctgcaaaggtctggacgagccgggcggacctcgtccggtaaatgttttagaatttactcaaaggacttctggaatcaatgtatgcctgaccatgtgattcctgagatcaagcgaacctctctgacgagtgtcgtactcaccttaaaatgtctggcaattcatgatgtcatccgcttcccctacctcgaccctccgaacgagcggctgattctggaagcgctaaagcagctctaccagtgtgatgccatcgaccgtagcgggcacgtgacgagactcggcttgagcatggtagagttccccctcccaccccacttaacatgcgccgtgattaaggccgcctctctcgactgtgaagacctcttgctgcctattgctgcaatgctttcagtggaaaatgtgtttatcaggccagtggaccctgaataccaaaaagaggcggaacaaagacatagggagctagccgcaaaggctggggggttcaacgatttcgccaccctcgcagtcatttttgaacagtgtaagagcagtggggccccagcttcatggtgccagaagcactggatccactggcgatgtcttttctcggcttttcgggtcgaggcacaacttagggagctgatacgtaagcttaagcagcaaagcgactttcctaaggagaccttcgagggaccaaaacacgaggtgttgaggcggtgtctgtgtgccgggtactttaaaaatgtggctaggcgatccgtgggtcggaccttctgtacaatggatgggagggggtcgcccgttcacatccacccgtctagtgctctacacgagcaagagacgaagctcgagtggataatattccacgaagtgttggtgacgaccaaagtatatgccagaatcgtctgcccaataagatatgagtgggtcagggacctgctgcctaagttgcatgagttcaatgcccacgatctgagctctgtagctcgtcgagaagtgagggaggatgcccggagaagatggaccaacaaggaaaacgttaaacagcttaaggacgggattagcaaagacgtgctaaagaagatgcagcggaggaacgacgataaatctataagcgacgctagagcgcggtttctcgagagaaaacagcagaggactcaagaccactctgatacacgtaaagaaacaggctag

SEQ ID NO: 215939 - DNA, 2340 bp, Artificial Sequence
  derived and/or modified sequence
atgagccgcttccctgctgtggccggccgggccccccggcggcaggaggagggggagaggagccgggacctgcaggaggagcggctgtctgctgtgtgcatcgctgaccgggaggagaagggctgcaccagccaggagggcggcaccacccccaccttccccatccagaagcagaggaagaagatcatccaggccgtgcgggacaacagcttcctgattgtgactggaaacacaggcagcggcaagaccacccagctgcccaagtacctgtatgaagctggcttcagccagcacggcatgattggagtgacccagcccaggaaggtggccgccatctctgtggcccagagggtggccgaggagatgaagtgcaccctgggcagcaaggtgggctaccaggtgcgctttgatgactgcagcagcaaggagacagccatcaagtacatgacagatggctgcctgctgaagcacatcctgggggaccccaacctgaccaagttcagcgtcatcatcctggatgaggcccacgagaggaccctgaccacagacatcctgtttggcctgctgaagaagctgttccaggagaagagccccaacaggaaggagcacctgaaggtggtggtgatgtctgccaccatggagctggccaagctgagcgccttcttcggcaactgccccatctttgacatccctggccgcctgtaccctgtgcgggagaagttctgcaacctgattggcccccgggacagagaaaatacagcctacatccaggccatcgtgaaggtgaccatggacatccacctgaatgagatggccggggacatcctggtgttcctgaccggccagtttgaaattgagaagagctgtgagctgctcttccagatggccgagagcgtggactatgactatgatgtgcaggacaccaccctggatggcctgctgatcctgccctgctacggctccatgaccacagaccagcagaggcgcatcttcctgcccccacctcctggcatcagaaaatgtgtgatcagcaccaacatcagcgccaccagcctgaccattgatggcatccgctacgtggtggatggcggctttgtgaagcagctgaaccacaacccccggctgggcctggacatcctggaggtggtgcccatcagcaagtctgaggccctgcagaggagcggccgggccggccgcaccagcagcggcaagtgcttccgcatctacagcaaggacttctggaaccagtgcatgccagaccacgtgattcctgagatcaagaggaccagcctgacctctgtggtgctgaccctgaagtgcctggccatccatgatgtgatccgcttcccctacctggaccccccaaatgaaagactcatcctggaggccctgaagcagctgtaccagtgtgatgccatcgacaggagcggccacgtgacccggctgggcctgtccatggtggagttccccctgcccccccacctgacctgtgccgtcatcaaggccgccagcctggactgtgaggacctgctgctgcccatcgccgccatgctgtctgtggagaatgtgttcatccggcctgtggaccctgagtaccagaaggaggccgagcagaggcaccgggagctggccgccaaggccggcggcttcaatgactttgccaccctggccgtcatctttgagcagtgcaagagcagcggggccccagcctcctggtgccagaagcactggatccactggcgctgcctcttcagcgccttccgggtggaggcccagctgcgggagctgatcaggaagctgaagcagcagagcgacttccccaaggagacctttgagggccccaagcatgaggtgctgcggcgctgcctgtgtgccggctacttcaagaatgtggccaggagatctgtgggccgcaccttctgcaccatggatggccggggcagccctgtgcacatccaccccagcagcgccctgcacgagcaggagaccaagctggagtggatcatcttccacgaggtgctggtgaccaccaaggtgtatgccagaattgtgtgccccatccgctatgagtgggtgcgggacctgctgcccaagctgcacgagttcaatgcccatgacctgagctctgtggcccggcgggaggtgagagaagatgcccggcggcgctggaccaacaaggaaaatgtgaagcagctgaaggatggcatcagcaaggatgtgctgaagaagatgcagaggagaaatgatgacaagagcatcagtgatgcccgggcccgcttcctggagaggaagcagcagaggacccaggaccacagcgacaccaggaaggagaccggctag

SEQ ID NO: 215940 - DNA, 2169 bp, Artificial Sequence
  derived and/or modified sequence
atgagccgcttccctgctgtggccggccgggccccccggcggcaggaggagggggagaggagccgggacctgcaggaggagcggctgtctgctgtgtgcatcgctgaccgggaggagaagggctgcaccagccaggagggcggcaccacccccaccttccccatccagaagcagaggaagaagatcatccaggccgtgcgggacaacagcttcctgattgtgactggaaacacaggcagcggcaagaccacccagctgcccaagtacctgtatgaagctggcttcagccagcacggcatgattggagtgacccagcccaggaaggtggccgccatctctgtggcccagagggtggccgaggagatgaagtgcaccctgggcagcaaggtgggctaccaggtgcgctttgatgactgcagcagcaaggagacagccatcaagtacatgacagatggctgcctgctgaagcacatcctgggggaccccaacctgaccaagttcagcgtcatcatcctggatgaggcccacgagaggaccctgaccacagacatcctgtttggcctgctgaagaagctgttccaggagaagagccccaacaggaaggagcacctgaaggtggtggtgatgtctgccaccatggagctggccaagctgagcgccttcttcggcaactgccccatctttgacatccctggccgcctgtaccctgtgcgggagaagttctgcaacctgattggcccccgggacagagaaaatacagcctacatccaggccatcgtgaaggtgaccatggacatccacctgaatgagatggccggggacatcctggtgttcctgaccggccagtttgaaattgagaagagctgtgagctgctcttccagatggccgagagcgtggactatgactatgatgtgcaggacaccaccctggatggcctgctgatcctgccctgctacggctccatgaccacagaccagcagaggcgcatcttcctgcccccacctcctggcatcagaaaatgtgtgatcagcaccaacatcagcgccaccagcctgaccattgatggcatccgctacgtggtggatggcggctttgtgaagcagctgaaccacaacccccggctgggcctggacatcctggaggtggtgcccatcagcaagtctgaggccctgcagaggagcggccgggccggccgcaccagcagcggcaagtgcttccgcatctacagcaaggacttctggaaccagtgcatgccagaccacgtgattcctgagatcaagaggaccagcctgacctctgtggtgctgaccctgaagtgcctggccatccatgatgtgatccgcttcccctacctggaccccccaaatgaaagactcatcctggaggccctgaagcagctgtaccagtgtgatgccatcgacaggagcggccacgtgacccggctgggcctgtccatggtggagttccccctgcccccccacctgacctgtgccgtcatcaaggccgccagcctggactgtgaggacctgctgctgcccatcgccgccatgctgtctgtggagaatgtgttcatccggcctgtggaccctgagtaccagaaggaggccgagcagaggcaccgggagctggccgccaaggccggcggcttcaatgactttgccaccctggccgtcatctttgagcagtgcaagagcagcggggccccagcctcctggtgccagaagcactggatccactggcgctgcctcttcagcgccttccgggtggaggcccagctgcgggagctgatcaggaagctgaagcagcagagcgacttccccaaggagacctttgagggccccaagcatgaggtgctgcggcgctgcctgtgtgccggctacttcaagaatgtggccaggagatctgtgggccgcaccttctgcaccatggatggccggggcagccctgtgcacatccaccccagcagcgccctgcacgagcaggagaccaagctggagtggatcatcttccacgaggtgctggtgaccaccaaggtgtatgccagaattgtgtgccccatccgctatgagtgggtgcgggacctgctgcccaagctgcacgagttcaatgcccatgacctgagctctgtggcccggcgggaggtgtccaagatcaagctgttccagtag

SEQ ID NO: 215941 - DNA, 2196 bp, Artificial Sequence
  derived and/or modified sequence
atgattggagtgacccagcccaggaaggtggccgccatctctgtggcccagagggtggccgaggagatgaagtgcaccctgggcagcaaggtgggctaccaggtgcgctttgatgactgcagcagcaaggagacagccatcaagtacatgacagatggctgcctgctgaagcacatcctgggggaccccaacctgaccaagttcagcgtcatcatcctggatgaggcccacgagaggaccctgaccacagacatcctgtttggcctgctgaagaagctgttccaggagaagagccccaacaggaaggagcacctgaaggtggtggtgatgtctgccaccatggagctggccaagctgagcgccttctttggaaactgccccatctttgacatccctggccgcctgtaccctgtgcgggagaagttctgcaacctgattggcccccgggaccgggagaacacagcctacatccaggccatcgtgaaggtgaccatggacatccacctgaatgagatggccggggacatcctggtgttcctgaccggccagtttgaaattgagaagagctgtgagctgctcttccagatggccgagagcgtggactatgactatgatgtgcaggacaccaccctggatggcctgctgatcctgccctgctacggctccatgaccaccgtgtcccagaccagcctgacctttgtgacccacatccagatcatgaagcagatcagcgagaaccagcacagcctgaccggcctgaccatcgccggcatcactggagtgagccaccacgcccggcccaggaacatgacctgcaatgagaagctgaaccagcagaggcgcatcttcctgcccccacctcctggcatcagaaaatgtgtgatcagcaccaacatcagcgccaccagcctgaccattgatggcatccgctacgtggtggatggcggctttgtgaagcagctgaaccacaacccccggctgggcctggacatcctggaggtggtgcccatcagcaagtctgaggccctgcagaggagcggccgggccggccgcaccagcagcggcaagtgcttccgcatctacagcaaggacttctggaaccagtgcatgccagaccacgtgattcctgagatcaagaggaccagcctgacctctgtggtgctgaccctgaagtgcctggccatccatgatgtgatccgcttcccctacctggaccccccaaatgaaagactcatcctggaggccctgaagcagctgtaccagtgtgatgccatcgacaggagcggccacgtgacccggctgggcctgtccatggtggagttccccctgcccccccacctgacctgtgccgtcatcaaggccgccagcctggactgtgaggacctgctgctgcccatcgccgccatgctgtctgtggagaatgtgttcatccggcctgtggaccctgagtaccagaaggaggccgagcagaggcaccgggagctggccgccaaggccggcggcttcaatgactttgccaccctggccgtcatctttgagcagtgcaagagcagcggggccccagcctcctggtgccagaagcactggatccactggcgctgcctcttcagcgccttccgggtggaggcccagctgcgggagctgatcaggaagctgaagcagcagagcgacttccccaaggagacctttgagggccccaagcatgaggtgctgcggcgctgcctgtgtgccggctacttcaagaatgtggccaggagatctgtgggccgcaccttctgcaccatggatggccggggcagccctgtgcacatccaccccagcagcgccctgcacgagcaggagaccaagctggagtggatcatcttccacgaggtgctggtgaccaccaaggtgtatgccagaattgtgtgccccatccgctatgagtgggtgcgggacctgctgcccaagctgcacgagttcaatgcccatgacctgagctctgtggcccggcgggaggtgagagaagatgcccggcggcgctggaccaacaaggaaaatgtgaagcagctgaaggatggcatcagcaaggatgtgctgaagaagatgcagaggagaaatgatgacaagagcatcagtgatgcccgggcccgcttcctggagaggaagcagcagaggacccaggaccacagcgacaccaggaaggagaccggctag

SEQ ID NO: 215942 - DNA, 2340 bp, Artificial Sequence
  derived and/or modified sequence
atgagccggttccccgccgtggccggccgggccccccggcggcaggaagaaggagagagatcaagggatctccaagaggaacggttatccgctgtttgcattgcagaccgggaggaaaaggggtgcacatctcaggagggcggtacgaccccaacattcccgatccagaagcagcgtaagaaaatcatacaagcggtccgtgataactctttcctgatcgttaccggtaacacggggtctggcaagaccacacagctccctaaatatttatatgaggcgggcttcagccaacacggcatgataggcgtgacgcaaccaagaaaagtggcggcgatctcagttgcgcaacgggtggccgaggagatgaagtgcaccctgggatcaaaggtggggtaccaggtgaggtttgacgattgctctagtaaagagactgcaatcaagtacatgacagacgggtgcctgcttaagcatattctgggggaccctaacctcaccaaatttagcgtaatcattctagacgaagcccacgagaggacattaactactgacattctgtttggacttctaaaaaaactgtttcaagagaaatcccccaaccgtaaagagcacctgaaggtggtcgtcatgtccgcgacgatggaactagctaaactgtcagcttttttcgggaattgcccgatctttgatatcccaggtaggctctatcctgtacgcgagaaattttgtaaccttatcggcccaagggatagagaaaatactgcatacatccaagccattgtcaaggttactatggatattcatctgaatgaaatggctggagatatactcgtttttctgaccgggcagttcgaaatcgagaagtcatgtgaactgctgttccagatggccgaaagcgtggattacgattatgatgtccaagacacaaccctggacggcctcctcattctgccctgttatggttctatgacaactgatcagcagcgacgaatttttcttcctcccccccctggaattcgcaagtgtgtcatttctacaaacatttccgcaacgtctctcaccatcgacggtatacggtacgtggtggacggaggcttcgtaaaacagcttaaccataatccaaggctagggctcgatatactggaggtggtccctatttccaaaagcgaggccctgcagcgtagcggaagggcaggcaggacctcaagcggcaagtgtttcagaatctactcaaaggacttctggaatcagtgcatgcccgatcatgtgatacccgagattaagagaacttcactcaccagtgtggtgctgactctcaaatgtctcgcaattcatgatgtgataaggttcccatatctggacccccctaatgaaaggctgatcctggaagcactaaagcaactgtatcagtgcgatgcgatagacagaagcggacacgtaactcgcttagggctatccatggtggaatttcctctccccccccaccttacttgcgcagttatcaaggcagcatctttggactgcgaggatctgctcctgccaattgccgccatgctttcagtggaaaatgtgtttatccgcccagtggaccccgaatatcagaaggaggcagaacagcggcaccgagagctcgctgctaaagccggtggctttaacgatttcgctacacttgcggtaattttcgaacagtgtaaaagtagcggggcaccagctagctggtgccagaagcattggatacactggagatgtctgttcagcgcctttcgagtggaggcacagctccgggaactgatacgcaaactcaagcagcagagtgattttcccaaggagacctttgaaggtcctaagcatgaagtgctccgcagatgcttgtgcgcaggctactttaagaacgtcgcacgacggtctgtgggccggaccttctgcacaatggacgggcgggggagccctgttcacatccatccgtcttcggccctgcatgagcaagagacaaagctagagtggatcatctttcacgaggttctggtgaccactaaagtctacgcgaggattgtgtgtcctatacgttacgagtgggtgagagatctgttacccaaacttcacgagttcaacgcgcatgatttgtcctccgtggcccgccgggaggtccgcgaagatgcacgcagaagatggacaaataaggaaaatgtgaaacaattgaaggacggcattagcaaagacgtcttgaagaagatgcagcgccggaacgacgacaaatctatctccgacgcacgagcccgcttcctggagcggaagcagcagaggacccaggaccatagtgacacccgaaaggagacaggatag

SEQ ID NO: 215943 - DNA, 2169 bp, Artificial Sequence
  derived and/or modified sequence
atgagccggttccccgccgtggccggccgggccccccggcggcaggaggagggagaacgctcgagagacctccaggaggagcggttgtctgccgtatgcatcgcggacagggaggaaaaggggtgtacgtctcaggagggagggacgactccgaccttcccaattcaaaagcagcgcaaaaagattatacaggctgtccgagataactctttcttgattgtaactgggaatacaggctcaggtaagactacgcaattacccaaatacctatacgaagcaggctttagtcaacatggaatgatcggcgtaactcagccacgcaaagtcgcagctatctctgtggctcaaagagtggctgaagagatgaagtgtacgttgggctctaaggtgggctaccaggtgaggtttgacgattgtagcagcaaggaaaccgcaatcaagtacatgacggacggttgtctactgaagcacatactcggcgacccaaatcttaccaagttttccgtgattatccttgatgaagcccacgaacgaaccctgacgacagatatactttttgggcttctgaagaaattgtttcaggagaagtcacctaaccgtaaagagcacctcaaagtggtcgtgatgtctgctacgatggaactggctaagctgagtgcatttttcggcaattgcccgatatttgacattcctgggcgtctctaccctgtgagagagaagttttgcaacctgattggcccccgcgatcgtgagaacacggcttacattcaggctatcgtgaaggtgacaatggacatccacttgaacgaaatggccggcgatatcctggtgttcctgactgggcagtttgagattgagaagagctgcgaactgctcttccagatggccgaatcggtcgactatgattatgacgtccaggacaccacgcttgacggacttctgatcctgccatgctacggaagcatgacaaccgatcagcaacggcggatcttcctgccaccgcctcctggaatcaggaaatgtgtgatatccactaacatctcggccacatctctgacaattgatgggataaggtacgtagtggatggcggatttgtaaagcagctcaaccataatccccggctaggactagacatattggaggtggtccccattagtaaatcagaagcattgcaaaggagtgggcgagctggtaggacatcatccggaaagtgcttccggatctattccaaagacttctggaaccaatgcatgccggaccatgtcattccagaaattaagaggacctctctcaccagcgtcgtcctgactctgaagtgcctggccatacatgacgtgatccggttcccatatttggatccccctaatgagaggctgattctggaggctctgaaacagttataccaatgtgatgctatcgaccggagtggtcatgtgactagactggggctcagtatggtggagttcccactgcctccacatcttacttgcgcagtcatcaaggccgcgtcattggattgcgaagatttgcttttgccgatagcagctatgcttagtgtggagaatgtgttcattcgccctgtggacccagagtatcagaaagaggccgaacagcggcaccgggagctggcagccaaggctggagggtttaacgactttgctaccctggctgtaattttcgagcagtgtaagtcatcaggcgccccagcctcatggtgtcagaaacattggattcattggcgatgtttgttctccgcctttcgagtcgaggcccagctgcgcgagctgatacgtaagctgaagcaacaatctgatttcccgaaggagacgttcgaggggcctaagcacgaagttctcagaaggtgcctgtgtgccggttacttcaagaatgtggcccgcaggtccgttggccgcaccttttgtaccatggacggccgggggtcccctgttcacattcatccttctagcgcacttcatgagcaggagactaagttggaatggatcatattccatgaggttctggtaaccactaaagtatacgcgagaatcgtgtgtcctatccgatacgagtgggtgcgagacctgttgcctaaactccacgagttcaacgcacacgacctgtcctccgtggccaggagagaggtgagcaagattaaacttttccagtag

SEQ ID NO: 215944 - DNA, 2196 bp, Artificial Sequence
  derived and/or modified sequence
atgatcggcgtgacccagccccggaaggtggccgccatcagcgtggcccagcgagtggctgaggaaatgaagtgtaccctggggtctaaggtggggtatcaggttcggttcgacgattgttcctccaaagagacagctatcaaatatatgaccgatggatgtctgttaaaacatatccttggagaccctaacctgactaaattttcggtgattatccttgatgaggcacatgaacgtacactcactacggacattctgtttggcctgctgaagaagttattccaggaaaagagtcccaatcgaaaagagcacctgaaagttgtggtgatgagcgccactatggaattggcaaagctgtccgcctttttcggaaactgccccattttcgatataccaggccggctgtaccccgttcgcgaaaagttttgcaaccttatcggccctagagatcgggagaataccgcctatatccaagccatcgtaaaggtgaccatggacatccatctgaacgagatggccggagatatactggtcttcctgactgggcagttcgagattgaaaagagctgtgagctcctgttccagatggctgagtctgttgactatgattatgatgttcaggatactacgctagacggccttctaattcttccatgctatggctccatgactacagtgtctcagacatcgcttaccttcgtgacacatattcagatcatgaaacagattagcgagaatcagcacagcctgactggactgaccatcgccggcattacgggggtttcccatcacgcccgacctagaaatatgacttgcaacgaaaaactgaatcagcaaaggcggatctttctcccccccccgcccggcattcgaaagtgcgttatttcaacgaacataagcgccactagtctgactatcgatggcattcgatatgttgtcgacggggggttcgtgaagcagctgaaccataaccctcgtctcggtctggatatactggaagtggtgcccataagtaagagcgaggccctgcaacgttctggaagagctgggcggacctccagtggcaaatgctttaggatctattctaaggatttctggaaccagtgtatgccagatcacgtgataccagagatcaaaagaacaagtctcacatctgttgtgctcacactgaaatgtcttgccatccacgacgtcatccgatttccctacctggacccccctaacgaacgcctcatcctggaggcactgaagcagctataccagtgcgacgctatcgatagaagcgggcacgttacgagattagggctgtccatggttgagtttccactgccacctcacctgacctgtgcagtcataaaagctgcctcactcgattgcgaggatttgctgctgcccatcgccgcaatgttgagtgtcgagaatgtgttcattagaccagtggaccctgaataccagaaggaggcagaacagcggcatagggagcttgcggccaaggccgggggattcaacgacttcgctactttggctgttatattcgaacagtgcaaatcaagcggtgcccccgcgagctggtgtcagaagcactggattcactggaggtgcctctttagcgcctttcgggtggaggcgcagctacgggagcttattaggaaactcaagcagcaatccgattttcctaaggaaacattcgagggaccaaagcacgaggtccttcgaaggtgtctttgtgccggctattttaaaaacgtcgctagaaggtccgtgggtaggaccttctgtacaatggatggccgtggcagtcctgtgcacatccaccccagctcagctttacatgaacaggagacaaagctcgaatggattatctttcatgaggtgctggttacaacgaaagtgtatgcaaggattgtatgtcccatcagatacgagtgggtgagagaccttctgcctaaattacatgaattcaacgcgcatgacctgagctctgttgcccgaagagaggtgcgcgaggatgcccggaggcgatggacaaacaaagaaaatgtcaaacaactgaaagacgggatatccaaggatgtgcttaagaaaatgcagaggcggaacgacgacaagtccatttccgacgctcgcgccaggttcctggagcggaaacagcagcgtactcaggatcactctgacacgcgaaaggagacaggatag

SEQ ID NO: 215945 - DNA, 2340 bp, Artificial Sequence
  derived and/or modified sequence
atgagcagattccctgctgtcgctgggcgtgccccacgcaggcaagaagaaggcgaaagaagcagagacctgcaggaggaaagattgtcggccgtctgcatcgcggatcgggaggaaaaggggtgcacctcacaagaagggggtactaccccgactttccctatccagaagcaaaggaagaagatcatacaggccgtgagggacaattcttttctgattgttacagggaacactggatccggtaaaaccacccagctgcccaaatacctgtatgaggctggattttcccagcatggaatgattggcgtcactcagcctagaaaggttgcagcaattagcgtcgcccagagggttgcagaggaaatgaagtgcacactgggttccaaggtggggtatcaagtcagatttgatgattgttctagtaaagaaaccgcgattaaatacatgacggatggatgcctgctgaagcatatcctgggcgatccaaacctgaccaagtttagcgtgatcatactagatgaggcacacgagaggaccctcaccacagatattttattcgggctgttaaagaaattgtttcaagagaaatcacctaacagaaaagagcacctgaaggtcgtcgttatgagcgctaccatggagctcgccaagctctccgcgttctttggcaactgtccaatcttcgatattccgggtcggttatatcccgtgagagaaaaattctgcaacctgatcgggccaagggatagggagaataccgcgtacatccaggcaatagtaaaagtaactatggacattcatctgaacgaaatggccggtgatattcttgtgttcctgaccggtcaatttgaaattgagaagagttgtgagctcctattccagatggccgaaagtgtggactacgactacgacgtgcaggacacaaccctcgacggcctgctaatcttaccctgctatggcagcatgaccactgatcagcaaagacgcatctttctgccacctcccccaggtattcgcaagtgtgtcatttccactaatatcagcgctacgtccctgactatcgatgggattaggtatgtggtcgacggaggatttgtcaagcagctgaatcataatccgaggctgggactagacattcttgaagtcgtgcccatcagtaaatcagaagccctgcagcgatctggtcgcgcaggcagaacttcatcaggcaagtgctttcgcatttatagtaaagatttctggaatcaatgtatgccagaccatgttattcccgagatcaagcgaacctctttgacaagcgtcgtgctgacattaaagtgccttgcaatacacgatgtgatccgctttccgtacctcgacccccctaacgaacggctgattctcgaggctttgaaacagctgtatcagtgcgatgccattgaccggagtgggcacgtgactcgcttagggttgtcaatggtcgagttccctctcccccctcaccttacatgcgctgttataaaggccgcatcccttgactgcgaggacctccttctgcctattgctgccatgcttagcgtcgaaaatgtgtttattcggcctgtggacccagagtaccagaaagaggcagagcaacggcaccgggaactcgccgcaaaggccggtggtttcaacgactttgccacgctcgctgtgattttcgagcagtgtaagtcttccggggctccagcctcttggtgccaaaagcattggatccactggagatgcctcttctcggccttccgcgtcgaagcccagctgagggaattgatcagaaagctgaagcagcagtcggatttcccaaaggaaacctttgaaggcccaaaacacgaggtgctaaggaggtgtctatgcgccggatacttcaagaatgtggcacggagatcagtgggaaggacattctgcaccatggatggccgtggttcccccgtgcatatacatccctcatccgccctccatgaacaggagactaagctcgagtggattatttttcatgaggttctcgtgacaacgaaggtgtatgccaggatcgtttgtcctattcggtacgagtgggtgcgggatcttcttcccaaactgcatgaattcaacgctcatgacctgtcttcagtggcacggagggaagttagagaagacgcgcgacgccgttggaccaacaaagaaaacgttaagcaattgaaagacggcatctccaaagacgtgctgaagaaaatgcagagaagaaacgatgacaagtcaatcagtgacgcgagggcgcgttttcttgagcgtaaacagcagcgaactcaggatcatagtgacaccagaaaagaaaccggatag

SEQ ID NO: 215946 - DNA, 2169 bp, Artificial Sequence
  derived and/or modified sequence
atgtccagatttccagcagttgcaggcagggccccacgccgtcaggaagaaggggaaaggtcacgtgacctccaggaagagaggctgtccgcagtctgcatcgccgatcgagaagaaaagggatgcacctcccaggagggaggcacaacccccactttcccaatccagaagcagcgaaaaaagattatacaggccgtacgggataactcttttctgattgtcaccggcaataccggttccggaaaaaccacgcaactgcctaaatatttgtacgaggctggattttcacaacacgggatgatcggcgtcactcaaccaaggaaggtcgctgcaatctcagtagcccagagggttgccgaggagatgaagtgcaccctcggatctaaagtaggctatcaggtgcgctttgatgactgctcttcgaaggaaaccgcaatcaaatatatgacagacgggtgtctgctcaagcatatcctgggcgatcctaaccttacaaagttcagtgtgatcatcctggacgaggcccatgaaaggacactgacaacagacatcctatttggcttgcttaagaaattgttccaggaaaaatcaccaaatcggaaagagcacctgaaagtggtggtaatgagcgcaacgatggaacttgccaagctgtcggctttcttcggcaattgtcccattttcgatattcccggacgcctttacccagtgcgggagaagttttgcaatctgatcggtccccgagatagagaaaatacagcgtacatccaggccatcgtgaaagtcacaatggacattcacctgaatgagatggcaggcgacatcctggtgttcctcactggccagttcgaaatcgagaaatcatgtgaactgcttttccagatggccgagtccgtcgattacgattatgacgtccaggatactacgctcgacgggctccttattctgccgtgttacggatccatgactacagatcagcagcgtaggatctttctgccgccaccaccgggtattagaaaatgtgtaataagtaccaacatctcggccaccagcctgacgatagatggaattcgatacgtggtcgatggagggtttgttaaacagcttaaccacaaccctcgattagggctggacatccttgaggtggtaccaatatcaaaaagtgaagccctccagcgttcaggtagagctggtaggacatccagcggaaaatgtttccgaatatattctaaggacttctggaaccagtgcatgcccgaccatgtgatccccgagatcaagagaacctcgctcacatcagtggttctgaccctgaaatgcctggccattcatgacgtgatacggtttccctatctggatccccctaatgagaggcttattcttgaagcgctgaagcaactctatcaatgcgacgctatcgatcggtccggccacgtgaccaggctgggcctgagcatggtagagttccctctgcctccccacttaacatgtgcggtgatcaaggctgcctcccttgattgtgaggatctgttgctcccgatagcagccatgctaagcgttgagaatgtgttcattcgacccgtcgacccggaataccagaaggaggctgagcagcggcaccgcgagttggccgctaaagcgggaggctttaatgattttgcgacactcgcggtgatcttcgaacaatgcaagagtagcggcgcacccgcttcctggtgtcagaaacactggatacattggagatgcctgttttcagcgttccgcgtggaggctcagctgagagagttgattagaaaacttaaacaacagtccgatttccccaaagaaaccttcgagggacccaagcacgaagtccttaggcgctgtctgtgcgctggatacttcaagaatgtggccagacggtctgtggggagaactttttgtacaatggacggcagaggatcccctgtgcatatccatccaagctcggccctccacgaacaggaaaccaaactcgagtggatcatatttcatgaggtcctggttaccaccaaagtctatgccagaatagtttgcccaatcaggtacgaatgggttcgcgacctgctccccaagttacatgagtttaatgcccatgatctatcttccgttgcacggagggaggtgagcaagataaagctcttccagtag

SEQ ID NO: 215947 - DNA, 2196 bp, Artificial Sequence
  derived and/or modified sequence
atgatcggagtgacccagcctcgaaaggttgcagccatcagtgttgctcagcgtgttgcggaagaaatgaagtgcacactgggttccaaggtgggctaccaggtgcgcttcgacgattgtagcagcaaagagacggccatcaagtacatgactgacggatgtctgctgaagcacatcctgggggatccaaacctgactaagttctccgtgattatcctcgacgaggctcacgagagaactttaacaactgacatcctctttggactcctgaaaaagctgttccaggaaaaatcacctaatagaaaggaacatctgaaagtggtcgtcatgtccgcaactatggaactggccaagctttctgcttttttcgggaactgtcccatattcgacatccccggacggctttacccagttagagaaaagttctgcaatcttattgggcctagagatagagagaatactgcttacatacaggccatcgtgaaggtgactatggatatccacctgaacgagatggctggcgacatcttagtatttcttaccggccaattcgagatcgagaaatcttgcgagttgctgtttcaaatggccgagtcagtggattatgattacgacgtgcaggacacaaccctggacggtttactgatactgccatgttacgggtctatgactacagtgtcccagacctctctgacttttgtgacgcatatccagatcatgaagcagatttcggagaaccagcactcactgaccggcctcactatagcaggaatcaccggggtgagtcaccacgccagacccagaaacatgacttgcaatgaaaagctaaaccagcagcgcaggattttccttcctccccctccaggaatacgcaagtgtgtaatctccactaacatctccgccacatccttgaccattgatggcataagatatgtggtggacgggggattcgtaaagcagttaaatcataatcctcggctggggctggacatcctggaggtcgtccccatttccaagtcagaagccctgcaacgctctggtagagccggtcggacttcaagtggaaaatgttttagaatctactcaaaggatttctggaatcaatgcatgcctgaccacgtcatccccgagattaagcgcacttcactcacttcagtggtgttgaccctgaaatgcctagctattcatgacgtaattcgcttcccctatctggacccaccaaacgagcgcctcattctggaagccttgaagcagctgtaccagtgcgacgcaattgaccgcagcggccatgttacacgcctcggactatccatggtggagtttcctctgcctccacatctcacttgcgccgtcatcaaagctgcctccttagattgcgaagatctgttgttgccaattgccgctatgctgagtgtggagaacgtgttcataaggcccgtcgaccctgaataccaaaaagaagcagaacagaggcatagggagcttgcagctaaggctggcggtttcaacgacttcgccactcttgctgtgatttttgagcaatgcaaaagctccggtgcccctgcctcttggtgtcaaaaacactggattcactggcgttgtctgttttctgcttttagggtggaagctcaattgagggagctcataaggaagttgaagcagcagtcagatttccctaaggagacctttgagggacctaagcacgaggtgctgcgcagatgcttatgtgctggttattttaagaacgttgctcggagatccgtgggcaggaccttttgcactatggacggtcgaggttcacccgtgcacatccacccatcatccgcattacacgaacaggaaaccaaattggagtggattatcttccatgaagtactggttaccacaaaagtatatgcacggattgtatgccccattagatatgagtgggtgcgcgacctgctacccaaattacacgagtttaatgctcatgacttgagttcagtggcacgccgtgaggttagagaggatgctaggagacgttggactaataaagaaaacgtcaaacaactgaaagatgggattagcaaagatgtgttgaagaagatgcagcggagaaacgacgataaatccatcagcgatgcacgtgcaaggtttctggagcgcaagcagcagcgcacacaggatcattccgatacgaggaaagagacgggatag

SEQ ID NO: 215948 - DNA, 2340 bp, Artificial Sequence
  derived and/or modified sequence
atgagcagattccccgccgtggccggcagagcccccagaagacaggaggagggcgagagaagcagagacctgcaggaggagagactgagcgccgtgtgcatcgccgacagagaggagaagggctgcaccagccaggagggcggcaccacccccaccttccccatccagaagcagagaaagaagatcatccaggccgtgagagacaacagcttcctgatcgtgaccggcaacaccggcagcggcaagaccacccagctgcccaagtacctgtacgaggccggcttcagccagcacggcatgatcggcgtgacccagcccagaaaggtggccgccatcagcgtggcccagagagtggccgaggagatgaagtgcaccctgggcagcaaggtgggctaccaggtgagattcgacgactgcagcagcaaggagaccgccatcaagtacatgaccgacggctgcctgctgaagcacatcctgggcgaccccaacctgaccaagttcagcgtgatcatcctggacgaggcccacgagagaaccctgaccaccgacatcctgttcggcctgctgaagaagctgttccaggagaagagccccaacagaaaggagcacctgaaggtggtggtgatgagcgccaccatggagctggccaagctgagcgccttcttcggcaactgccccatcttcgacatccccggcagactgtaccccgtgagagagaagttctgcaacctgatcggccccagagacagagagaacaccgcctacatccaggccatcgtgaaggtgaccatggacatccacctgaacgagatggccggcgacatcctggtgttcctgaccggccagttcgagatcgagaagagctgcgagctgctgttccagatggccgagagcgtggactacgactacgacgtgcaggacaccaccctggacggcctgctgatcctgccctgctacggcagcatgaccaccgaccagcagagaagaatcttcctgccccccccccccggcatcagaaagtgcgtgatcagcaccaacatcagcgccaccagcctgaccatcgacggcatcagatacgtggtggacggcggcttcgtgaagcagctgaaccacaaccccagactgggcctggacatcctggaggtggtgcccatcagcaagagcgaggccctgcagagaagcggcagagccggcagaaccagcagcggcaagtgcttcagaatctacagcaaggacttctggaaccagtgcatgcccgaccacgtgatccccgagatcaagagaaccagcctgaccagcgtggtgctgaccctgaagtgcctggccatccacgacgtgatcagattcccctacctggacccccccaacgagagactgatcctggaggccctgaagcagctgtaccagtgcgacgccatcgacagaagcggccacgtgaccagactgggcctgagcatggtggagttccccctgcccccccacctgacctgcgccgtgatcaaggccgccagcctggactgcgaggacctgctgctgcccatcgccgccatgctgagcgtggagaacgtgttcatcagacccgtggaccccgagtaccagaaggaggccgagcagagacacagagagctggccgccaaggccggcggcttcaacgacttcgccaccctggccgtgatcttcgagcagtgcaagagcagcggcgcccccgccagctggtgccagaagcactggatccactggagatgcctgttcagcgccttcagagtggaggcccagctgagagagctgatcagaaagctgaagcagcagagcgacttccccaaggagaccttcgagggccccaagcacgaggtgctgagaagatgcctgtgcgccggctacttcaagaacgtggccagaagaagcgtgggcagaaccttctgcaccatggacggcagaggcagccccgtgcacatccaccccagcagcgccctgcacgagcaggagaccaagctggagtggatcatcttccacgaggtgctggtgaccaccaaggtgtacgccagaatcgtgtgccccatcagatacgagtgggtgagagacctgctgcccaagctgcacgagttcaacgcccacgacctgagcagcgtggccagaagagaggtgagagaggacgccagaagaagatggaccaacaaggagaacgtgaagcagctgaaggacggcatcagcaaggacgtgctgaagaagatgcagagaagaaacgacgacaagagcatcagcgacgccagagccagattcctggagagaaagcagcagagaacccaggaccacagcgacaccagaaaggagaccggctag

SEQ ID NO: 215949 - DNA, 2169 bp, Artificial Sequence
  derived and/or modified sequence
atgagcagattccccgccgtggccggcagagcccccagaagacaggaggagggcgagagaagcagagacctgcaggaggagagactgagcgccgtgtgcatcgccgacagagaggagaagggctgcaccagccaggagggcggcaccacccccaccttccccatccagaagcagagaaagaagatcatccaggccgtgagagacaacagcttcctgatcgtgaccggcaacaccggcagcggcaagaccacccagctgcccaagtacctgtacgaggccggcttcagccagcacggcatgatcggcgtgacccagcccagaaaggtggccgccatcagcgtggcccagagagtggccgaggagatgaagtgcaccctgggcagcaaggtgggctaccaggtgagattcgacgactgcagcagcaaggagaccgccatcaagtacatgaccgacggctgcctgctgaagcacatcctgggcgaccccaacctgaccaagttcagcgtgatcatcctggacgaggcccacgagagaaccctgaccaccgacatcctgttcggcctgctgaagaagctgttccaggagaagagccccaacagaaaggagcacctgaaggtggtggtgatgagcgccaccatggagctggccaagctgagcgccttcttcggcaactgccccatcttcgacatccccggcagactgtaccccgtgagagagaagttctgcaacctgatcggccccagagacagagagaacaccgcctacatccaggccatcgtgaaggtgaccatggacatccacctgaacgagatggccggcgacatcctggtgttcctgaccggccagttcgagatcgagaagagctgcgagctgctgttccagatggccgagagcgtggactacgactacgacgtgcaggacaccaccctggacggcctgctgatcctgccctgctacggcagcatgaccaccgaccagcagagaagaatcttcctgccccccccccccggcatcagaaagtgcgtgatcagcaccaacatcagcgccaccagcctgaccatcgacggcatcagatacgtggtggacggcggcttcgtgaagcagctgaaccacaaccccagactgggcctggacatcctggaggtggtgcccatcagcaagagcgaggccctgcagagaagcggcagagccggcagaaccagcagcggcaagtgcttcagaatctacagcaaggacttctggaaccagtgcatgcccgaccacgtgatccccgagatcaagagaaccagcctgaccagcgtggtgctgaccctgaagtgcctggccatccacgacgtgatcagattcccctacctggacccccccaacgagagactgatcctggaggccctgaagcagctgtaccagtgcgacgccatcgacagaagcggccacgtgaccagactgggcctgagcatggtggagttccccctgcccccccacctgacctgcgccgtgatcaaggccgccagcctggactgcgaggacctgctgctgcccatcgccgccatgctgagcgtggagaacgtgttcatcagacccgtggaccccgagtaccagaaggaggccgagcagagacacagagagctggccgccaaggccggcggcttcaacgacttcgccaccctggccgtgatcttcgagcagtgcaagagcagcggcgcccccgccagctggtgccagaagcactggatccactggagatgcctgttcagcgccttcagagtggaggcccagctgagagagctgatcagaaagctgaagcagcagagcgacttccccaaggagaccttcgagggccccaagcacgaggtgctgagaagatgcctgtgcgccggctacttcaagaacgtggccagaagaagcgtgggcagaaccttctgcaccatggacggcagaggcagccccgtgcacatccaccccagcagcgccctgcacgagcaggagaccaagctggagtggatcatcttccacgaggtgctggtgaccaccaaggtgtacgccagaatcgtgtgccccatcagatacgagtgggtgagagacctgctgcccaagctgcacgagttcaacgcccacgacctgagcagcgtggccagaagagaggtgagcaagatcaagctgttccagtag

SEQ ID NO: 215950 - DNA, 2196 bp, Artificial Sequence
  derived and/or modified sequence
atgatcggcgtgacccagcccagaaaggtggccgccatcagcgtggcccagagagtggccgaggagatgaagtgcaccctgggcagcaaggtgggctaccaggtgagattcgacgactgcagcagcaaggagaccgccatcaagtacatgaccgacggctgcctgctgaagcacatcctgggcgaccccaacctgaccaagttcagcgtgatcatcctggacgaggcccacgagagaaccctgaccaccgacatcctgttcggcctgctgaagaagctgttccaggagaagagccccaacagaaaggagcacctgaaggtggtggtgatgagcgccaccatggagctggccaagctgagcgccttcttcggcaactgccccatcttcgacatccccggcagactgtaccccgtgagagagaagttctgcaacctgatcggccccagagacagagagaacaccgcctacatccaggccatcgtgaaggtgaccatggacatccacctgaacgagatggccggcgacatcctggtgttcctgaccggccagttcgagatcgagaagagctgcgagctgctgttccagatggccgagagcgtggactacgactacgacgtgcaggacaccaccctggacggcctgctgatcctgccctgctacggcagcatgaccaccgtgagccagaccagcctgaccttcgtgacccacatccagatcatgaagcagatcagcgagaaccagcacagcctgaccggcctgaccatcgccggcatcaccggcgtgagccaccacgccagacccagaaacatgacctgcaacgagaagctgaaccagcagagaagaatcttcctgccccccccccccggcatcagaaagtgcgtgatcagcaccaacatcagcgccaccagcctgaccatcgacggcatcagatacgtggtggacggcggcttcgtgaagcagctgaaccacaaccccagactgggcctggacatcctggaggtggtgcccatcagcaagagcgaggccctgcagagaagcggcagagccggcagaaccagcagcggcaagtgcttcagaatctacagcaaggacttctggaaccagtgcatgcccgaccacgtgatccccgagatcaagagaaccagcctgaccagcgtggtgctgaccctgaagtgcctggccatccacgacgtgatcagattcccctacctggacccccccaacgagagactgatcctggaggccctgaagcagctgtaccagtgcgacgccatcgacagaagcggccacgtgaccagactgggcctgagcatggtggagttccccctgcccccccacctgacctgcgccgtgatcaaggccgccagcctggactgcgaggacctgctgctgcccatcgccgccatgctgagcgtggagaacgtgttcatcagacccgtggaccccgagtaccagaaggaggccgagcagagacacagagagctggccgccaaggccggcggcttcaacgacttcgccaccctggccgtgatcttcgagcagtgcaagagcagcggcgcccccgccagctggtgccagaagcactggatccactggagatgcctgttcagcgccttcagagtggaggcccagctgagagagctgatcagaaagctgaagcagcagagcgacttccccaaggagaccttcgagggccccaagcacgaggtgctgagaagatgcctgtgcgccggctacttcaagaacgtggccagaagaagcgtgggcagaaccttctgcaccatggacggcagaggcagccccgtgcacatccaccccagcagcgccctgcacgagcaggagaccaagctggagtggatcatcttccacgaggtgctggtgaccaccaaggtgtacgccagaatcgtgtgccccatcagatacgagtgggtgagagacctgctgcccaagctgcacgagttcaacgcccacgacctgagcagcgtggccagaagagaggtgagagaggacgccagaagaagatggaccaacaaggagaacgtgaagcagctgaaggacggcatcagcaaggacgtgctgaagaagatgcagagaagaaacgacgacaagagcatcagcgacgccagagccagattcctggagagaaagcagcagagaacccaggaccacagcgacaccagaaaggagaccggctag

SEQ ID NO: 215951 - DNA, 3666 bp, Artificial Sequence
  derived and/or modified sequence
ccacgtcatcgagcagctccccctccccttgctacaagtcgcacgcgcggaagtaaacacctctacgtcatcagggcgcgtcctcgtctttcccctcccatctcctcagatcggtggacgtgctcgcctccactcggggccaggtctatgtcccggtttcccgcagtcgcgggcagggcgccaaggcggcaggaggagggtgagcggtcaagagacctccaggaagagcggctctcggctgtttgcatcgccgatagagaagagaaaggatgcacgtcccaggagggaggaactactccaacttttcctattcagaaacaaagaaaaaagattattcaagctgtgagggacaattcattccttattgttactggaaatacaggaagtggtaaaacaactcaactcccaaaatatctatatgaagcagggttttcacaacatggtatgattggtgtaactcaaccacgaaaagtagctgctatatcagttgctcagagagtagctgaagaaatgaaatgcactttgggatccaaagtaggataccaagttcgttttgatgattgcagttctaaggagacagcaatcaaatatatgactgatggatgtttactgaaacatattctgggagacccaaatcttaccaaattcagtgtcattattttggatgaagcccatgaaagaactctaactacagatatcttatttggtttattgaagaagctatttcaggagaagtctcctaataggaaggagcatttaaaagtggtggtaatgtcagcaactatggaattagccaagctctctgcattctttggaaattgtccaatatttgatatacctggaaggctttatccagtcagagagaaattctgcaatttgattggtccacgagacagagaaaatactgcgtatattcaagcgattgtgaaagtcaccatggatatccatttgaatgaaatggctggagacatcttggtttttctgactggccagtttgaaatagaaaaaagttgtgagttactttttcagatggcagagtctgttgattatgattatgatgttcaagataccaccctcgatggcttgttaatattgccgtgttatggatcaatgacaacagatcaacagaggaggatatttttgccaccaccacctggaattagaaaatgtgtcatatccaccaatatttctgcaacgtctttgacaatagatggaatcagatatgtggtagatggtggcttcgtgaagcagttaaatcacaaccccagattagggttggacatcctggaggtggttccaatttcaaagagcgaggcattacagcgaagtggccgagctggcaggacttcttcaggaaaatgctttcggatctatagtaaagatttttggaaccagtgtatgcctgaccatgtgatccctgaaattaagagaactagtttgacatctgtagttctgaccttaaagtgccttgccatacacgatgtcataaggtttccctatttggatccacctaatgagagacttattttagaagctcttaaacaactttaccagtgtgatgctattgacaggagtggccatgtcaccagattgggtttgtctatggtggagtttcctttgcctccacatctgacatgtgcagtaataaaagctgcttccctggattgtgaagatctactacttccaatagcagcaatgttgtctgtggaaaacgtcttcattagacctgttgatccagagtaccagaaggaagcagaacagagacatcgagaattggcagctaaagctggaggatttaatgactttgcaactttagctgtcatctttgaacaatgcaaatcaagtggagctccagcttcatggtgccaaaaacactggattcattggaggtgcttattttctgcatttcgtgtggaagctcaacttcgagaactaatcaggaagcttaaacagcaaagtgatttcccaaaagagacctttgaaggccctaaacatgaagtactacgaagatgtctttgtgcgggctatttcaaaaatgtagctcgaagatctgttgggagaacgttttgcacaatggatggtcgtggaagcccagttcacattcatccttcctcagcacttcatgaacaggaaaccaaacttgaatggatcatttttcatgaggtattggttaccaccaaagtctacgcaagaattgtatgcccaatccgttatgaatgggtaagagacttgttacccaagttgcatgaatttaatgcacatgatttgagcagtgtggcccgacgtgaagtgagagaagatgcaagaaggagatggacaaataaggaaaatgtaaagcagctaaaggatggaatatcgaaagacgtcttaaagaaaatgcaaagaagaaatgatgacaaatccatatctgatgcacgggctcgtttccttgagagaaagcagcagaggacccaggaccacagtgacacacgaaaggaaacaggctaaggtggtgaaccctccaattcaggaagtgggaaaaggagccaggaaatgtgcttctactttgccagttatttcagacagcactaccaagaggaggtggtcagcacttgttattggcctatgaactaaaagcaaatcaaagctcataaatcaaagctcatcagttcccataaatgcagttgtcaaagaaaagatttggttgccatagtcataagcaatgatacatgaaaccaatgaaagacagtacatgtaataatattttcctcagtacaattttgctggccttaactggtatcaaacgctgtcattgagatgttttcaaagaacattgagttgtatttaatcagcgtgtactccatttgcattgaagcattaaaaattatttttcttaaaatctctttaaggccttcttgttgctgttagaatagtgctatatatcaggtatgtgaccatttatttcagaaggctgaacataagaggtttctactcagcaatacttagatgtctaactgtttaattgctacagagctttatagatatttagagaaaagacttaatcaattagtaaataaaattgcctatggcaggattctttcttgaattaatattaatccttaaattgatttttctgggattatacaaattcctttttatataaaagtatattgtttaaaacagtagctatagccattaaccaaaggacagatgatatatatatatatgatatatatatatatataagttcttttttagctgtacctacgtacttatatcagcaccatgtatgtaggtgtgatagtactttcaaacagcgcctccacctggcctactctgttatttccacctgtttgggtagggccatttaacttccattatgccaaacttgggatgggattttcgaagcagacaacactatttcatcgtgtttcaaattggaaccttgaggctagttagtatcacactcaggccacactcagcacttgcccactcttgtttactgccttgtattctagttatttgtgtatttgtctccctcactagattatacgctccttgtgggcagggactgtgtcttttttcatctttgtatctttcatgcacctagcatagtgctttgcacatagtagtcactcagtgtttgttaaataaagctattagtgtcattaaaattcaaaagacagt

SEQ ID NO: 215952 - DNA, 2228 bp, Artificial Sequence
  derived and/or modified sequence
gtctttcccctcccatctcctcagatcggtggacgtgctcgcctccactcggggccaggtctatgtcccggtttcccgcagtcgcgggcagggcgccaaggcggcaggaggagggtgagcggtcaagagacctccaggaagagcggctctcggctgtttgcatcgccgatagagaagagaaaggatgcacgtcccaggagggaggaactactccaacttttcctattcagaaacaaagaaaaaagattattcaagctgtgagggacaattcattccttattgttactggaaatacaggaagtggtaaaacaactcaactcccaaaatatctatatgaagcagggttttcacaacatggtatgattggtgtaactcaaccacgaaaagtagctgctatatcagttgctcagagagtagctgaagaaatgaaatgcactttgggatccaaagtaggataccaagttcgttttgatgattgcagttctaaggagacagcaatcaaatatatgactgatggatgtttactgaaacatattctgggagacccaaatcttaccaaattcagtgtcattattttggatgaagcccatgaaagaactctaactacagatatcttatttggtttattgaagaagctatttcaggagaagtctcctaataggaaggagcatttaaaagtggtggtaatgtcagcaactatggaattagccaagctctctgcattctttggaaattgtccaatatttgatatacctggaaggctttatccagtcagagagaaattctgcaatttgattggtccacgagacagagaaaatactgcgtatattcaagcgattgtgaaagtcaccatggatatccatttgaatgaaatggctggagacatcttggtttttctgactggccagtttgaaatagaaaaaagttgtgagttactttttcagatggcagagtctgttgattatgattatgatgttcaagataccaccctcgatggcttgttaatattgccgtgttatggatcaatgacaacagatcaacagaggaggatatttttgccaccaccacctggaattagaaaatgtgtcatatccaccaatatttctgcaacgtctttgacaatagatggaatcagatatgtggtagatggtggcttcgtgaagcagttaaatcacaaccccagattagggttggacatcctggaggtggttccaatttcaaagagcgaggcattacagcgaagtggccgagctggcaggacttcttcaggaaaatgctttcggatctatagtaaagatttttggaaccagtgtatgcctgaccatgtgatccctgaaattaagagaactagtttgacatctgtagttctgaccttaaagtgccttgccatacacgatgtcataaggtttccctatttggatccacctaatgagagacttattttagaagctcttaaacaactttaccagtgtgatgctattgacaggagtggccatgtcaccagattgggtttgtctatggtggagtttcctttgcctccacatctgacatgtgcagtaataaaagctgcttccctggattgtgaagatctactacttccaatagcagcaatgttgtctgtggaaaacgtcttcattagacctgttgatccagagtaccagaaggaagcagaacagagacatcgagaattggcagctaaagctggaggatttaatgactttgcaactttagctgtcatctttgaacaatgcaaatcaagtggagctccagcttcatggtgccaaaaacactggattcattggaggtgcttattttctgcatttcgtgtggaagctcaacttcgagaactaatcaggaagcttaaacagcaaagtgatttcccaaaagagacctttgaaggccctaaacatgaagtactacgaagatgtctttgtgcgggctatttcaaaaatgtagctcgaagatctgttgggagaacgttttgcacaatggatggtcgtggaagcccagttcacattcatccttcctcagcacttcatgaacaggaaaccaaacttgaatggatcatttttcatgaggtattggttaccaccaaagtctacgcaagaattgtatgcccaatccgttatgaatgggtaagagacttgttacccaagttgcatgaatttaatgcacatgatttgagcagtgtggcccgacgtgaagtgagcaaaataaaattatttcag

SEQ ID NO: 215953 - DNA, 3724 bp, Artificial Sequence
  derived and/or modified sequence
gtctttcccctcccatctcctcagatcggtggacgtgctcgcctccactcggggccaggtctatgtcccggtttcccgcagtcgcgggcagggcgccaaggcggcaggaggagggtgagcggtcaagagacctccaggaagagcggctctcggctgtttgcatcgccgatagagaagagaaaggatgcacgtcccaggagggaggaactactccaacttttcctattcagaaacaaagaaaaaagattattcaagctgtgagggacaattcattccttattgttactggaaatacaggaagtggtaaaacaactcaactcccaaaatatctatatgaagcagggttttcacaacatggtatgattggtgtaactcaaccacgaaaagtagctgctatatcagttgctcagagagtagctgaagaaatgaaatgcactttgggatccaaagtaggataccaagttcgttttgatgattgcagttctaaggagacagcaatcaaatatatgactgatggatgtttactgaaacatattctgggagacccaaatcttaccaaattcagtgtcattattttggatgaagcccatgaaagaactctaactacagatatcttatttggtttattgaagaagctatttcaggagaagtctcctaataggaaggagcatttaaaagtggtggtaatgtcagcaactatggaattagccaagctctctgcattctttggaaattgtccaatatttgatatacctggaaggctttatccagtcagagagaaattctgcaatttgattggtccacgagacagagaaaatactgcgtatattcaagcgattgtgaaagtcaccatggatatccatttgaatgaaatggctggagacatcttggtttttctgactggccagtttgaaatagaaaaaagttgtgagttactttttcagatggcagagtctgttgattatgattatgatgttcaagataccaccctcgatggcttgttaatattgccgtgttatggatcaatgacaacagtttcacaaaccagtctcacctttgtaacccacatccagatcatgaaacaaatcagtgagaaccagcattccttgacaggtctcaccattgctgggattacaggcgtgagtcaccacgcccggcctagaaacatgacttgtaatgaaaaattaaatcaacagaggaggatatttttgccaccaccacctggaattagaaaatgtgtcatatccaccaatatttctgcaacgtctttgacaatagatggaatcagatatgtggtagatggtggcttcgtgaagcagttaaatcacaaccccagattagggttggacatcctggaggtggttccaatttcaaagagcgaggcattacagcgaagtggccgagctggcaggacttcttcaggaaaatgctttcggatctatagtaaagatttttggaaccagtgtatgcctgaccatgtgatccctgaaattaagagaactagtttgacatctgtagttctgaccttaaagtgccttgccatacacgatgtcataaggtttccctatttggatccacctaatgagagacttattttagaagctcttaaacaactttaccagtgtgatgctattgacaggagtggccatgtcaccagattgggtttgtctatggtggagtttcctttgcctccacatctgacatgtgcagtaataaaagctgcttccctggattgtgaagatctactacttccaatagcagcaatgttgtctgtggaaaacgtcttcattagacctgttgatccagagtaccagaaggaagcagaacagagacatcgagaattggcagctaaagctggaggatttaatgactttgcaactttagctgtcatctttgaacaatgcaaatcaagtggagctccagcttcatggtgccaaaaacactggattcattggaggtgcttattttctgcatttcgtgtggaagctcaacttcgagaactaatcaggaagcttaaacagcaaagtgatttcccaaaagagacctttgaaggccctaaacatgaagtactacgaagatgtctttgtgcgggctatttcaaaaatgtagctcgaagatctgttgggagaacgttttgcacaatggatggtcgtggaagcccagttcacattcatccttcctcagcacttcatgaacaggaaaccaaacttgaatggatcatttttcatgaggtattggttaccaccaaagtctacgcaagaattgtatgcccaatccgttatgaatgggtaagagacttgttacccaagttgcatgaatttaatgcacatgatttgagcagtgtggcccgacgtgaagtgagagaagatgcaagaaggagatggacaaataaggaaaatgtaaagcagctaaaggatggaatatcgaaagacgtcttaaagaaaatgcaaagaagaaatgatgacaaatccatatctgatgcacgggctcgtttccttgagagaaagcagcagaggacccaggaccacagtgacacacgaaaggaaacaggctaaggtggtgaaccctccaattcaggaagtgggaaaaggagccaggaaatgtgcttctactttgccagttatttcagacagcactaccaagaggaggtggtcagcacttgttattggcctatgaactaaaagcaaatcaaagctcataaatcaaagctcatcagttcccataaatgcagttgtcaaagaaaagatttggttgccatagtcataagcaatgatacatgaaaccaatgaaagacagtacatgtaataatattttcctcagtacaattttgctggccttaactggtatcaaacgctgtcattgagatgttttcaaagaacattgagttgtatttaatcagcgtgtactccatttgcattgaagcattaaaaattatttttcttaaaatctctttaaggccttcttgttgctgttagaatagtgctatatatcaggtatgtgaccatttatttcagaaggctgaacataagaggtttctactcagcaatacttagatgtctaactgtttaattgctacagagctttatagatatttagagaaaagacttaatcaattagtaaataaaattgcctatggcaggattctttcttgaattaatattaatccttaaattgatttttctgggattatacaaattcctttttatataaaagtatattgtttaaaacagtagctatagccattaaccaaaggacagatgatatatatatatatgatatatatatatatataagttcttttttagctgtacctacgtacttatatcagcaccatgtatgtaggtgtgatagtactttcaaacagcgcctccacctggcctactctgttatttccacctgtttgggtagggccatttaacttccattatgccaaacttgggatgggattttcgaagcagacaacactatttcatcgtgtttcaaattggaaccttgaggctagttagtatcacactcaggccacactcagcacttgcccactcttgtttactgccttgtattctagttatttgtgtatttgtctccctcactagattatacgctccttgtgggcagggactgtgtcttttttcatctttgtatctttcatgcacctagcatagtgctttgcacatagtagtcactcagtgtttgttaaataaagctattagtgtcattaaaattc

SEQ ID NO: 215954 - protein, 249 aa, Artificial Sequence
  derived and/or modified sequence
MVDRLANSEANTRRISIVENCFGAAGQPLTIPGRVLIGEGVLTKLCRKKPKARQFFLFNDILVYGNIVIQKKKYNKQHIIPLENVTIDSIKDEGDLRNGWLIKTPTKSFAVYAATATEKSEWMNHINKCVTDLLSKSGKTPSNEHAAVWVPDSEATVCMRCQKAKFTPVNRRHHCRKCGFVVCGPCSEKRFLLPSQSSKPVRICDFCYDLLSAGDMATCQPARSDSYSQSLKSPLNDMSDDDDDDDSSD

SEQ ID NO: 215955 - DNA, 750 bp, Artificial Sequence
  derived and/or modified sequence
atggttgaccgcctggctaattcagaagctaataccaggcgcatttcaatcgtggaaaattgctttggagccgctggtcagcctctgacaatccccggaagggtgttgatcggagagggcgtgctgactaaattgtgtcgcaagaagcctaaggcaagacaattttttctgtttaatgatatcctagtgtatggcaatatcgttattcagaagaaaaagtacaacaagcaacatattattcctttagagaatgttaccattgattccatcaaagatgaaggggacctgcgaaacggctggctaattaagaccccaacgaagtccttcgccgtgtatgccgccacagccactgagaaatcggaatggatgaaccacatcaacaagtgtgtcactgacctgctgtccaaatcgggaaagaccccatcaaatgaacatgcggctgtctgggtgcccgactctgaggccactgtgtgcatgcgctgtcagaaagccaaatttactccggtgaacaggagacaccactgtcgcaaatgtggtttcgtggtgtgtggcccttgctctgaaaagcggttcctgcttcctagccagtccagcaaacctgtcagaatctgtgatttctgctatgacctcctttccgcaggcgatatggccacttgccagccagcgcgctctgactcatactcccagtccctgaaaagcccattaaacgacatgagcgacgatgacgacgacgatgattcatcagattag

SEQ ID NO: 215956 - DNA, 750 bp, Artificial Sequence
  derived and/or modified sequence
atggtagatagactggccaattctgaggctaatacccggcgcatctcaatcgtagagaattgtttcggcgctgccgggcaaccactcacaatacccggcagagtgctgatcggcgagggcgtactcacgaagctttgcaggaagaaaccaaaagcacgccagttttttctttttaacgacatccttgtctacggaaatattgtgatccagaagaaaaagtataataagcaacatatcattcccctggaaaatgtgactatcgactctatcaaagacgagggcgatctgagaaatgggtggctaattaaaactcctactaagtccttcgccgtgtacgcagctacagctactgagaaatcagagtggatgaatcacatcaacaaatgcgtgacagatctgctcagtaagtccggaaaaactccaagcaacgaacacgctgcagtgtgggttcctgatagtgaagccactgtgtgtatgaggtgtcaaaaggcaaaattcacacctgtcaacagacgccaccactgtcggaaatgtggattcgtggtatgcgggccatgttcggaaaagaggtttctgctcccctctcagtcatcaaagcccgtgagaatttgtgatttctgttatgatctgttgagcgccggagatatggctacatgccaaccagccaggagtgatagctacagtcagtcactcaagtcaccgcttaatgacatgagcgacgacgatgacgacgatgatagttccgactag

SEQ ID NO: 215957 - DNA, 750 bp, Artificial Sequence
  derived and/or modified sequence
atggtggaccggctggccaacagcgaggccaacacccggcgcatcagcatcgtggagaactgcttcggggctgctggccagcccctgaccatccctggccgggtgctgattggagagggcgtgctgaccaagctgtgcaggaagaagcccaaggcccggcagttcttcctgttcaatgacatcctggtgtatggcaacatcgtcatccagaagaagaagtacaacaagcagcacatcatccccctggagaatgtgaccatcgacagcatcaaggatgaaggagacctgagaaatggctggctgatcaagacccccaccaagagctttgctgtgtatgctgccacagccacagagaagtctgagtggatgaaccacatcaacaagtgtgtgacagacctgctgagcaagagcggcaagacccccagcaatgaacatgctgctgtgtgggtgcctgattctgaggccaccgtgtgcatgcgctgccagaaggccaagttcacccctgtgaacagaagacaccactgcaggaaatgtggctttgtggtgtgtggcccctgcagcgagaagcgcttcctgctgcccagccagagcagcaagcctgtgcgcatctgtgacttctgctatgacctgctgtctgctggggacatggccacctgccagcctgcccggagtgacagctacagccagagcctgaagagccccctgaatgacatgtctgatgatgatgatgatgatgacagcagtgactag

SEQ ID NO: 215958 - DNA, 750 bp, Artificial Sequence
  derived and/or modified sequence
atggtggaccggctggccaacagcgaggccaacacccggcggatcagcatcgtcgagaactgttttggcgccgccggtcagccgttgacaatccctggcagggttctgattggggaaggagtgttaaccaagctgtgcagaaagaagcctaaggctaggcagtttttcttattcaacgacatcctggtttacgggaatattgtgatccagaaaaaaaaatacaacaaacaacatatcattccactggaaaatgtgaccatagactcgattaaggatgaaggtgatcttagaaatggctggctgattaaaactccaactaaaagctttgcagtttacgcggctacagccaccgagaaatccgagtggatgaaccacattaacaagtgcgtaactgatctactgagcaagtccgggaagactccgagcaatgagcacgccgctgtctgggtcccagacagcgaagcaacggtgtgcatgcgctgccagaaggcaaaattcactccagtcaacagacgccaccattgccgaaagtgcggttttgttgtgtgtggcccctgctccgaaaaacggttcctactaccttcccagagctctaagcccgtgagaatctgtgacttttgctacgatttgctctccgctggcgatatggcaacatgtcaacccgcccgatccgactcttactcccaatccttgaagtctcccctgaacgatatgtcggacgatgatgatgatgatgactcctccgattag

SEQ ID NO: 215959 - DNA, 750 bp, Artificial Sequence
  derived and/or modified sequence
atggtggaccggctggccaacagcgaggccaacacccggcggatctccattgttgaaaattgctttggagccgcaggtcaacctctgacgatcccagggcgcgtacttattggcgagggagtgttgaccaaactctgccggaagaagccaaaagctcgacagtttttcctttttaatgatatccttgtgtatggtaacatagtgatccagaagaaaaaatacaacaaacagcacattattccgctggaaaacgtaactatcgactccattaaggatgagggcgacctacgaaatggctggctcatcaagactcccaccaaaagtttcgccgtctacgctgccacagctacagagaagagcgagtggatgaaccacattaataagtgtgtgactgacctgctcagtaaatccggcaagaccccctccaacgagcatgctgcggtgtgggttcccgattcagaagcaactgtctgtatgaggtgtcaaaaggcgaagtttacacctgtgaataggcgccaccactgtcgaaaatgcggattcgtcgtctgtgggccctgttccgagaagcgcttcttgctcccatctcagtccagtaaaccagtgcgtatttgtgatttttgctatgacttactcagtgcaggtgacatggcaacctgtcagccggctcgttcggattcctactcacagagtctgaagtcccccctgaatgatatgagcgacgatgacgacgatgacgattccagtgactag

SEQ ID NO: 215960 - DNA, 750 bp, Artificial Sequence
  derived and/or modified sequence
atggtggaccgtctggccaactctgaggcgaatacccgaaggatctccatagttgaaaattgttttggagctgctgggcagcctctgaccattcccggaagggttctgatcggggagggggtcttgactaaactttgtaggaagaaacctaaagctcgacaattctttctcttcaacgacatcctagtatacggtaatatcgtcattcagaaaaagaagtataacaagcagcacattattcccctggagaatgttaccatagattcgatcaaggatgaaggagatctgcgcaatggttggctgattaagactcccactaaaagttttgccgtgtacgcggctacggccaccgaaaagagtgaatggatgaaccacatcaacaaatgcgtgactgacctgctgtcaaagtcagggaaaacaccctctaacgagcacgcagctgtgtgggtccccgactcggaagctaccgtgtgtatgcgttgccagaaggccaaatttactccggtgaaccgcaggcaccattgtcggaaatgcggtttcgtagtgtgtggcccttgttctgaaaagcgtttcctgctgccttcccagtcaagtaaacctgtcagaatttgcgacttctgctacgacctgctctccgcgggagacatggcgacctgccagccggcaaggagcgacagttactctcagtcactgaaatccccactaaacgacatgtccgatgatgacgacgatgacgactctagcgattag

SEQ ID NO: 215961 - DNA, 750 bp, Artificial Sequence
  derived and/or modified sequence
atggtggatcggttggccaacagcgaagccaatactcgcagaatatccatagtggagaattgcttcggggctgcaggacagcccctgaccatcccagggagggtccttatcggcgaaggagtactgacgaaattatgtcggaaaaaaccaaaggcccgacagtttttcttatttaacgacatcctggtttacggcaatattgtgatacagaagaagaagtacaacaagcagcatataattcctttggagaatgtcaccatcgacagtattaaggacgagggagatctgagaaacggttggctgataaagacccccactaaatcatttgcagtatatgcagcgaccgcaaccgagaagtctgagtggatgaatcacattaacaagtgcgtgactgacctgcttagcaagtccggcaaaacgccctcaaatgaacacgccgctgtgtgggttcctgatagcgaggcgaccgtctgcatgcgctgccagaaggccaagttcacacccgtcaatcggaggcatcactgccggaagtgtgggtttgttgtctgcggtccctgtagtgagaagcgcttccttcttccctctcagtctagtaagccggtccggatctgcgatttctgttacgacctgctgagcgcgggtgatatggcgacatgccaaccggctaggtcagattcctattcccagagccttaagtctcctctgaatgatatgtcagacgacgacgacgacgacgacagttctgattag

SEQ ID NO: 215962 - DNA, 1144 bp, Artificial Sequence
  derived and/or modified sequence
ggaggggagacgcgaaactttccgggcgcttcctcccgcggtcccggagccgtcgcagcgccgggaggtgtcgtcgtcgcgggcggtggcggccgacgccatgttggggtctgtgagaaacggggcgctcccggccgctcccctcgcgccggggccggcccgcgggccagttgccgccgccgtcccgccagcccgggagcgagccgcgcccgcccgtaggacgccgccgccgccgcggggggacgggggccgccgggctattagtgaaagatggtggatcgcttggcaaacagtgaagcaaatactagacgtataagtatagtggaaaactgttttggagcagctggtcaacctttaactatacctggacgagttcttattggagaaggagtattgactaagttgtgcaggaaaaagcccaaagcaaggcagtttttcttgtttaatgatattcttgtatatggcaatattgtcatccagaagaaaaaatataacaaacaacatattattcccctggaaaatgtcactattgattccatcaaagatgagggagacttaaggaatggatggctaatcaagacaccaactaaatcttttgcagtttatgctgccactgctacggagaaatcagaatggatgaatcatataaataaatgtgttactgatttactctccaaaagtgggaagacacccagtaatgaacatgctgctgtctgggttcctgactctgaggcaactgtatgtatgcgttgtcagaaagcaaaattcacacctgttaatcgtcgccaccattgccgcaaatgtggttttgttgtctgtgggccctgctctgaaaagagatttcttcttcccagccagtcctctaagcctgtgcggatttgtgacttctgctatgacctgctttctgctggggacatggccacatgccagcctgctagatcagactcttacagccagtcattgaagtctcctttaaatgatatgtctgatgatgatgacgatgatgatagcagtgactaaggacacatttgggagtatttaatcaggtgtggctatctgagaaatcaactttgggggaaatgtaagattctgagctctctctctgttttgttctagccatgaatttgcctgagaaacttgtaac

SEQ ID NO: 215963 - DNA, 2881 bp, Artificial Sequence
  derived and/or modified sequence
cgttgtcgggttcgactggaggggcgggggagtcacctgcgagcggctgcgctggcggccagcccgcccaccgcgtctggatcgcgccggctgcgcggggctgcggacagcacacaccctggaaggccccggcggggaacgggcagagtccgcgccctgcgtccgcgaccaggaggatcggaccttcgccttcgctgtcgccgccgccgccgcccgcggccgtcggggctattagtgaaagatggtggatcgcttggcaaacagtgaagcaaatactagacgtataagtatagtggaaaactgttttggagcagctggtcaacctttaactatacctggacgagttcttattggagaaggagtattgactaagttgtgcaggaaaaagcccaaagcaaggcagtttttcttgtttaatgatattcttgtatatggcaatattgtcatccagaagaaaaaatataacaaacaacatattattcccctggaaaatgtcactattgattccatcaaagatgagggagacttaaggaatggatggctaatcaagacaccaactaaatcttttgcagtttatgctgccactgctacggagaaatcagaatggatgaatcatataaataaatgtgttactgatttactctccaaaagtgggaagacacccagtaatgaacatgctgctgtctgggttcctgactctgaggcaactgtatgtatgcgttgtcagaaagcaaaattcacacctgttaatcgtcgccaccattgccgcaaatgtggttttgttgtctgtgggccctgctctgaaaagagatttcttcttcccagccagtcctctaagcctgtgcggatttgtgacttctgctatgacctgctttctgctggggacatggccacatgccagcctgctagatcagactcttacagccagtcattgaagtctcctttaaatgatatgtctgatgatgatgacgatgatgatagcagtgactaaggacacatttgggagtatttaatcaggtgtggctatctgagaaatcaactttgggggaaatgtaagattctgagctctctctctgttttgttctagccatgaatttgcctgagaaacttgtaacctatgtgcctcaatatattccatagaaagtaggtccccctgccttctcccactcctcacactcttctacagggataggcttttgcaaatatatcagataaattttttgtttcttgtttatttttaggttattttcttggaaggttgggaaaagatgtttgttttaacaggtcatgtactacgttgttgttttcatttctgttataagtaaaactaaaagcacagaatggtgggaaaggggctataatgtggttcattaataatgttagcagcttttttctaaccatcctgtctaatggttaagacaccagtaacaaaaacacatgatttggaaatactttggctttttcatatacctagtggtgccttatcataatagcactgttacatgaaataagcccctaccttcttactttctggtttgttgaaaaaatacactggtgctctttgaagtgataaaatgagtgtttatgaatgggtgtaattaggaaatacttctcatctgacagctacaaataactaagtttggaggtattttcactctatatgaataaatatttttccataaaatagttgtgattatatttttgttttatataggtcccaaattataattgtcaaatatatattttaaattaataaaagttgtcattcttaggaatttggtttgaaatttatcagttatacagaattgtcatactgcattagcttctacctttagtaagacatattttttaggtataaattcttatgctttaacattatttctggattgaaaatcttataaaacccttgaaaataaacagtctcttttttacaaagcctgtgttagagcacagatttacctaggcttgaagatttggaagaaataatatgtaagaatggcctcaaggcagaccactttaagtttggctagacttcatatcgtggaagtattgtctatttcagtgtgaaactatcttgaatttgcaaatatagtgttatattttataaagttttgtaaaatcccaaacaatatttctatttttgtaaaacaattgtatgtataatctgtatttgaaatcattttgcaatctatggaaatagagtagcaattgctatttctaaattgtgaactttaagtcaatctagatttattttgagaagtaattgttcactctttacttttgaggcagccattaggttgaaagtatatatttatcatataaaacttgatgcgttttgcactactctttccatttatatgctgcaaacaactacagtctttgaaatatggaaaatcagcagtctaaagtttgttttaaattctaaatttaaaaaatcttcaaatctgaatataccgcaaatgtcatgagaagtttgattcagtaacttgtgatggaggattctttggtatcttactgtttggttaaggcactaattttacttacctattagattttgaaagtatctgagatatacaaatctccctgtaggaaatgtgaaagaaaagcacaacaaaactagggttttttgttcatttgcttgcttttatgattttttttggtttgttttaatatcaggtggatttttgtttctaagcaatatatacataaaatcaaccaacatatctgaaaaggatcatgaaacctgagaaatgctaatggagatttgctggtacataggaatctagcaaattcaggaaccaaggggaaatgttgtgagataacatttacattgtcaacctttattgactttgtttttacaataaaaaatattttacaactt

SEQ ID NO: 215964 - DNA, 750 bp, Artificial Sequence
  derived and/or modified sequence
atggtggacagactggccaacagcgaggccaacaccagaagaatcagcatcgtggagaactgcttcggcgccgccggccagcccctgaccatccccggcagagtgctgatcggcgagggcgtgctgaccaagctgtgcagaaagaagcccaaggccagacagttcttcctgttcaacgacatcctggtgtacggcaacatcgtgatccagaagaagaagtacaacaagcagcacatcatccccctggagaacgtgaccatcgacagcatcaaggacgagggcgacctgagaaacggctggctgatcaagacccccaccaagagcttcgccgtgtacgccgccaccgccaccgagaagagcgagtggatgaaccacatcaacaagtgcgtgaccgacctgctgagcaagagcggcaagacccccagcaacgagcacgccgccgtgtgggtgcccgacagcgaggccaccgtgtgcatgagatgccagaaggccaagttcacccccgtgaacagaagacaccactgcagaaagtgcggcttcgtggtgtgcggcccctgcagcgagaagagattcctgctgcccagccagagcagcaagcccgtgagaatctgcgacttctgctacgacctgctgagcgccggcgacatggccacctgccagcccgccagaagcgacagctacagccagagcctgaagagccccctgaacgacatgagcgacgacgacgacgacgacgacagcagcgactag

SEQ ID NO: 215965 - protein, 309 aa, Artificial Sequence
  derived and/or modified sequence
MEELLRRELGCSSVRATGHSGGGCISQGRSYDTDQGRVFVKVNPKAEARRMFEGEMASLTAILKTNTVKVPKPIKVLDAPGGGSVLVMEHMDMRHLSSHAAKLGAQLADLHLDNKKLGEMRLKEAGTVGRGGGQEERPFVARFGFDVVTCCGYLPQVNDWQEDWVVFYARQRIQPQMDMVEKESGDREALQLWSALQLKIPDLFRDLEIIPALLHGDLWGGNVAEDSSGPVIFDPASFYGHSEYELAIAGMFGGFSSSFYSAYHGKIPKAPGFEKRLQLYQLFHYLNHWNHFGSGYRGSSLNIMRNLVK

SEQ ID NO: 215966 - protein, 259 aa, Artificial Sequence [sequence omitted]

SEQ ID NO: 215967 - DNA, 1825 bp, Artificial Sequence
  derived and/or modified sequence
ctctcgagtctccgccagatccggggcgggtccgcggccgcggcgggaacatggaggagctcctgaggcgcgagctgggctgcagctctgtcagggccacgggccactcggggggcgggtgcatcagccagggccggagctacgacacggatcaaggacgagtgttcgtgaaagtgaaccccaaggcggaggccagaagaatgtttgaaggtgagatggcaagtttaactgccatcctgaaaacaaacacggtgaaagtgcccaagcccatcaaggttctggatgccccaggcggcgggagcgtgctggtgatggagcacatggacatgaggcatctgagcagtcatgctgcaaagcttggagcccagctggccgatttacaccttgataacaagaagcttggagagatgcgcctgaaggaggcgggcacagtggggagaggaggtgggcaggaggaacggccctttgtggcccggtttggatttgacgtggtgacgtgctgtggatacctcccccaggtgaatgactggcaggaggactgggtcgtgttctatgcccggcagcgcattcagccccagatggacatggtggagaaggagtctggggacagggaggccctccagctttggtctgctctgcagttaaagatccctgacctgttccgtgacctggagatcatcccagccttactccacggggacctctggggtggaaacgtagcagaggattcctctgggccggtgatttttgacccagcttctttctacggccactcggaatatgagctggcaatagctggcatgtttgggggctttagcagctccttttactccgcctaccacggcaaaatccccaaggccccaggattcgagaagcgccttcagttgtatcagctctttcactacttgaaccactggaatcattttggatcggggtacagaggatcctccctgaacatcatgaggaatctggtcaagtgagcgggccttactctggaaggaggcctcagaggtttctccacagtcctcttctgggcaaattcttgtttcttcacatgctggactagcttaagaccaatgcagtagcttatttccaagccttgcaaagtatataatatctaagaggaaaggttttgtcatcccagcgttgtccactttgtggggctttgtaggtagacggagccacactacaggcagggtatgagcagagggatgtatggagtgtgggtgactctgagcctcactgctgctgcaaggtggggaaactgtaagtgaacccctgtgggtgcgggggagggtatccggtgcgcagggaggtggccagcgcccccgggcactgctgctcataggtacctttccactgcctcctccctgctctcctgtgcaggaatgtctctgagctgttcacgttgatgcttcttggttggcaagacttgggtgtagacatgaaaccatcttactaaaagcgtcttaaaatgaccaattccagaatcaagcgtattccgttttcttcctgcatgatccctgggccctcccgcaggctgagcaagtctgtaaactgattctgggagaaaccaagctgctggccatagggtgtccttgggtacatccaggagtcttcattgcttctgttattaccccgtctcctctgccattttctacagcttgctgagttgtcattcctttgcaacattaaaatacatgctgaactcatatttttccttccttcactgttgtagtaaagagacatatttcatgaatggcattgatgctaataaatcctttgcacaaaaatttgaataaacttccagtggtttcgataacgt

SEQ ID NO: 215968 - DNA, 1422 bp, Artificial Sequence
  derived and/or modified sequence
agatccggggcgggtccgcggccgcggcgggaacatggaggagctcctgaggcgcgagctgggctgcagctctgtcagggccacgggccactcggggggcgggtgcatcagccagggccggagctacgacacggatcaaggacgagtgttcgtgaaagtgaaccccaaggcggaggtgaaaagtgaccccaggtcactggcataggcagccagggtgccgcctgcacctgagaggtcgggtgagtctgtgtcctgtaggtggaacaggactgcagttgaggtgtcgtctgaggacactgacaggccagaagaatgtttgaaggtgagatggcaagtttaactgccatcctgaaaacaaacacggtgaaagtgcccaagcccatcaaggttctggatgccccaggcggcgggagcgtgctggtgatggagcacatggacatgaggcatctgagcagtcatgctgcaaagcttggagcccagctggccgatttacaccttgataacaagaagcttggagagatgcgcctgaaggaggcgggcacagtggggagaggaggtgggcaggaggaacggccctttgtggcccggtttggatttgacgtggtgacgtgctgtggatacctcccccaggtgaatgactggcaggaggactgggtcgtgttctatgcccggcagcgcattcagccccagatggacatggtggagaaggagtctggggacagggaggccctccagctttggtctgctctgcagttaaagatccctgacctgttccgtgacctggagatcatcccagccttactccacggggacctctggggtggaaacgtagcagaggattcctctgggccggtgatttttgacccagcttctttctacggccactcggaatatgagctggcaatagctggcatgtttgggggctttagcagctccttttactccgcctaccacggcaaaatccccaaggccccaggattcgagaagcgccttcagttgtatcagctctttcactacttgaaccactggaatcattttggatcggggtacagaggatcctccctgaacatcatgaggaatctggtcaagtgagcgggccttactctggaaggaggcctcagaggtttctccacagtcctcttctgggcaaattcttgtttcttcacatgctggactagcttaagaccaatgcagtagcttatttccaagccttgcaaagtatataatatctaagaggaaaggttttgtcatcccagcgttgtccactttgtggggctttgtaggtagacggagccacactacaggcagggtatgagcagagggatgtatggagtgtgggtgactctgagcctcactgctgctgcaaggtggggaaactgtaagtgaacccctgtgggtgcgggggagggtatccggtgcgca

SEQ ID NO: 215969 - DNA, 930 bp, Artificial Sequence
  derived and/or modified sequence
atggaggagctgctccggagagaattgggatgcagctctgtaagagcgaccggacatagcggcggagggtgcatctcgcaagggaggtcgtacgacaccgaccagggcagggtctttgtgaaagtgaaccccaaggcagaggcacggcggatgttcgagggcgagatggcaagcttaaccgcgatactgaaaacgaataccgttaaggtgcctaaacccatcaaggtgctggacgcgccagggggcggtagtgttctcgttatggagcacatggacatgagacacctgtcttcacatgcagccaagctgggagctcagttggccgacctgcacctggataacaaaaaactgggcgaaatgcggctaaaggaggccggaacagtgggtcgtggcggaggccaggaggaaagaccgtttgtggccaggttcggattcgatgtggtgacatgctgcggctacctgcctcaggtgaacgattggcaggaagattgggtggtgttctatgctagacagcgaatccagccccagatggatatggttgagaaggaatcgggggatcgagaggccttacagctgtggagcgctttgcagcttaagatccctgatttattcagagacctcgaaattattccggctctgttgcacggcgacctgtggggagggaacgtggccgaagattcctccggcccggtgatctttgaccctgccagtttctacggccattccgagtatgaacttgccatcgctggtatgtttggtggatttagcagcagcttctatagtgcgtaccacgggaaaattccaaaggcgccaggcttcgagaagaggttgcagctttaccagctatttcactatctgaatcactggaatcacttcggaagcggatacaggggttcgtctcttaacataatgagaaacctggtgaaatag

SEQ ID NO: 215970 - DNA, 780 bp, Artificial Sequence
  derived and/or modified sequence
atgtttgaaggggagatggcaagcctcaccgcaattctcaagaccaatacagtgaaagtgcccaagcctataaaggtcctcgatgccccaggaggggggtcagtactcgtcatggagcatatggatatgcgccacctgtccagccatgcagcaaagctcggcgcccagctggcagaccttcacttggataacaagaaactgggcgagatgcgcctgaaggaggccggcacagtgggtcgcggtggcggacaagaggaacgaccgtttgtggccaggtttggattcgatgttgtcacctgctgcggttatcttccacaggtgaacgattggcaggaggactgggtggtgttctacgcccgacagagaatccagccccagatggatatggtagaaaaggagtcaggggaccgggaggccctgcagctgtggagtgccctccagttaaaaatcccagaccttttcagagatctggaaatcattccggccttgctgcatggggatctgtgggggggcaatgtggccgaggattctagcggccccgtgattttcgaccccgcctctttttatggtcactcagaatatgaattggccatcgcagggatgttcggcgggttctctagttctttctatagcgcatatcacgggaaaatccccaaagcccctggcttcgagaaaagattacagctttatcagttgtttcactacctcaaccattggaatcattttggctccggatatagggggtctagcttgaacattatgcggaatctggtgaaatag

SEQ ID NO: 215971 - DNA, 930 bp, Artificial Sequence
  derived and/or modified sequence
atggaggagctgctgcggcgggagctgggctgcagctctgtgcgggccaccggccacagcggcggcggctgcatcagccagggccgctcctatgacacagaccagggccgggtgtttgtgaaggtgaaccccaaggccgaggcccggaggatgtttgaaggagagatggccagcctgacagccatcctgaagaccaacacagtgaaggtgcccaagcccatcaaggtgctggatgcccctgggggcggctctgtgctggtgatggagcacatggacatgaggcacctgagcagccacgccgccaagctgggcgcccagctggccgacctgcacctggacaacaagaagctgggggagatgaggctgaaggaggccggcaccgtgggccggggcggcggccaggaggagcggccctttgtggccaggtttggatttgatgtggtgacctgctgcggctacctgccccaggtgaatgactggcaggaggactgggtggtgttctacgcccggcagaggatccagccccagatggacatggtggagaaggagagcggggaccgggaggccctgcagctgtggagcgccctgcagctgaagatcccagacctcttccgggacctggagatcatcccagccctgctgcatggagacctgtggggcggcaatgtggccgaggacagcagcggccctgtgatctttgatcctgccagcttctacggccacagtgaatatgagctggccatcgccggcatgtttggaggcttcagcagcagcttctacagcgcctaccacggcaagatccccaaggcccctggctttgagaagaggctgcagctgtaccagctgttccactacctgaaccactggaaccacttcggcagcggctaccggggcagcagcctgaacatcatgaggaacctggtgaagtag

SEQ ID NO: 215972 - DNA, 780 bp, Artificial Sequence
  derived and/or modified sequence
atgtttgaaggagagatggccagcctgacagccatcctgaagaccaacacagtgaaggtgcccaagcccatcaaggtgctggatgcccctgggggcggctctgtgctggtgatggagcacatggacatgaggcacctgagcagccacgccgccaagctgggcgcccagctggccgacctgcacctggacaacaagaagctgggggagatgaggctgaaggaggccggcaccgtgggccggggcggcggccaggaggagcggccctttgtggccaggtttggatttgatgtggtgacctgctgcggctacctgccccaggtgaatgactggcaggaggactgggtggtgttctacgcccggcagaggatccagccccagatggacatggtggagaaggagagcggggaccgggaggccctgcagctgtggagcgccctgcagctgaagatcccagacctcttccgggacctggagatcatcccagccctgctgcatggagacctgtggggcggcaatgtggccgaggacagcagcggccctgtgatctttgatcctgccagcttctacggccacagtgaatatgagctggccatcgccggcatgtttggaggcttcagcagcagcttctacagcgcctaccacggcaagatccccaaggcccctggctttgagaagaggctgcagctgtaccagctgttccactacctgaaccactggaaccacttcggcagcggctaccggggcagcagcctgaacatcatgaggaacctggtgaagtag

SEQ ID NO: 215973 - DNA, 930 bp, Artificial Sequence
  derived and/or modified sequence
atggaggagctgctgcggcgggagctgggctgcagcagcgtgcgggccactggccactccggcggaggctgcatttcacagggcagatcctacgacactgaccaaggtcgcgtatttgtaaaggttaaccctaaagctgaggctagacgcatgtttgagggggagatggcaagccttacagcaattcttaagacaaacacggtgaaagtgccaaagcctataaaagtcctagatgctcccggcggcggatctgtgcttgtcatggaacacatggacatgagacatctgtccagtcatgccgccaaactcggtgctcagctggccgacttacatctggacaataagaagctgggggagatgagactcaaggaggctggcacagtaggaagagggggcggccaagaagaacgaccatttgtcgccagattcggattcgacgtggtcacctgctgtggttatctcccgcaggttaacgactggcaggaagactgggtggtgttctacgcccggcagcggattcagcctcagatggatatggtcgaaaaggaatcaggtgacagggaagccctacaattgtggagtgcacttcagttaaagattcctgatctgttccgagacttggaaataatccctgccttattacacggggatctctggggtggcaatgtggccgaggatagcagtggacctgtaatattcgatcctgcatccttctacgggcatagtgagtacgagttagcaatagctgggatgttcggaggtttctcttccagcttttactccgcgtatcacggaaaaatccccaaggcccccggctttgagaaaagactgcagctgtaccagctgttccattacttgaatcactggaatcactttggtagtggctaccgcggatcctcgcttaacataatgaggaatttggtgaagtag

SEQ ID NO: 215974 - DNA, 780 bp, Artificial Sequence
  derived and/or modified sequence
atgttcgagggcgagatggccagcctgaccgccatcctgaagaccaacaccgtgaaggtccccaagcccattaaagtccttgatgctcctggaggaggttccgtgctggtgatggagcacatggatatgcgccacctgtcgtcgcatgcagcgaaactcggggcccaactggcggacctgcatctagacaataagaaactcggagaaatgagactgaaagaagcaggtaccgtaggaaggggaggcggacaggaggagcggccctttgttgcacgttttgggttcgatgtggtgacatgttgtggctaccttcctcaggtgaatgattggcaggaagactgggtcgttttttacgcacgccagaggattcagccccagatggacatggtggagaaggagtccggagatcgcgaggccctacagctctggagcgctctgcaactgaagattcccgacctatttcgcgatctcgagattattccggccttactccatggagatttatggggaggcaatgtggctgaggactcctctggccccgtaatattcgatcctgcttctttctacgggcattccgaatacgaactcgctattgccggtatgttcggaggattctcaagcagcttttatagtgcctatcatggaaagatccctaaagcaccgggcttcgagaagcgcctccagctctatcagctgttccattacctgaaccactggaatcatttcggctcaggctacagagggtcttccctaaacatcatgagaaacctggtgaagtag

SEQ ID NO: 215975 - DNA, 930 bp, Artificial Sequence
  derived and/or modified sequence
atggaagaactgctaaggagagaattggggtgcagtagtgttcgggcaaccggccattcaggcggaggctgtatctctcagggaaggagttacgatacagaccagggtagggtgtttgtcaaggttaaccctaaagccgaggcaaggcgcatgtttgaaggcgagatggcatccctaacagcaatattgaagaccaatacagttaaagtccccaagcccattaaggttctagatgccccaggtggtgggagcgtgctagtaatggagcatatggatatgcggcacttgtcgtcccacgcggctaagttgggcgctcaattagccgacctgcacttagacaacaagaagttaggtgaaatgcgtcttaaggaagccggaaccgttggaagggggggtggccaggaggaacgcccattcgttgctaggttcggcttcgatgttgtgacatgctgcggttacctgccccaggtcaatgattggcaggaggactgggtcgtgttctatgcaaggcagaggatccaaccccagatggacatggtggaaaaagagagcggagaccgagaggcactccagctctggtccgcactgcagttgaagatccctgatctgtttagagacctcgagatcattcccgctttgctccatggcgatttgtggggaggtaatgtggcggaggatagttcaggccctgtaattttcgacccagcaagtttctatggacacagcgagtatgagcttgcgattgccggaatgttcggaggcttttcttcctctttttactccgcctatcacggaaagatccctaaagcacccggtttcgaaaagagacttcagctgtatcagttgtttcattacttgaaccattggaatcactttggcagtggttacaggggatcgtccctaaacattatgagaaatcttgttaaatag

SEQ ID NO: 215976 - DNA, 780 bp, Artificial Sequence
  derived and/or modified sequence
atgttcgagggtgaaatggcatcgctcactgcaattctgaaaactaacactgtaaaggttcctaaaccaatcaaagtactggacgcccctggaggaggatccgtccttgtgatggagcatatggatatgaggcatctatcatcccacgctgcaaaacttggggctcagctcgcggatcttcatctcgacaataagaaacttggcgaaatgcgcctgaaagaggcaggcacagtcggcaggggaggtggccaggaagagcgtccattcgtagcgagatttggtttcgacgtcgtgacatgctgcgggtatctgcctcaagtgaatgattggcaggaggactgggtagtattctatgccaggcagaggattcaacctcaaatggatatggtggagaaagagtccggagacagagaagccctgcaactgtggagcgccttacaactcaagatccctgatctgttccgcgatttggagattatccctgctttgttacatggcgacctgtggggaggaaacgtagcggaagactcctcggggccagtcatttttgatcccgcaagcttctatggccactccgaatatgaattagccatcgcaggcatgttcggagggtttagctcctctttctacagtgcatatcatggaaagatccctaaggcccctggttttgaaaagaggctacagttgtaccagttgttccattacctaaaccattggaaccactttgggtccggctaccgtggatctagcctcaatataatgcgcaatctcgtgaagtag

SEQ ID NO: 215977 - DNA, 930 bp, Artificial Sequence
  derived and/or modified sequence
atggaggagctgctgagaagagagctgggctgcagcagcgtgagagccaccggccacagcggcggcggctgcatcagccagggcagaagctacgacaccgaccagggcagagtgttcgtgaaggtgaaccccaaggccgaggccagaagaatgttcgagggcgagatggccagcctgaccgccatcctgaagaccaacaccgtgaaggtgcccaagcccatcaaggtgctggacgcccccggcggcggcagcgtgctggtgatggagcacatggacatgagacacctgagcagccacgccgccaagctgggcgcccagctggccgacctgcacctggacaacaagaagctgggcgagatgagactgaaggaggccggcaccgtgggcagaggcggcggccaggaggagagacccttcgtggccagattcggcttcgacgtggtgacctgctgcggctacctgccccaggtgaacgactggcaggaggactgggtggtgttctacgccagacagagaatccagccccagatggacatggtggagaaggagagcggcgacagagaggccctgcagctgtggagcgccctgcagctgaagatccccgacctgttcagagacctggagatcatccccgccctgctgcacggcgacctgtggggcggcaacgtggccgaggacagcagcggccccgtgatcttcgaccccgccagcttctacggccacagcgagtacgagctggccatcgccggcatgttcggcggcttcagcagcagcttctacagcgcctaccacggcaagatccccaaggcccccggcttcgagaagagactgcagctgtaccagctgttccactacctgaaccactggaaccacttcggcagcggctacagaggcagcagcctgaacatcatgagaaacctggtgaagtag

SEQ ID NO: 215978 - DNA, 780 bp, Artificial Sequence
  derived and/or modified sequence
atgttcgagggcgagatggccagcctgaccgccatcctgaagaccaacaccgtgaaggtgcccaagcccatcaaggtgctggacgcccccggcggcggcagcgtgctggtgatggagcacatggacatgagacacctgagcagccacgccgccaagctgggcgcccagctggccgacctgcacctggacaacaagaagctgggcgagatgagactgaaggaggccggcaccgtgggcagaggcggcggccaggaggagagacccttcgtggccagattcggcttcgacgtggtgacctgctgcggctacctgccccaggtgaacgactggcaggaggactgggtggtgttctacgccagacagagaatccagccccagatggacatggtggagaaggagagcggcgacagagaggccctgcagctgtggagcgccctgcagctgaagatccccgacctgttcagagacctggagatcatccccgccctgctgcacggcgacctgtggggcggcaacgtggccgaggacagcagcggccccgtgatcttcgaccccgccagcttctacggccacagcgagtacgagctggccatcgccggcatgttcggcggcttcagcagcagcttctacagcgcctaccacggcaagatccccaaggcccccggcttcgagaagagactgcagctgtaccagctgttccactacctgaaccactggaaccacttcggcagcggctacagaggcagcagcctgaacatcatgagaaacctggtgaagtag

SEQ ID NO: 215979 - protein, 833 aa, Artificial Sequence
  derived and/or modified sequence
MHQLFRLVLGQKDLSRAGDLFSLDDSEIEDSLTEALEQIKIISSSSDYQTNNNDQAVVEICITRITTAIRETESIEKHAKALVGLWDSCLEHNLRPFGKDEDTPHAKIASDIMSCILQNYNRPPVMALAIPIAVKFLHRGNKELCRNMSNYLSLAAITKADLLADHTEVIVKSILQGNTMLLRVLPAVYEKQPQPINRHLTELLALMSQLEQPEQYHLLRLLHVAAKKKQLEVVQKCIPFLIGHLKDSTHNDIILNILIEIAVYEPVALNSFLPMLKEIGERFPYLTGQMARIYGAVGHVDEERARSCLTYLVSQLANMEHSFHHILLLEIKSITDTFSSILGPQSRDIFRMSNSFTAIAKLLTRQLENTKAGSGRRKISTEIEFPEKLEETKLIVTENEDHEKLQVKIQAFEDKINAGSNTPGSIRRYSLGQVSKEERKNIRFNRSKSLAFHTMLTKGVGSDDGEDENRGDIPASISLSEIDPLGQGNDKLPFKTDTERSQLGESSVSYPNIIHIDSENLSETVKENSQEETPETTASPIEYQDKLYLHLKKNLSKVKAYAMEIGKKIPVPDQCTIEDTVRSCVAKLFFTCSLKGHYCLYSKSSFILISQEPQPWIQIMFLFQQSLFPEPLSIQSHSVQFLRALWEKTQAGGAHSFETAMMESTFPQQKDLDQVQLHLEEVRFFDVFGFSETAGAWQCFMCNNPEKATVVNQDGQPLIEGKLKEKQVRWKFIKRWKTRYFTLAGNQLLFQKGKSKDDPDDCPIELSKVQSVKAVAKKRRDRSLPRAFEIFTDNKTYVFKAKDEKNAEEWLQCINVAVAQAKERESREVTTYL

SEQ ID NO: 215980 - protein, 63 aa, Artificial Sequence
  derived and/or modified sequence
MHQLFRLVLGQKDLSRAGDLFSLDDSEIEDSLTEALEQIKIISSSSDYQTNNNDQAVVEICIT

SEQ ID NO: 215981 - protein, 165 aa, Artificial Sequence
  derived and/or modified sequence
MHQLFRLVLGQKDLSRAGDLFSLDDSEIEDSLTEALEQIKIISSSSDYQTNNNDQAVVEICITRITTAIRETESIEKHAKALVGLWDSCLEHNLRPFGKDEDTPHAKIASDIMSCILQNYNRPPVMALAIPIAVKFLHRGNKELCRNMSNYLSLAAITKADLLAD

SEQ ID NO: 215982 - DNA, 2502 bp, Artificial Sequence
  derived and/or modified sequence
atgcaccagctgttcagactggtgctgggccagaaggacctgagcagagccggcgacctgttcagcctggacgacagcgagatcgaggacagcctgaccgaggccctggagcagatcaagatcatcagcagcagcagcgactaccagaccaacaacaacgaccaggccgtggtggagatctgcatcaccagaatcaccaccgccatcagagagaccgagagcatcgagaagcacgccaaggccctggtgggcctgtgggacagctgcctggagcacaacctgagacccttcggcaaggacgaggacaccccccacgccaagatcgccagcgacatcatgagctgcatcctgcagaactacaacagaccccccgtgatggccctggccatccccatcgccgtgaagttcctgcacagaggcaacaaggagctgtgcagaaacatgagcaactacctgagcctggccgccatcaccaaggccgacctgctggccgaccacaccgaggtgatcgtgaagagcatcctgcagggcaacaccatgctgctgagagtgctgcccgccgtgtacgagaagcagccccagcccatcaacagacacctgaccgagctgctggccctgatgagccagctggagcagcccgagcagtaccacctgctgagactgctgcacgtggccgccaagaagaagcagctggaggtggtgcagaagtgcatccccttcctgatcggccacctgaaggacagcacccacaacgacatcatcctgaacatcctgatcgagatcgccgtgtacgagcccgtggccctgaacagcttcctgcccatgctgaaggagatcggcgagagattcccctacctgaccggccagatggccagaatctacggcgccgtgggccacgtggacgaggagagagccagaagctgcctgacctacctggtgagccagctggccaacatggagcacagcttccaccacatcctgctgctggagatcaagagcatcaccgacaccttcagcagcatcctgggcccccagagcagagacatcttcagaatgagcaacagcttcaccgccatcgccaagctgctgaccagacagctggagaacaccaaggccggcagcggcagaagaaagatcagcaccgagatcgagttccccgagaagctggaggagaccaagctgatcgtgaccgagaacgaggaccacgagaagctgcaggtgaagatccaggccttcgaggacaagatcaacgccggcagcaacacccccggcagcatcagaagatacagcctgggccaggtgagcaaggaggagagaaagaacatcagattcaacagaagcaagagcctggccttccacaccatgctgaccaagggcgtgggcagcgacgacggcgaggacgagaacagaggcgacatccccgccagcatcagcctgagcgagatcgaccccctgggccagggcaacgacaagctgcccttcaagaccgacaccgagagaagccagctgggcgagagcagcgtgagctaccccaacatcatccacatcgacagcgagaacctgagcgagaccgtgaaggagaacagccaggaggagacccccgagaccaccgccagccccatcgagtaccaggacaagctgtacctgcacctgaagaagaacctgagcaaggtgaaggcctacgccatggagatcggcaagaagatccccgtgcccgaccagtgcaccatcgaggacaccgtgagaagctgcgtggccaagctgttcttcacctgcagcctgaagggccactactgcctgtacagcaagagcagcttcatcctgatcagccaggagccccagccctggatccagatcatgttcctgttccagcagagcctgttccccgagcccctgagcatccagagccacagcgtgcagttcctgagagccctgtgggagaagacccaggccggcggcgcccacagcttcgagaccgccatgatggagagcaccttcccccagcagaaggacctggaccaggtgcagctgcacctggaggaggtgagattcttcgacgtgttcggcttcagcgagaccgccggcgcctggcagtgcttcatgtgcaacaaccccgagaaggccaccgtggtgaaccaggacggccagcccctgatcgagggcaagctgaaggagaagcaggtgagatggaagttcatcaagagatggaagaccagatacttcaccctggccggcaaccagctgctgttccagaagggcaagagcaaggacgaccccgacgactgccccatcgagctgagcaaggtgcagagcgtgaaggccgtggccaagaagagaagagacagaagcctgcccagagccttcgagatcttcaccgacaacaagacctacgtgttcaaggccaaggacgagaagaacgccgaggagtggctgcagtgcatcaacgtggccgtggcccaggccaaggagagagagagcagagaggtgaccacctacctgtag

SEQ ID NO: 215983 - DNA, 2502 bp, Artificial Sequence
  derived and/or modified sequence
atgcaccaactcttcagactcgtactgggtcagaaagatctcagtcgcgccggcgaccttttctcccttgacgattcagagatcgaggacagcctgaccgaggcactggaacagattaaaataattagcagctcgtctgactaccagaccaataataacgatcaagccgtcgtggagatttgtatcacacgaattaccacggcaattagagaaactgaatctatcgaaaagcatgctaaggctctcgttggtttgtgggattcttgtctcgaacataatttgaggccattcggcaaggatgaggacacgccacacgccaagatcgcttccgacatcatgagctgtatcctccagaattataaccggcctcccgttatggcgctggcgatccccattgccgtcaagtttctgcacagagggaataaggaactctgccggaacatgtctaactacctaagcttagcagccatcaccaaggccgatctgctggccgaccacaccgaggttatcgttaaatccatattacagggtaatacaatgcttttacgggtactgccagcggtgtacgaaaagcagccacagccaataaatagacacttgaccgagctcctggcactgatgtcccaactggaacagccggagcaatatcacttgctcaggctgctgcatgtggccgccaagaagaaacagctggaggtcgtgcagaagtgtattccctttctgatcgggcatttgaaggacagcactcacaacgatataattctcaacatcttgattgagatagctgtgtacgagcctgtcgccctgaattcatttctacccatgctcaaggaaatcggcgaacgattcccctatctcaccggacagatggcccggatctatggcgccgtcggacacgttgatgaggagcgtgcacggtcttgccttacctacttggtatctcagctggccaacatggaacatagctttcatcatatcttgctcctagagatcaagagcataacagataccttttccagtatattgggccctcagtctcgtgacatcttcaggatgagcaatagtttcactgccatcgcaaagctacttaccaggcagctagagaacacaaaggccggttccggaaggagaaagatttccactgaaatcgagttccctgaaaaactcgaagagacaaaattgatcgtcactgagaacgaagatcatgagaaactgcaggttaaaatacaggccttcgaggacaaaatcaatgcaggttcaaacactcccggctccattagaagatattcgctgggacaggtctctaaggaggagcgcaaaaacattagatttaaccgatctaaatctttagcctttcatacaatgttaacgaaaggcgtaggctctgatgacggagaagatgagaacaggggagatatccccgccagtatttccctcagtgagatcgatcctctgggacagggcaatgataagctcccgttcaagacagatacggagcgttcccagttgggtgagtcctccgttagttaccctaacataatccatattgactcagaaaatttgagcgagacagttaaagagaatagtcaggaggagacacctgaaactacagccagccccatcgagtaccaggacaaactctacctgcacctaaaaaaaaacctttctaaggtcaaagcttacgccatggagattggaaagaaaattcccgtacctgaccaatgtaccatagaggacacggtgcgtagttgtgtcgcgaaactcttctttacatgtagcttgaaaggccactactgcctgtattccaaaagtagcttcatcctcattagccaggagccacagccttggattcagatcatgttcctcttccagcagagcctgttccctgagcctctgtcaatacagagccacagcgtgcagttcttgagagctttatgggagaaaacccaggctggaggcgcccactccttcgagactgcaatgatggagtcaacatttcctcaacagaaggatctggatcaagttcagctgcacttagaagaggtgagatttttcgatgtgttcggcttttctgaaaccgcgggagcgtggcagtgtttcatgtgtaataaccccgagaaagccacggtcgtcaaccaggacggtcagccattgattgagggcaaattgaaagagaaacaggtacgatggaagtttattaagaggtggaagactcggtattttacccttgccgggaaccagttgttgttccagaaggggaagagcaaggatgaccccgacgactgccccatagaactctcaaaggttcagtccgttaaggctgtggccaagaaacgcagagaccggtcgctgcccagagcgtttgagatttttacggataataaaacgtacgtatttaaggcgaaagacgaaaaaaacgcagaggagtggctacaatgcatcaacgtcgcggtcgcacaagctaaggagcgcgagtcaagagaggtgactacctacctctag

SEQ ID NO: 215984 - DNA, 2502 bp, Artificial Sequence
  derived and/or modified sequence
atgcatcagttattcaggctcgtactcggccagaaggacttgtcgcgggcgggggacctcttcagccttgacgactccgagatcgaagactcactcaccgaagcactggagcagataaagataatctcatcatcttccgattaccagaccaataacaacgaccaggccgtggtggagatctgtatcactaggataaccaccgcgatacgcgaaacagaaagtatcgagaagcacgccaaggctctggtcgggctgtgggattcttgtctggagcacaatctcagaccctttgggaaggatgaggatacacctcacgcgaagatcgcgagcgacataatgtcatgcatcctccagaattacaatagaccgccagtcatggctctcgcaatccctattgccgtgaaatttcttcaccgcgggaataaagagctgtgcagaaacatgagcaactacctcagcctcgctgcgatcaccaaagccgatctgctcgctgatcacacagaggtgattgtgaaatccatccttcaaggaaacaccatgctgttgagagtcctgccagctgtgtatgaaaagcagccacagcctattaatcgtcacctgacagaactcctggcacttatgtctcaactggagcaacccgaacagtaccatctcctgcggcttctgcacgtggcggccaagaaaaaacagctggaagtggtgcagaagtgcatcccttttctgatcggccatctgaaagactcaacccacaatgatatcatccttaacatcctgatcgaaattgccgtgtatgagcctgtggcacttaattcttttctccctatgcttaaagagatcggcgaacgctttccctaccttaccgggcagatggccagaatttatggggccgtggggcacgtcgatgaggagagagccagatcttgcctgacctacctggtgtcccaactcgctaatatggaacactccttccaccacatcctcctgctggaaattaagagtattacggataccttcagtagcattctcggaccccagtcccgcgatatcttccgaatgtcaaattcattcacagctatcgctaagttgctaacacgacaactagagaacaccaaagcgggatctggccgccgcaagataagcacggaaatcgagtttccggagaagctcgaagagaccaagcttattgtaacagaaaatgaagaccatgaaaaattgcaggttaagatccaggcattcgaagacaagatcaatgctgggtccaacactcctggcagtataagacgatactccctgggccaggtttccaaagaagagcgtaaaaatatcagatttaatcggagcaaaagcctggcctttcacacaatgttaacaaagggcgtggggtccgatgatggcgaggacgagaaccgcggagacatccccgcatccattagcttgtccgagatcgatcccctggggcagggaaacgataagctgccattcaaaaccgatacagaaagatcccaattgggtgaatcaagtgtgagttaccctaacatcattcatattgattcggaaaacctctctgagaccgttaaggaaaattcccaggaggagacccctgaaactactgcatctcccattgagtatcaagataaactctatctgcacctgaaaaaaaatctgtccaaagtcaaagcttacgcaatggaaattggcaagaagatcccagtcccagatcagtgcacgatcgaagatactgtacgttcctgcgtagccaaactgtttttcacctgttcccttaagggtcattactgcctctattctaagtcttccttcatactcatttcgcaggagccgcagccatggattcaaattatgttcctatttcagcagtcactctttcccgagcccttgtcaatccaaagtcacagtgtccagtttttacgcgccctgtgggagaagacccaggcggggggcgcccatagctttgaaaccgcaatgatggagtccacttttccacagcagaaggacctcgatcaggtgcagctccacctagaggaagtgcgcttcttcgacgtgtttggcttttcggaaaccgcaggggcgtggcagtgtttcatgtgtaacaatcccgaaaaggcaacggtggttaaccaggacggtcagccgctgatcgaaggaaagctgaaggagaagcaggtgcgatggaaattcatcaaaagatggaaaacaaggtactttacacttgcggggaatcagctgctgttccaaaaaggaaaatccaaagacgacccagatgactgcccgatcgaattgtccaaagtccagagcgtcaaagccgtggctaagaaacgaagagaccgatcgctgccaagggccttcgagatatttacagataataagacgtacgtctttaaggcaaaggatgagaagaacgctgaggagtggctgcaatgcataaatgtcgcagttgcccaagcgaaggaaagagaatcgagggaagtgactacttacctgtag

SEQ ID NO: 215985 - DNA, 2502 bp, Artificial Sequence
  derived and/or modified sequence
atgcaccagctgttccggctggtgctgggccagaaggacctgagcagagctggggacctcttcagcctggatgacagcgagattgaggacagcctgacagaggccctggagcagatcaagatcatcagcagcagcagtgactaccagaccaacaacaatgaccaggccgtggtggagatctgcatcacccgcatcaccacagccatccgggagacagagagcattgagaagcacgccaaggccctggtgggcctgtgggacagctgcctggagcacaacctgcggccctttgggaaggatgaggacacccctcatgccaagatcgccagtgacatcatgagctgcatcctgcagaactacaacagacctcctgtgatggccctggccatccccatcgctgtgaagttcctgcaccggggcaacaaggagctgtgcaggaacatgagcaactacctgagcctggccgccatcaccaaggctgacctgctggccgaccacacagaggtgattgtgaagagcatcctgcagggcaacaccatgctgctgcgggtgctgcctgctgtgtatgagaagcagccccagcccatcaacagacacctgacagagctgctggccctgatgagccagctggagcagcctgagcagtaccacctgctgcggctgctgcacgtggccgccaagaagaagcagctggaggtggtgcagaagtgcatccccttcctgattggccacctgaaggacagcacccacaatgacatcatcctgaacatcctgattgaaattgctgtgtatgagcctgtggccctgaacagcttcctgcccatgctgaaggagattggagagcgcttcccctacctgaccggccagatggcccgcatctacggggctgtgggccacgtggatgaggagcgggcccggagctgcctgacctacctggtgtcccagctggccaacatggagcacagcttccaccacatcctgctgctggagatcaagagcatcacagacaccttcagcagcatcctgggcccccagagccgggacatcttcaggatgagcaacagcttcaccgccatcgccaagctgctgacccggcagctggagaacaccaaggccggcagcggccgcaggaagatcagcacagaaattgagttccctgagaagctggaggagaccaagctgattgtgacagaaaatgaagaccacgagaagctgcaggtgaagatccaggcctttgaggacaagatcaatgccggcagcaacaccccaggcagcatccgccgctacagcctgggccaggtgtccaaggaggagaggaagaacatccgcttcaacagaagcaagagcctggccttccacaccatgctgaccaagggcgtgggcagtgatgatggagaagatgagaacagaggagacatcccagccagcatcagcctgtctgaaattgaccccctgggccagggcaatgacaagctgcccttcaagacagacacagagaggagccagctgggggagagctctgtgtcctaccccaacatcatccacatcgacagcgagaacctgtctgagaccgtgaaggagaacagccaggaggagaccccagagaccacagccagccccatcgagtaccaggacaagctgtacctgcacctgaagaagaacctgagcaaggtgaaggcctatgccatggagatcggcaagaagatccctgtgcctgaccagtgcaccatcgaggacacagtgcgcagctgtgtggccaagctgttcttcacctgcagcctgaagggccactactgcctgtacagcaagagcagcttcatcctgatcagccaggagccccagccctggatccagatcatgttcctgttccagcagagcctcttccctgagcccctgagcatccagagccacagcgtgcagttcctgcgggccctgtgggagaagacccaggccggcggggcccacagctttgaaacagccatgatggagagcaccttcccccagcagaaggacctggaccaggtgcagctgcacctggaggaggtgcgcttctttgatgtgtttggcttcagcgagacagctggggcctggcagtgcttcatgtgcaacaaccctgagaaggccaccgtggtgaaccaggacggccagcccctgattgagggcaagctgaaggagaagcaggtgcgctggaagttcatcaagcgctggaagacccgctacttcaccctggccggcaaccagctgctcttccagaagggcaagagcaaggatgatcctgatgactgccccatcgagctgagcaaggtgcagagcgtgaaggctgtggccaagaagagaagagacaggagcctgccccgggcctttgagatcttcacagacaacaagacctacgtgttcaaggccaaggatgagaagaatgctgaggagtggctgcagtgcatcaacgtggccgtggcccaggccaaggagcgggagagccgggaggtgaccacctacctgtag

SEQ ID NO: 215986 - DNA, 2502 bp, Artificial Sequence
  derived and/or modified sequence
atgcaccagctgttccggctggtgctgggccagaaggacctgagccgagcgggggatctattctctctggatgattctgaaatcgaagactccctcaccgaggctctcgagcaaattaagatcatctcgtccagcagtgattatcaaaccaacaacaacgatcaggccgtagtcgaaatctgcataacacgcatcaccactgccatacgggagaccgaatcaatcgaaaagcacgccaaggccctggtggggctgtgggactcctgtctagaacacaacttgcggccgttcggcaaggatgaggacaccccacatgctaagatagcttcagatatcatgtcttgtatactgcaaaattataatcgacctccagttatggccctggctattcccatcgctgttaagttcttgcacaggggcaataaggagctctgccgcaatatgtccaactacctgtctttagcggccatcaccaaagctgatctactggccgaccacacagaggtcatcgtcaagtcaatcctccagggtaacaccatgctgctgagagtattgcccgctgtctacgaaaaacagcctcaacctattaatagacaccttacggagctcctggctttgatgagtcagcttgagcaacccgagcagtatcacctgctgaggctgttgcacgtggccgcgaagaagaagcagctggaagtggttcaaaagtgtatccccttccttattggtcatctaaaagattccacccataatgatatcatacttaatatccttatcgagattgccgtttacgagcctgtggctctaaactcctttctaccaatgctcaaagaaatcggcgagcgtttcccatacctgacagggcagatggctcggatatacggcgctgttggtcatgtcgatgaggagcgcgcgagatcatgtttgacttatctcgtgagccagctggccaacatggaacattccttccaccatattcttcttctcgaaattaaaagtatcacagacaccttttcatccattcttggaccccagtctcgcgatattttccgtatgtccaacagctttacagccattgcgaagctgttgacccgtcagctcgaaaatactaaagctggatctggccgtcggaaaatctccaccgagatagaatttcctgaaaaattggaggaaacgaaacttatcgtcaccgagaacgaggatcacgaaaagctccaggtgaagattcaggccttcgaagataaaattaacgcaggcagcaacacacctggctctatccggcgatattccttgggccaggtttctaaggaagagagaaagaacatccggtttaacagatctaagagcctagcgtttcatacaatgctgacgaaaggagtgggcagcgacgacggcgaggacgagaaccgaggcgacataccggcaagtatcagcctgtccgaaatcgatcctctgggacagggaaacgataaattaccttttaagacagacactgaacgctcccagttaggcgaaagctctgtgagctaccccaacataatccacattgactcggaaaaccttagcgaaaccgtgaaagagaatagccaggaggagacacccgaaactacagcatccccaatcgagtaccaagacaaattgtacctgcacctaaagaagaatttgtcgaaggttaaagcctatgccatggagatcggaaaaaagattcccgtgccagaccagtgcactatcgaggataccgtgagaagttgcgttgccaagctgttctttacatgttccttaaaggggcactattgtctttatagcaagtcaagctttatcctgatctcccaggagccacaaccctggattcaaatcatgtttctgtttcagcagtctctctttccagaaccactgtccatccagtcccactccgtgcaattcttaagagccctttgggagaagactcaagctggtggagctcattcgttcgaaaccgccatgatggaaagcaccttccctcagcaaaaggacttggaccaggtccagctgcacctggaagaagtacgcttctttgatgtcttcggcttctccgaaaccgctggtgcctggcagtgtttcatgtgcaacaacccggaaaaagccaccgtggtcaaccaggacgggcagccactcatagaaggcaagttaaaagaaaagcaggttcgatggaaattcatcaagcggtggaagacccgctatttcactcttgccggcaaccaactgctgtttcaaaaagggaagtctaaggacgatcctgatgactgtccaatagagctcagcaaagttcaatcggtgaaggcggttgcgaagaagaggagagacagatcactgccccgggccttcgagatttttaccgataataaaacctatgtgttcaaagccaaagatgagaagaacgcagaagaatggctgcagtgcataaatgtggctgtggcacaagccaaagagagagaaagccgggaggtgactacatatctgtag

SEQ ID NO: 215987 - DNA, 2502 bp, Artificial Sequence
  derived and/or modified sequence
atgcaccagctgttccggctggtgctgggccagaaggacctgagccgcgccggagacctcttcagcctcgatgatagtgaaatcgaggacagtctgacagaagcgctggaacagattaagattatctcatccagtagcgattaccagaccaataacaacgaccaggctgtcgtggagatttgcattacgcgaataacaacagccatacgcgagacagagagtattgaaaaacatgctaaggctttggtgggtctctgggactcctgtctagaacataaccttcgccctttcggcaaggacgaggataccccccacgctaaaatcgccagcgatattatgagctgtattttgcaaaattataacaggcctcccgtcatggctctcgcaatccctatcgcagtaaaattcctgcaccgggggaataaggagctgtgcaggaatatgagtaactacctcagtctcgcggccattaccaaggccgacctgctcgccgaccacacagaagtgatcgtgaaaagcattctgcagggcaacacaatgctgctccgcgttctccccgccgtgtacgagaagcaaccacagcctattaaccgccatctgacagagttattggccctgatgtcacaactcgagcaacccgaacaatatcacctgctgcgccttctgcatgtggctgccaagaaaaaacagctcgaggtggtccagaagtgcataccattcttgataggccatcttaaagacagtactcacaacgacataatcctcaacatccttattgaaatcgcggtttacgagcccgtcgcgctgaattccttcctcccgatgctcaaagaaatcggcgagagatttccttacctgaccgggcagatggctcgtatctatggggcagtggggcatgttgatgaagagagggccaggagctgtcttacctatctcgtgtcccagctggcaaacatggaacactcttttcaccacattctgctactggagatcaaaagcatcactgacacttttagcagtattctcggtccccagagccgcgacatctttagaatgagcaactctttcacagcgattgccaaactgctaacccgccagcttgaaaacacaaaggccggttcaggtcggaggaaaattagtacagagatagaattccctgaaaagctggaggagacaaaactgatcgtgactgagaacgaagaccacgaaaagctgcaggtgaaaattcaagcattcgaggataaaattaacgccggctccaatacccctgggtcaatccgacgctactctctcggccaggtctccaaggaagagcggaaaaatatcagatttaaccgctctaagtccctggcctttcatacgatgcttactaagggtgtcgggtcggatgatggcgaggatgaaaatcggggagatataccagcctccatctctctctccgagatcgatcctttgggacagggaaatgataagctcccttttaagacggacacagaacgttcccagctcggagagagcagcgtgtcctatcccaacatcatacatatcgactccgaaaacctctcagaaacagtcaaggaaaattcccaggaggagactccggaaaccacagcctctcctatcgaataccaggataagctgtatcttcacttgaagaagaacttaagcaaggttaaagcctatgccatggaaattggcaaaaagatcccagtacctgatcaatgcacaatcgaggacacagtcagaagttgcgtggcgaagctcttcttcacgtgttccctgaaggggcattactgtctgtattctaagtcaagctttatactgatttcccaggaacctcagccctggattcaaatcatgtttctttttcagcaaagcctgttcccagagccacttagcatccagtcccactctgttcagttccttcgggctctctgggaaaagactcaggccgggggcgcccattccttcgagacggccatgatggagtccacgttcccccaacaaaaggacctggaccaggtacagttacatttggaagaagtccggttctttgacgtcttcggtttcagcgagaccgccggggcctggcaatgcttcatgtgtaataatcctgagaaagccaccgtcgtcaatcaggacggccagcctcttatagaaggaaaactgaaggagaagcaggttcggtggaaatttataaagaggtggaagacccggtacttcacgctggcagggaatcagttgctctttcagaagggaaagagcaaggatgaccccgacgactgccccatagagctgagtaaagtccagtcagtaaaggctgtcgcgaaaaagcggagagatagaagcctaccccgcgcatttgaaatatttacggataataaaacttatgtgttcaaggcaaaggacgagaaaaatgccgaggagtggctgcagtgcatcaatgtcgccgtcgcccaggccaaagagagagagagtcgcgaagtcaccacatacttatag

SEQ ID NO: 215988 - DNA, 2502 bp, Artificial Sequence
  derived and/or modified sequence
atgcatcagctgtttaggctcgttctgggccagaaggatcttagtagagcaggcgaccttttttctctggacgactcggaaattgaggattctctgaccgaagcgttggagcaaattaaaataatcagcagttcttcagattaccagacaaataacaatgaccaggccgtggtcgagatatgtatcaccagaataacaacagctatcagggagaccgagtcaatcgagaaacacgccaaagcccttgtcggactttgggatagctgcctggaacacaacctgaggccctttggaaaagacgaggacacaccacacgccaagattgccagcgacattatgtcctgtatcctgcagaactacaatcggcctccggtcatggccctcgccattcctattgctgttaagttcttgcataggggtaataaagagctgtgtcgaaatatgtcaaactatctttctcttgccgctatcaccaaggccgacctccttgcagaccacactgaagtgatcgtgaagagtatcctgcagggaaatacaatgctcctgcgcgtgctccctgccgtttacgagaagcagccacaacctatcaacagacaccttacagagctgctggcactaatgagccagttggaacagccggagcagtatcatcttctgaggctgttacacgtcgcagctaaaaaaaaacaactcgaagttgtgcagaagtgcattccttttcttataggccacctaaaggatagcacacataatgatattattctgaacatcctcatcgaaatcgccgtgtatgagcccgttgccctgaatagcttcctgcctatgcttaaagagatcggcgagagattcccatatctcacaggacagatggccaggatctacggcgcagtggggcacgtcgatgaggagcgcgcaaggtcatgtctgacttatctagtgagccaactggccaatatggagcactcattccatcacattctgctgctagaaatcaagagcatcacagatacattcagttccattctggggccacagagcagggacatcttccgaatgagtaattcctttaccgcgatcgccaaattgttgaccagacaactcgaaaataccaaggctgggtcaggcagacggaaaatcagcactgaaattgagttccctgagaagctggaagaaaccaaactgatagtcaccgagaacgaggaccacgaaaaactccaagttaagatccaggccttcgaggacaaaatcaacgcaggcagcaatactccaggctctatccggcgatactccctcgggcaggtgtcaaaagaagagagaaagaacattaggtttaacaggagcaaatctttggcatttcacaccatgttaacaaagggcgtcggttccgatgatggagaggatgagaaccgcggagatatcccggcttcgataagcttgtccgaaattgacccattaggacaggggaatgacaagctgcctttcaagactgacacagaacggagccaactgggcgaaagttcggtttcctaccccaacatcatccatatcgactccgaaaatttgagcgaaacagttaaggagaattcacaagaggagactcccgagaccactgccagcccaatcgagtaccaagacaagttgtatcttcacctcaagaagaacttatcgaaagtgaaagcatacgcgatggagattggcaagaaaatacccgtgcccgatcagtgcacaatcgaagacactgttcgtagctgtgtagcaaagctgttcttcacgtgctccctgaagggacactattgtctctactctaagtctagcttcatcttaataagccaagagccccagccgtggatacagattatgtttctcttccaacagtctttatttcccgaacccctgtccatccagtcccattccgtccaattcctgcgggctctatgggagaagacacaggccggaggggctcacagctttgagactgcaatgatggagtcaacattccctcaacaaaaagatctcgatcaagtccagttgcacctggaggaggtgcgtttcttcgatgtcttcgggttctctgagaccgccggagcctggcagtgctttatgtgcaacaatcccgaaaaggccaccgtcgtgaatcaggatggccagccgcttatcgaagggaagttgaaagagaagcaggtgcgatggaaatttatcaaacggtggaaaacgcgttacttcaccctggctggtaaccagctgctttttcagaagggaaagtccaaggatgaccccgacgactgccccatagagctgtccaaagttcagtccgtgaaggctgtggcgaagaagcggagagacaggtctctcccacgggcttttgagatctttactgacaacaaaacatacgtgttcaaggcgaaagatgagaaaaatgcggaggaatggctgcagtgcatcaacgtggcagtggcacaggcaaaggagagggagtccagggaggtaaccacatacttgtag

SEQ ID NO: 215989 - DNA, 2502 bp, Artificial Sequence
  derived and/or modified sequence
atgcatcaactttttcggctggtgctaggacagaaagacttatcccgcgctggcgacctgttcagtctagacgactcggagattgaggattcgctgaccgaggcgctcgaacaaataaagataatttcgagctcatccgactaccagacaaacaataatgatcaggctgttgtggaaatctgcatcactcgaatcacaactgccatcagggagacggagagcattgaaaaacatgccaaagcgctcgtcggcctatgggacagttgtcttgagcacaacttgcgtccattcggcaaggacgaagatactcctcatgccaaaattgcgagtgatatcatgtcgtgcattttgcaaaactacaaccgacctcctgtcatggccttagcaatccccattgcggtaaaattcttacacagaggaaacaaggagctgtgtcgcaatatgtctaactacctcagccttgctgctattactaaggctgatctattggcggaccatacagaagttatcgtgaaatccatcctccaggggaacacaatgctcttacgtgtgttgcctgctgtctacgaaaaacagcctcagccgattaaccggcacctgacggaactgttggccctgatgagccaactggagcagccggaacagtatcatctactaaggctgctccatgtcgctgcaaagaagaaacagttggaagtggtccagaaatgcatacccttcctgatcgggcacctgaaggattctacccataatgacatcatcctcaatatcctgatcgaaatcgctgtctatgagcccgtcgcccttaacagctttttaccgatgctgaaagaaatcggagagaggttcccctatctgaccggccagatggccaggatctacggggcagtgggccacgtagacgaggagcgggctcgtagctgtctgacgtacttggtcagccagctcgctaacatggagcatagcttccaccatattctgctgcttgaaataaaaagcattacagacactttctcctccatcttgggcccacagagcagggatatattcagaatgtcgaactcattcacagccattgccaaactactgacccgccagttggaaaacaccaaggcagggagtggacggaggaaaatctccaccgagattgaattcccggaaaagttagaagagaccaagctgatcgtgaccgaaaatgaggatcacgagaaactgcaggtgaaaattcaggcttttgaggataagattaatgccggttccaatacaccaggtagtattaggagatatagcctcgggcaagtgagcaaagaggagaggaaaaatattagattcaaccggtcaaaatctctggcatttcacaccatgctgaccaaaggggttggctccgacgatggcgaggatgagaaccggggagacattccagccagcatctccctgagcgagattgaccctctgggccaggggaacgataagctccccttcaaaacggataccgagaggtctcagctcggcgaaagctccgtgtcctaccctaatatcatccacattgactcagagaacctatccgaaaccgtcaaagaaaattcacaggaagaaactcctgagacgactgcatcaccgattgaatatcaggacaaattatatctacacttgaagaagaacttgtctaaagtcaaggcatacgctatggaaattggcaaaaaaattccagttcctgatcagtgtacaattgaggatacggtgaggagctgtgttgccaagctcttctttacctgcagtctgaaaggacactattgcctgtattctaaaagcagctttatcctcatctctcaggaacctcaaccatggatacagattatgtttcttttccagcagtccctgtttcctgaaccactcagcatacagtctcacagcgtacaattcctacgggctctgtgggagaaaacacaagcgggtggcgcacactccttcgaaaccgctatgatggaatctactttcccacagcagaaagatctggatcaggtgcaattacatctggaggaggtgaggttctttgatgttttcggttttagcgaaacagcaggcgcttggcagtgttttatgtgcaacaacccagaaaaagctaccgtggttaatcaagatggtcagcccttgattgagggcaagctcaaggagaaacaggttcgctggaaattcatcaagaggtggaagactagatatttcacactggccggaaaccagttgctgttccagaaaggcaaaagtaaggatgatcccgacgattgccctattgagctgtcgaaagtgcagagcgttaaagcagtggctaagaaacggagggataggtcccttcccagggcttttgaaatcttcactgacaataagacctatgtctttaaagctaaagacgagaagaacgcggaagagtggctgcagtgtatcaatgtggctgttgcccaagctaaggagcgcgagtcaagggaagttaccacgtacctgtag

SEQ ID NO: 215990 - DNA, 4202 bp, Artificial Sequence
  derived and/or modified sequence
ggcagctcagggagacgcggctgcagcccacaggactgggcagcagctgcaaggctgcctctgagcatggtcatgggtcccagctgcagtgctctaaagatcaaggattttgccttctattttctatgaccagagattcctgtgcaaagagagagtgtcaatgaagacctcaaagtctggagaaaaatgacctttcatggaataagaagtatacctccttctacatgtttttgtcttactgacctctgataactggaacacatgactctgggtctgtagaaagtcaactgatcaaactcatcctcaccatgcatcaactgttcagactggttttgggacaaaaagatctttcacgagctggggacctcttctccttagatgactctgagattgaagacagccttacagaagctttggagcaaattaagataattagctcatcttcagattaccaaaccaataacaatgaccaggcagtagttgaaatctgtatcacaagaatcacaacagccatcagagagaccgagtccattgaaaagcatgcaaaggcccttgtggggctctgggactcctgcttggaacataacctgagaccctttgggaaagacgaagacactcctcatgcaaaaatcgcatctgatatcatgagttgcattttacagaattacaaccgacccccagtgatggcattagccatccccattgcagtgaaattcctccacagaggcaacaaggaactgtgcaggaatatgtctaactacctgtctctggctgcaattaccaaggcagatctcctggctgatcacacggaagttatagtaaagagcatactccaaggtaacaccatgttgttgagagtgttacctgctgtgtatgaaaagcagcctcagccaattaatagacacctgacagaactcctggccttgatgtctcagctggaacagccagaacagtaccatctactacggcttttgcatgtagcagcaaagaaaaaacaactcgaggtagttcagaagtgtattcctttcctaattgggcatttgaaggattcaacccataatgacatcatcctaaacatcctcatagagatagcagtctatgagccagtggctttgaacagttttcttccaatgctgaaagagattggtgagagattcccctacctcactggacagatggcaaggatttatggagctgttgggcatgtggatgaagagagagccaggagctgcctgacatacctggtgagccaactggccaacatggagcattcgtttcaccatattctcctgctggagattaaaagcatcaccgacaccttctcctcaatcttgggccctcagagcagagacatcttccgcatgagcaacagcttcaccgccattgctaaactccttacccgacaactggaaaataccaaggctggaagtggcaggagaaaaatcagcactgaaattgaattccctgagaaactggaagaaaccaagctcatagtaactgaaaatgaagaccatgaaaaactccaagttaaaatccaggcttttgaagacaagataaatgcagggagcaatacccctggctctatcagaagatatagtctgggccaagtttctaaagaagaaagaaaaaacattagatttaacaggtcaaaaagtttggctttccacactatgctcacaaagggtgtgggttcagatgacggcgaagatgaaaacaggggagacataccagccagcatctctctttcagaaatagacccacttggccaaggaaatgacaagctgccgtttaagacagacactgagagatcacagctgggggagtcttcagtttcatacccaaatattatacatatagactcagagaatttgtcagaaactgttaaagaaaactcccaggaagaaactccagagacaactgcaagtcctatagaataccaagataagctctacttgcacttaaaaaaaaacctcagcaaagtgaaagcatatgccatggaaattggaaagaagattccagtccctgatcagtgtaccattgaagacactgtgagaagttgtgtagcaaagttgttcttcacctgctccctgaagggtcattactgcctatacagtaagtccagttttattctcatcagccaagaacctcagccatggatccagatcatgtttctatttcagcagagcctgtttcctgaacccctgtccattcagagtcattctgtgcaattcctcagagctctgtgggagaagacccaggcagggggtgctcacagctttgaaactgccatgatggagtccacgtttccacagcagaaggatctggaccaggtacagctccatctggaagaagtgaggttctttgacgtgtttggcttcagtgaaacagcaggagcatggcaatgcttcatgtgcaacaatcctgagaaagcaactgttgtaaatcaagatggccagcctctcatagaaggaaaacttaaagagaagcaagtcagatggaagttcatcaaaaggtggaaaacacgctattttacactggctggaaatcaacttctgtttcaaaaaggaaagtctaaagatgaccctgacgactgcccaatagaactcagcaaagtacagagtgtgaaggctgtggccaagaaacgcagggaccgctctctcccccgggctttcgaaatcttcacagacaataaaacctatgtctttaaggccaaggatgagaagaatgcagaagaatggctccagtgcatcaacgtggcagttgcccaagccaaagaaagggaaagtagagaagtaaccacatatctgtagggatttataagtcagccatgacaattatacaccacaggcattgtattatcattgccaatgtcaagaaaaagagctaaatttaccaagccatgttgttttttactaaataccaatggaattgttgtcctttaagaagaagggcctaaaatggcaggattcttagtaaatgtcatactctaacagctttagtattgacttcagaatatatctgatgcccacaaaaataaaataaaataaaaggagctacagagtatgccctcagatagtgtggggccaggaagggaaaagtcactgataaaagaacttctgtagatatgtcatttaaaactgtgagaaaacaacatgaaaagatgcctgaactctccatcctgaggaaagattagcacttctgatgaaaatcacagtctgtcaaaggtattaaaagaaaactttaaaaaaaaaaacctttagaaacgttgaactaatgtacactgagaaaaaccatataacttacttatagacatataattacatgatcctctcttactacaactgaggctaacacatggtaaaatggttcccaaatcaagccagttatgtcattaaatacttgtctttcagaattacttatttaattattccatttaagttcatataatataatctacagtttagatacttggacatatatcctgcccaaggcactaagtgtaatataggaaaaggatagaaagccattttctctatcttcaaaataatgtgccatctccgttaaaattaagactttaaagttctataattttttctttgtattcaactttttaatacctccaaattacaaacatctatttttttcactacatagatatataattacactatgatagacagaattctagagtgattctcaataatccatgccttggtataatcctctcccccattgagtgtgggtgggacatgtaacctgcttctaaccaacagaatatggcaaaagtgatgggatcatctctcccatattatgttatgttatataacaaaagtgaagagaagttgcagatatacataaggtttctaatcagctgactttgagttaatcaaagagatcccctgggtgggcctgacctaatcagactagtcctttaaaagagagtgaaccagtcagagactctctctcctattagccttaaataagcaagctgccatgagctctacggctgcaaggaaataagttttgtgaacaaccatgtgatcttggaagaagcatctgaacctcagataaaagcccagccccagccaacgccttgcttgcagctttgtgaaactctgagcagaggacccagctaaatcacgtttggactcctgacccacagaaactttcagataataaatgtatgctgttttaaatctaaa

SEQ ID NO: 215991 - DNA, 3044 bp, Artificial Sequence
  derived and/or modified sequence
attcttccacccggcaccggctccgcaatgaacaacttcaggttcactgagctgagcggattccactcgctgtgccctcggagcctgcctgaatctcccgcccagtctcaaaccatgcagctgagtaactgcaagggcgcctttgaggagtagcacgcagagagtgtcaatgaagacctcaaagtctggagaaaaatgacctttcatggaataagaagtatacctccttctacatgtttttgtcttactgacctctgataactggaacacatgactctgggtctgtagaaagtcaactgatcaaactcatcctcaccatgcatcaactgttcagactggttttgggacaaaaagatctttcacgagctggggacctcttctccttagatgactctgagattgaagacagccttacagaagctttggagcaaattaagataattagctcatcttcagattaccaaaccaataacaatgaccaggcagtagttgaaatctgtatcacaagaatcacaacagccatcagagagaccgagtccattgaaaagcatgcaaaggcccttgtggggctctgggactcctgcttggaacataacctgagaccctttgggaaagacgaagacactcctcatgcaaaaatcgcatctgatatcatgagttgcattttacagaattacaaccgacccccagtgatggcattagccatccccattgcagtgaaattcctccacagaggcaacaaggaactgtgcaggaatatgtctaactacctgtctctggctgcaattaccaaggcagatctcctggctgatcacacggaagttatagtaaagagcatactccaaggtaacaccatgttgttgagagtgttacctgctgtgtatgaaaagcagcctcagccaattaatagacacctgacagaactcctggccttgatgtctcagctggaacagccagaacagtaccatctactacggcttttgcatgtagcagcaaagaaaaaacaactcgaggtagttcagaagtgtattcctttcctaattgggcatttgaaggattcaacccataatgacatcatcctaaacatcctcatagagatagcagtctatgagccagtggctttgaacagttttcttccaatgctgaaagagattggtgagagattcccctacctcactggacagatggcaaggatttatggagctgttgggcatgtggatgaagagagagccaggagctgcctgacatacctggtgagccaactggccaacatggagcattcgtttcaccatattctcctgctggagattaaaagcatcaccgacaccttctcctcaatcttgggccctcagagcagagacatcttccgcatgagcaacagcttcaccgccattgctaaactccttacccgacaactggaaaataccaaggctggaagtggcaggagaaaaatcagcactgaaattgaattccctgagaaactggaagaaaccaagctcatagtaactgaaaatgaagaccatgaaaaactccaagttaaaatccaggcttttgaagacaagataaatgcagggagcaatacccctggctctatcagaagatatagtctgggccaagtttctaaagaagaaagaaaaaacattagatttaacaggtcaaaaagtttggctttccacactatgctcacaaagggtgtgggttcagatgacggcgaagatgaaaacaggggagacataccagccagcatctctctttcagaaatagacccacttggccaaggaaatgacaagctgccgtttaagacagacactgagagatcacagctgggggagtcttcagtttcatacccaaatattatacatatagactcagagaatttgtcagaaactgttaaagaaaactcccaggaagaaactccagagacaactgcaagtcctatagaataccaagataagctctacttgcacttaaaaaaaaacctcagcaaagtgaaagcatatgccatggaaattggaaagaagattccagtccctgatcagtgtaccattgaagacactgtgagaagttgtgtagcaaagttgttcttcacctgctccctgaagggtcattactgcctatacagtaagtccagttttattctcatcagccaagaacctcagccatggatccagatcatgtttctatttcagcagagcctgtttcctgaacccctgtccattcagagtcattctgtgcaattcctcagagctctgtgggagaagacccaggcagggggtgctcacagctttgaaactgccatgatggagtccacgtttccacagcagaaggatctggaccaggtacagctccatctggaagaagtgaggttctttgacgtgtttggcttcagtgaaacagcaggagcatggcaatgcttcatgtgcaacaatcctgagaaagcaactgttgtaaatcaagatggccagcctctcatagaaggaaaacttaaagagaagcaagtcagatggaagttcatcaaaaggtggaaaacacgctattttacactggctggaaatcaacttctgtttcaaaaaggaaagtctaaagatgaccctgacgactgcccaatagaactcagcaaagtacagagtgtgaaggctgtggccaagaaacgcagggaccgctctctcccccgggctttcgaaatcttcacagacaataaaacctatgtctttaaggccaaggatgagaagaatgcagaagaatggctccagtgcatcaacgtggcagttgcccaagccaaagaaagggaaagtagagaagtaaccacatatctgtagggatttataagtcagccatgacaattatacaccacaggcattgtattatcattgccaatgtcaagaaaaagagctaaatttaccaagccatgttgttttttactaaataccaatggaattgttgtcctttaagaagaagggcctaaaatggcaggattcttagtaaatgtcatactctaacagctttagtattgacttcagaatatatctgatgcccacaaaaat

SEQ ID NO: 215992 - DNA, 2100 bp, Artificial Sequence
  derived and/or modified sequence
atggccgaccccgaggtgtgctgcttcatcaccaagatcctgtgcgcccacggcggcagaatggccctggacgccctgctgcaggagatcgccctgagcgagccccagctgtgcgaggtgctgcaggtggccggccccgacagattcgtggtgctggagaccggcggcgaggccggcatcaccagaagcgtggtggccaccaccagagccagagtgtgcagaagaaagtactgccagagaccctgcgacaacctgcacctgtgcaagctgaacctgctgggcagatgcaactacagccagagcgagagaaacctgtgcaagtacagccacgaggtgctgagcgaggagaacttcaaggtgctgaagaaccacgagctgagcggcctgaacaaggaggagctggccgtgctgctgctgcagagcgaccccttcttcatgcccgagatctgcaagagctacaagggcgagggcagacagcagatctgcaaccagcagcccccctgcagcagactgcacatctgcgaccacttcaccagaggcaactgcagattccccaactgcctgagaagccacaacctgatggacagaaaggtgctggccatcatgagagagcacggcctgaaccccgacgtggtgcagaacatccaggacatctgcaacagcaagcacatgcagaagaacccccccggccccagagcccccagcagccacagaagaaacatggcctacagagccagaagcaagagcagagacagattcttccagggcagccaggagttcctggccagcgccagcgccagcgccgagagaagctgcacccccagccccgaccagatcagccacagagccagcctggaggacgcccccgtggacgacctgaccagaaagttcacctacctgggcagccaggacagagccagaccccccagcggcagcagcaaggccaccgacctgggcggcaccagccaggccggcaccagccagagattcctggagaacggcagccaggaggacctgctgcacggcaaccccggcagcacctacctggccagcaacagcaccagcgcccccaactggaagagcctgaccagctggaccaacgaccagggcgccagaagaaagaccgtgttcagccccaccctgcccgccgccagaagcagcctgggcagcctgcagacccccgaggccgtgaccaccagaaagggcaccggcctgctgagcagcgactacagaatcatcaacggcaagagcggcacccaggacatccagcccggccccctgttcaacaacaacgccgacggcgtggccaccgacatcaccagcaccagaagcctgaactacaagagcaccagcagcggccacagagagatcagcagccccagaatccaggacgccggccccgccagcagagacgtgcaggccaccggcagaatcgccgacgacgccgaccccagagtggccctggtgaacgacagcctgagcgacgtgaccagcaccaccagcagcagagtggacgaccacgacagcgaggagatctgcctggaccacctgtgcaagggctgccccctgaacggcagctgcagcaaggtgcacttccacctgccctacagatggcagatgctgatcggcaagacctggaccgacttcgagcacatggagaccatcgagaagggctactgcaaccccggcatccacctgtgcagcgtgggcagctacaccatcaacttcagagtgatgagctgcgacagcttccccatcagaagactgagcacccccagcagcgtgaccaagcccgccaacagcgtgttcaccaccaagtggatctggtactggaagaacgagagcggcacctggatccagtacggcgaggagaaggacaagagaaagaacagcaacgtggacagcagctacctggagagcctgtaccagagctgccccagaggcgtggtgcccttccaggccggcagcagaaactacgagctgagcttccagggcatgatccagaccaacatcgccagcaagacccagaaggacgtgatcagaagacccaccttcgtgccccagtggtacgtgcagcagatgaagagaggccccgagtag

SEQ ID NO: 215993 - DNA, 1521 bp, Artificial Sequence
  derived and/or modified sequence
atggcctacagagccagaagcaagagcagagacagattcttccagggcagccaggagttcctggccagcgccagcgccagcgccgagagaagctgcacccccagccccgaccagatcagccacagagccagcctggaggacgcccccgtggacgacctgaccagaaagttcacctacctgggcagccaggacagagccagaccccccagcggcagcagcaaggccaccgacctgggcggcaccagccaggccggcaccagccagagattcctggagaacggcagccaggaggacctgctgcacggcaaccccggcagcacctacctggccagcaacagcaccagcgcccccaactggaagagcctgaccagctggaccaacgaccagggcgccagaagaaagaccgtgttcagccccaccctgcccgccgccagaagcagcctgggcagcctgcagacccccgaggccgtgaccaccagaaagggcaccggcctgctgagcagcgactacagaatcatcaacggcaagagcggcacccaggacatccagcccggccccctgttcaacaacaacgccgacggcgtggccaccgacatcaccagcaccagaagcctgaactacaagagcaccagcagcggccacagagagatcagcagccccagaatccaggacgccggccccgccagcagagacgtgcaggccaccggcagaatcgccgacgacgccgaccccagagtggccctggtgaacgacagcctgagcgacgtgaccagcaccaccagcagcagagtggacgaccacgacagcgaggagatctgcctggaccacctgtgcaagggctgccccctgaacggcagctgcagcaaggtgcacttccacctgccctacagatggcagatgctgatcggcaagacctggaccgacttcgagcacatggagaccatcgagaagggctactgcaaccccggcatccacctgtgcagcgtgggcagctacaccatcaacttcagagtgatgagctgcgacagcttccccatcagaagactgagcacccccagcagcgtgaccaagcccgccaacagcgtgttcaccaccaagtggatctggtactggaagaacgagagcggcacctggatccagtacggcgaggagaaggacaagagaaagaacagcaacgtggacagcagctacctggagagcctgtaccagagctgccccagaggcgtggtgcccttccaggccggcagcagaaactacgagctgagcttccagggcatgatccagaccaacatcgccagcaagacccagaaggacgtgatcagaagacccaccttcgtgccccagtggtacgtgcaggaggagagagccagagtgagcgtgctgaagcagctgttcgccgacagatgcctgagatgcagctgccccggcctgatcaagagcctggtgaacctggagcccgtgttcctgaagagcagctgcctgcactacagcgccgtgagcatctgcatcatcgacgagtag

SEQ ID NO: 215994 - DNA, 2100 bp, Artificial Sequence
  derived and/or modified sequence
atggcggaccccgaagtgtgttgttttataacaaaaatcctttgcgcccacggcggccggatggctcttgacgcccttctccaagaaatagcactgtctgagccgcagctatgtgaggtgctccaggtggcgggtcctgatcgtttcgtcgtgctggaaaccggtggtgaggctggtatcacccgcagtgtcgtggcaacgaccagggcccgggtttgcaggaggaaatactgccagagaccatgtgataaccttcacctttgtaaactgaacctcttgggaaggtgcaactactcccagagtgagcgcaacctgtgcaaatatagccacgaggtgctgtcagaggagaattttaaagtgctgaagaaccatgagctgagtggactcaataaggaagaactagctgtgctgctgttgcaaagcgaccccttctttatgcccgagatctgcaaaagctacaaaggcgaaggtaggcagcagatctgtaatcagcagcctccgtgttcccgtttgcacatatgtgaccatttcaccagagggaattgccgtttccccaactgtttgcgctcccataacctgatggataggaaagtgctcgcgatcatgcgagaacacggcctgaatcctgatgtcgttcagaatattcaggatatctgcaattcaaaacatatgcagaagaatccgcccggcccaagggccccttcctcacaccgccggaacatggcataccgcgctcggagtaagagccgggacaggttctttcagggctcacaagagttccttgcctcggcgtcagccagcgctgagaggtcttgcacaccctctccagaccagatcagccaccgggcaagcctggaagatgctcccgtggatgacctgaccaggaaattcacttacctaggttctcaggacagagctcggcccccctccggttccagcaaagccaccgacctgggcggtacaagccaagcggggacgagccagaggtttcttgaaaatggtagtcaggaggatctgctacatggaaatcctgggagcacttaccttgcctcaaactcgaccagcgctcccaactggaagagtctaacttcttggacgaacgatcaaggagctcgccgaaaaacagtgtttagccctaccttgcccgctgcaaggagttctctgggttcgctgcaaacgcctgaggcggtgacgactcgaaagggtactgggttattgtcctctgattacaggatcattaacgggaagtccggcacccaggatattcagcccggccccctttttaacaataatgccgatggagtagccaccgacataacctcaacaaggtccctcaattacaaatctacgtccagcgggcacagggagattagctcacccaggattcaggatgctggaccagcctctagagacgtccaagctaccgggagaatagcagacgacgcagatcctagagtcgccttagtaaacgattctctcagcgacgttaccagtacaaccagttccagagttgacgaccacgacagtgaagaaatttgccttgatcatttatgcaaaggctgcccactgaatggctcttgtagtaaggtgcattttcacctgccttacagatggcaaatgctgattggaaagacatggaccgatttcgagcacatggagaccatcgaaaaaggatactgtaatccgggcattcatttgtgctctgtgggatcgtacactatcaatttcagggtgatgagttgtgactcattcccgatcagacgcctgtcaacaccttccagcgtcaccaaacccgcaaattccgtatttacaacaaaatggatttggtattggaaaaacgagtctgggacttggattcagtacggagaagagaaagacaaacgaaaaaatagcaatgtggactcctcatacttggagtcactttatcagtcttgcccaaggggagtcgtgccctttcaggctggaagcagaaattacgagttatcatttcaagggatgattcagacaaatatcgcgagtaagacacaaaaggacgtgattagaagacctactttcgtcccgcagtggtatgtgcagcagatgaagcgcggccctgagtag

SEQ ID NO: 215995 - DNA, 1521 bp, Artificial Sequence
  derived and/or modified sequence
atggcctatagggctcgctccaagagtagagaccgcttctttcaaggctcccaggagtttctagcctcagcaagcgcctccgctgagcggagctgcaccccctcacctgatcagatcagtcaccgcgccagtcttgaggacgcgcccgttgacgacttaactcgtaagtttacttatctcggatcccaggacagagcaaggcctccttctggcagctctaaagcaactgacttggggggcacatcgcaggcaggaacaagccagaggtttctggagaacggcagccaggaagacctgctgcacggtaatcccggatcaacatatcttgcatcaaacagtaccagcgcccccaactggaagtctttaacttcttggaccaacgaccagggcgcccgcagaaagaccgttttctcccccacgctgcctgcagccaggtcttccctgggaagtctgcagacaccagaagccgtgacgacaaggaagggtaccgggctccttagctccgactatagaataatcaacgggaaaagtggtactcaggacatacagcccgggcctctgtttaacaacaacgcggatggagttgcgaccgacatcacctccacccgatctcttaactacaaatccacatcttcaggacaccgcgagatttcctctccccgtattcaggacgctggtcccgctagtcgggatgtgcaagcaactggaagaatcgccgacgatgctgaccccagagtggccttagtcaacgactctcttagcgacgtgacgagcaccacttcatcacgggtggatgaccatgactccgaggaaatctgcctagaccacctgtgtaagggatgcccactgaatggctcttgttccaaggttcacttccaccttccttaccggtggcagatgctgattggcaagacgtggaccgacttcgaacacatggagacaatcgagaaggggtactgcaacccagggatccacttatgtagtgttggcagctacaccatcaactttcgcgtgatgagctgtgacagctttcccattagaaggctgtcaacaccaagcagcgtcacgaagcctgccaactcggtgtttactactaagtggatttggtactggaagaatgaatctggaacatggattcaatacggcgaagagaaggacaaacggaagaattcaaacgttgacagctcctatctcgaatctctctaccaatcatgtcctcgcggcgtggtccccttccaggcaggctcccgcaattacgagctcagcttccagggtatgatccagacaaacattgcaagtaaaacccagaaggatgtgatccgacggcccacctttgttccacagtggtacgtgcaggaggagagggcgcgcgtgtctgtgcttaagcaactgtttgcagatagatgcctacgctgcagctgtccaggccttataaaatcccttgtcaatctagagcctgtttttcttaagagtagctgtctgcactattccgcagtctccatatgtattatcgacgaatag

SEQ ID NO: 215996 - DNA, 2100 bp, Artificial Sequence
  derived and/or modified sequence
atggctgaccctgaggtgtgctgcttcatcaccaagatcctgtgtgcccatggaggccgcatggccctggatgccctgctgcaggagatcgccctgtctgagccccagctgtgtgaggtgctgcaggtggccggccctgacagatttgtggtgctggagaccggcggggaggccggcatcaccaggtctgtggtggccaccacccgggcccgggtgtgcaggaggaagtactgccagaggccctgtgacaacctgcacctgtgcaagctgaacctgctgggccgctgcaactacagccagagcgagaggaacctgtgcaagtacagccatgaggtgctgtctgaggagaacttcaaggtgctgaagaaccacgagctgagcggcctgaacaaggaggagctggccgtgctgctgctgcagagcgaccccttcttcatgcctgagatctgcaagagctacaagggggagggccggcagcagatctgcaaccagcagcccccctgcagccggctgcacatctgtgaccacttcacccggggcaactgccgcttccccaactgcctgcggagccacaacctgatggacaggaaggtgctggccatcatgagggagcacggcctgaacccagatgtggtgcagaacatccaggacatctgcaacagcaagcacatgcagaagaaccccccaggcccccgggcccccagcagccacagaagaaacatggcctaccgggcccggagcaagagccgggaccgcttcttccagggcagccaggagttcctggccagcgccagcgccagcgctgagaggagctgcacccccagcccagaccagatcagccaccgggccagcctggaggatgcccctgtggatgacctgaccaggaagttcacctacctgggcagccaggaccgggcccggccccccagcggcagcagcaaggccacagacctgggcggcaccagccaggccggcaccagccagcgcttcctggagaatggcagccaggaggacctgctgcacggcaaccctggcagcacctacctggccagcaacagcaccagcgcccccaactggaagagcctgacctcctggaccaatgaccagggcgcccggaggaagacagtgttcagccccaccctgcctgctgcccggagcagcctgggcagcctgcagaccccagaggccgtgaccaccaggaaaggaacaggcctgctgagcagtgactaccgcatcatcaacgggaagagcggcacccaggacatccagcccggccccctcttcaacaacaatgctgatggagtggccacagacatcaccagcaccaggagcctgaactacaagagcaccagcagcggccaccgggagatcagcagcccccgcatccaggatgctggccctgccagcagagatgtgcaggccaccggcagaattgctgatgatgctgacccccgggtggccctggtgaatgacagcctgagtgatgtgaccagcaccaccagcagccgggtggatgaccatgattctgaggagatctgcctggaccacctgtgcaagggctgccccctgaatggcagctgcagcaaggtgcacttccacctgccctaccgctggcagatgctgattggcaagacctggacagactttgagcacatggagaccatcgagaagggctactgcaaccctggcatccacctgtgcagcgtgggcagctacaccatcaacttccgggtgatgagctgtgacagcttccccatccggcggctgagcacccccagctctgtgaccaagccagccaacagcgtcttcaccaccaagtggatctggtactggaagaatgaaagtggcacctggatccagtatggagaggagaaggacaagaggaagaacagcaatgtggacagcagctacctggagagcctgtaccagagctgcccccggggcgtggtgcccttccaggccggcagcagaaattatgagctgtccttccagggcatgatccagaccaacatcgccagcaagacccagaaggatgtgatcagaagacccacctttgtgccccagtggtacgtgcagcagatgaagaggggccctgagtag

SEQ ID NO: 215997 - DNA, 1521 bp, Artificial Sequence
  derived and/or modified sequence
atggcctaccgggcccggagcaagagccgggaccgcttcttccagggcagccaggagttcctggccagcgccagcgccagcgctgagaggagctgcacccccagcccagaccagatcagccaccgggccagcctggaggatgcccctgtggatgacctgaccaggaagttcacctacctgggcagccaggaccgggcccggccccccagcggcagcagcaaggccacagacctgggcggcaccagccaggccggcaccagccagcgcttcctggagaatggcagccaggaggacctgctgcacggcaaccctggcagcacctacctggccagcaacagcaccagcgcccccaactggaagagcctgacctcctggaccaatgaccagggcgcccggaggaagacagtgttcagccccaccctgcctgctgcccggagcagcctgggcagcctgcagaccccagaggccgtgaccaccaggaaaggaacaggcctgctgagcagtgactaccgcatcatcaacgggaagagcggcacccaggacatccagcccggccccctcttcaacaacaatgctgatggagtggccacagacatcaccagcaccaggagcctgaactacaagagcaccagcagcggccaccgggagatcagcagcccccgcatccaggatgctggccctgccagcagagatgtgcaggccaccggcagaattgctgatgatgctgacccccgggtggccctggtgaatgacagcctgagtgatgtgaccagcaccaccagcagccgggtggatgaccatgattctgaggagatctgcctggaccacctgtgcaagggctgccccctgaatggcagctgcagcaaggtgcacttccacctgccctaccgctggcagatgctgattggcaagacctggacagactttgagcacatggagaccatcgagaagggctactgcaaccctggcatccacctgtgcagcgtgggcagctacaccatcaacttccgggtgatgagctgtgacagcttccccatccggcggctgagcacccccagctctgtgaccaagccagccaacagcgtcttcaccaccaagtggatctggtactggaagaatgaaagtggcacctggatccagtatggagaggagaaggacaagaggaagaacagcaatgtggacagcagctacctggagagcctgtaccagagctgcccccggggcgtggtgcccttccaggccggcagcagaaattatgagctgtccttccagggcatgatccagaccaacatcgccagcaagacccagaaggatgtgatcagaagacccacctttgtgccccagtggtacgtgcaggaggagcgggcccgggtgtctgtgctgaagcagctgtttgctgaccgctgcctgcgctgcagctgccccggcctcatcaagagcctggtgaacctggagcccgtcttcctgaagagcagctgcctgcactacagcgctgtgtccatctgcatcattgatgaatag

SEQ ID NO: 215998 - DNA, 2100 bp, Artificial Sequence
  derived and/or modified sequence
atggccgaccccgaggtgtgctgcttcatcaccaagatcctgtgcgctcacggcggccggatggcgctcgacgccctgctgcaggaaatagccctctccgagccgcagttgtgtgaagtcttgcaggtggccgggcccgaccggttcgtcgtcctcgagactggaggtgaagccggcatcaccagatctgtagttgccaccactcgggctcgggtttgtagaagaaagtactgccagcgcccctgtgacaacctgcatctgtgtaaactgaacctgctgggtcgttgtaactatagccaatccgaacgtaatttgtgtaaatattcccacgaggtgctgtcagaggagaattttaaggtgctcaagaaccacgagttaagtgggctgaataaagaggagctcgccgtgttattacttcagagtgacccttttttcatgcccgagatctgcaagtcctataaaggtgagggccgtcagcaaatctgcaaccagcagccaccctgtagcagattacatatatgcgaccacttcacaaggggaaattgccggttccccaactgtctgcgatcacataacctaatggataggaaggtgctggcgatcatgcgggagcacggactgaatccagacgtcgtgcaaaacattcaggacatttgcaactctaagcacatgcaaaagaatccccccggtccgagggcccccagttcccaccggcgcaacatggcttatagggcaaggagcaagtcccgcgatcggttttttcagggatcacaggaattcctcgccagtgcaagcgcgtctgcagaacgctcatgcacccctagccccgatcaaatttcccaccgcgctagtttagaggacgctccagtggatgatctcactagaaagttcacctacctgggctcacaagatcgagctaggcccccttcgggatctagcaaggccaccgacctgggaggtacgagccaggccggaacgtcccagcgatttttggaaaatggtagtcaggaggacctgctgcatggaaatcccgggagcacgtaccttgcatccaattctacttcggcgccaaattggaaaagcctgaccagctggactaatgatcagggggctcgccgaaagaccgtctttagtcccaccctgccggcagcacgatccagcctgggctctttgcaaaccccagaagccgttacaacccggaagggaacaggcctcctcagcagtgactacagaatcatcaatggtaagagtggcactcaggatattcagcctggacccctgtttaacaacaatgctgacggagtggcaaccgacattacctctacccgttctctcaactataagagtacatccagcggccacagggaaatatctagtccccgcatacaagacgcagggcctgcgtcgcgagatgtgcaggccacaggacggatcgcagatgatgcagatccaagagtggccctggtgaacgactctttgtccgacgtcacatcaaccactagctctcgagtggacgatcatgattccgaggaaatttgtttggatcacctgtgtaaagggtgccctctgaacgggtcttgcagcaaggtgcacttccatcttccctacagatggcagatgttgatagggaaaacgtggactgattttgaacatatggagacaattgaaaagggatattgcaaccccggaatacacctctgttcagttgggtcttatactattaacttcagggtcatgagttgcgattcctttcccatccgacggttgtcaaccccctctagcgttaccaaaccggccaactctgtgttcactaccaaatggatttggtattggaagaatgagtctggcacctggatccagtacggtgaagaaaaggacaagcgaaaaaattctaatgttgattcgtcctacctggaaagtctataccagagctgcccgaggggggtggtgcctttccaggccggatctcggaattacgaactatcattccagggcatgatccagactaacatcgcctcgaaaacccagaaagacgtgattcgacgacctaccttcgtcccccaatggtacgtccagcagatgaagcgaggacccgagtag

SEQ ID NO: 215999 - DNA, 1521 bp, Artificial Sequence
  derived and/or modified sequence
atggcctaccgggcccggagcaagagccgggaccggttcttccagggtagtcaggaatttctcgccagtgcttccgccagcgccgagcgctcttgtacccctagtcccgatcagatttctcacagagccagccttgaggacgcccccgtcgatgacctgacacggaaattcacctatctcggctcccaggaccgagctcgtcctccttcaggcagcagcaaggctaccgacctgggggggacttcacaggctggcactagtcagagattccttgaaaatggctctcaggaggatctcctgcacggcaaccccgggagcacttacctggctagcaacagcacctctgctccaaattggaaatcactgacatcctggaccaacgatcaaggagcccgccgtaagactgtctttagccccactctgcccgcagcacgcagctcgttgggctccttacaaacgccggaagccgtgacaaccagaaagggaactggcctgctctccagcgattatagaattatcaacggaaaaagtggtacgcaggatatacaacccggccccctgtttaacaacaacgcggacggagtagcgaccgacatcacctccacacgatcactcaactacaagagtaccagcagcggccaccgggagatttcctctcctcgcatccaagatgccggtccagctagtcgcgacgtacaagcaactggtcggattgcagatgacgccgaccccagggtcgctctggtgaacgactccctgagcgatgtgacgtccacaaccagctctcgagtcgacgatcatgacagcgaggagatctgtctagatcatctttgtaagggctgcccgttgaacggaagttgttccaaggtacacttccacctgccttatcgctggcagatgctgatcgggaagacgtggacagactttgaacatatggaaactattgagaaaggttattgcaatcccggaatccatctctgtagtgtaggaagttacacaatcaactttagagtgatgtcttgtgatagcttccccattcgtaggctctccaccccttccagcgtcacgaagcctgcaaattcggttttcactacaaaatggatctggtattggaaaaatgaaagtgggacatggatccagtacggagaggagaaagacaaacgcaagaactccaatgtggactccagttatttagagtccctctatcagtcatgcccacgcggcgtagttccgtttcaagcggggtctagaaactatgagctttcctttcaaggcatgatccagaccaacattgcaagtaagactcagaaggacgtcatcaggcgacccacttttgtcccccagtggtatgtgcaagaggaaagggccagggtgtccgtcctgaaacagctcttcgcagaccgctgtcttcgctgctcgtgtccaggtctgattaagtctctcgtgaatctcgaacccgtgtttcttaagagctcttgcctgcattacagtgccgtatccatttgtataatagacgagtag

SEQ ID NO: 216000 - DNA, 2100 bp, Artificial Sequence
  derived and/or modified sequence
atggctgacccggaagtatgctgtttcataacaaaaattctctgtgcacacggcggtcgcatggccctggatgcactgctgcaggagattgctctgtcggagccacagttatgcgaagtcctgcaggtggctggaccggataggttcgtggttcttgaaacaggaggagaggccggaattaccaggtccgtagtggctactaccagggcgagagtgtgtagacgcaagtactgccaacgtccttgtgataacctacacctctgcaagttaaacctgctggggcgatgcaactatagccagagtgagagaaacttgtgtaagtactctcacgaggtgctctccgaggagaacttcaaggtcctgaaaaatcatgaactcagcggccttaacaaggaggaactagcagtgctgctgttgcaaagtgacccctttttcatgccagaaatttgcaaaagctataagggcgaaggtcgtcagcagatctgcaatcagcaaccaccatgttccagactacatatctgcgatcacttcaccaggggaaattgtcgcttcccaaactgcctgcggagccacaatctgatggatcgcaaagtgctcgctataatgcgggagcacgggctgaatcccgacgtggtccagaatattcaggatatttgtaattctaaacatatgcagaaaaacccgcctggacctcgggcaccatcttctcacagacgtaatatggcatatcgagccagaagcaaaagtcgcgaccggttctttcagggctcccaagagtttctggccagcgctagcgctagtgcagaaaggtcatgcacccccagccctgaccagatctcccaccgcgcttcccttgaggatgccccagtggacgatcttacgcgcaagttcacatatttaggttcgcaagacagggcgcgtcctcccagcggaagcagtaaagccactgaccttggaggaacaagtcaagcaggcaccagccaaagatttctggaaaatgggagtcaggaggacctccttcacggtaatcctggttctacatatctggcctctaactccacctccgcccctaactggaagtcactgactagctggacgaatgaccagggtgctcggcgaaagactgtgttttctccgactttaccagctgcaaggagctcgctgggctcactacagacccctgaggcggtgaccacacggaaaggaacaggcctactgtcatctgactaccgaatcatcaacggcaagtctggtactcaggatattcagcccggtcctctttttaacaataatgccgatggagtggcaacagatataacgtctacacggtcccttaattacaaaagcacctcctccggacatcgagaaatttcaagccctcggattcaagacgctggcccagcctccagagatgtccaagccacaggcaggattgctgacgacgctgaccctcgcgtcgcactcgtgaacgacagcctgagtgatgtgacttcgacaacaagttctcgggtcgatgatcacgacagcgaggagatctgtcttgatcacctctgtaagggctgcccattgaatggaagctgctccaaggtgcactttcatctgccttacagatggcagatgctaatcgggaagacttggacagattttgagcacatggagacaatcgagaagggctactgtaacccaggcatacacctctgcagcgtcggatcatacaccatcaatttcagggtgatgtcctgcgactcctttcccattaggaggttgagcacgccatccagcgtgaccaaaccagcaaattctgtgtttacaactaagtggatctggtattggaagaatgaaagtggcacctggatccaatacggggaggaaaaagataagagaaagaatagtaatgtagactcctcctacctggaatccctctaccaatcatgtccaaggggagtggtacctttccaggctggctctcggaattacgagctttcatttcaggggatgatacagactaacatcgcttctaagacccagaaagatgtgatccgtaggcctacctttgtgccccaatggtacgtgcaacaaatgaagcgaggacccgaatag

SEQ ID NO: 216001 - DNA, 1521 bp, Artificial Sequence
  derived and/or modified sequence
atggcttacagagcacggagtaagtctcgtgatcgctttttccagggatctcaggaattcctagcttccgcctcggcctctgccgagaggtcctgtactcccagtccggatcagatttcgcatcgagcctcactggaggacgcccctgtggacgacctcacacgaaaattcacatatctgggctcacaggaccgcgctcgtcctcccagcggctctagcaaagctacagacctcggtggcaccagtcaggcgggtacttctcagcgcttcttggagaacgggagccaggaggaccttctccacggaaacccaggttccacctacctcgcctcgaacagtacttccgcccctaattggaagtcccttacgagctggactaatgatcaaggcgctagaagaaaaacagtctttagccctaccctccctgccgctagaagttctctgggatctctgcagaccccggaagccgtcactactcgtaagggcacaggacttctgagctctgactacagaatcatcaacggcaagagtggtacccaggacatccagcccggacccctcttcaataacaacgctgacggagttgccaccgacattacctctaccaggtctttaaactacaagtctacgtcttcaggccaccgtgaaatatcttctcctagaatacaggacgctggtcctgccagtcgggacgttcaagcaaccggacggatagccgatgatgcggatcccagagtggcactcgtgaatgattcattatcagacgtgacctcaactaccagctcacgagttgacgaccatgattctgaagaaatctgcctcgaccacctgtgcaaaggatgcccattgaacgggtcatgtagtaaggtacacttccacctaccctatcggtggcaaatgctcatcgggaaaacgtggaccgacttcgagcacatggagaccattgagaagggttattgcaatccaggcatacacctttgctctgtgggcagctacaccatcaatttccgcgtaatgtcctgtgattccttccccatcaggcgactctctacgccaagctcagtgacgaagcctgctaattccgtattcacaacgaaatggatctggtactggaaaaacgagagcgggacatggatacagtacggcgaggagaaagacaaacgcaagaactcaaatgtggattcctcttacctagaatcgctctaccagtcatgtcctaggggagtggtcccattccaggcaggatcccgcaactatgagctctccttccaagggatgattcagacaaatatcgcaagtaagacacagaaagacgttatcaggcgccctacatttgttccccagtggtacgtacaggaggagcgtgccagagtctctgtgctgaaacagttatttgctgaccgatgcctgagatgctcctgtcccggactgatcaagtccctggttaacctggagcccgtcttcttaaaaagctcttgtttacactactccgctgtcagtatttgtatcattgacgagtag

SEQ ID NO: 216002 - DNA, 3182 bp, Artificial Sequence
  derived and/or modified sequence
cttttagtttctcttctttctaaagaaggctcgcggagcccggctggagaacctcaccctcgccgagcctagaaccgagagggggccaccccaggcggtcaccagcagatttgcccgcgcgttctctttctttccacccagttgcccttgcggccggctgtaaacctgccactaggacccggtcggtgagatctagcctcttgacctgagagccgagagtggatcgctgggctgggctaacggcgacggagagcgcgccctcgctgactccgggcgcgcccagcagtagcaccgcccgcgcccgcccctggacacttgtaagtttcgatttccgatttccgcggaaccgagtcccgcgccgcggcagagccagcacagccagcgcgccatggcggacccggaggtgtgctgcttcatcaccaaaatcctgtgcgcccacgggggccgcatggccctggacgcgctgctccaggagatcgcgctgtctgagccgcagctctgtgaggtgctgcaggtggccgggcccgaccgctttgtggtgttggagaccggcggcgaggccgggatcacccgatcggtggtggccaccactcgagcccgggtctgccgtcgcaagtactgccagagaccctgcgataacctgcatctctgcaaactcaacttgctgggccggtgcaactattcgcagtccgagcggaatttatgcaaatattctcatgaggttctctcagaagagaacttcaaagtcctgaaaaatcacgaactctctggactgaacaaagaggaattagcagtgctcctcctccaaagtgatcctttttttatgcccgagatatgcaaaagttataagggagagggtcggcagcagatttgtaaccagcagccaccgtgttcaagactccacatctgtgaccacttcacccgagggaactgtcgttttcccaactgcctccggtcccataacctgatggacagaaaggtgctggccatcatgagggagcacgggctgaaccccgacgtggtccagaacatccaggacatctgcaacagcaagcacatgcagaagaatcccccagggcccagagctccttcttcacatcgtagaaacatggcatatagggctagaagcaagagtagagatcggttctttcagggcagccaagaatttcttgcgtctgcttcagcgtctgctgagaggtcctgcacacctagtccagatcagatcagccacagggcttccctggaggacgcgcctgtggacgatctcacccgcaagttcacgtatctggggagtcaggatcgcgctcggcctccctcaggctcgtccaaggctactgatcttggaggaacaagtcaggccgggacaagccagaggtttttagagaacggcagtcaagaggacctcttgcatggaaatccaggcagcacttaccttgcttccaattcaacatcagcccccaactggaagagcctcacatcctggacgaatgaccaaggcgccaggagaaagactgtgttttctcccacgctacctgccgcccgctcttctcttggctctctgcaaacacctgaagctgtgaccaccagaaagggcacaggcttgctttcctcagactacaggatcatcaatggcaaaagtggaactcaggacatccagcctggccctctttttaataataatgctgatggagtggccacagatataacttctaccagatccttaaattacaaaagcactagcagcggtcacagagaaatatcatcacctaggattcaggatgctggacctgcttcccgagatgtccaggccactggcagaatcgcagatgatgctgacccaagagtagcacttgttaacgattctttatctgatgtcacaagtaccacatcttctagggtggatgatcatgactcagaggaaatttgtcttgaccatctgtgtaagggttgtccgcttaatggtagctgcagcaaagtccacttccatctgccttaccggtggcagatgcttattggtaaaacctggacggactttgagcacatggagacgatcgagaaaggctactgtaaccccggaatccacctctgttctgtaggaagttatacaatcaattttcgggtaatgagttgtgattcctttcccatccgacgcctctccactccttcttctgtcaccaagccagccaattctgtcttcaccaccaaatggatttggtattggaagaatgaatctggcacatggattcagtatggagaagagaaagacaaacggaaaaattcaaacgtcgactcttcatacctggagtctctctatcaatcctgtccgaggggagttgtgccatttcaggcgggctcacggaactatgagctgagtttccaagggatgattcagacaaacatagcttccaaaactcaaaaggatgtcatcagaagaccaacatttgtgcctcagtggtatgtgcagcagatgaagagagggccagagtaagtgttctgaagcagctgtttgctgacagatgcttgagatgttcatgccctgggctcatcaagtcactcgtgaatctggagcctgttttcctgaaaagttcctgtttgcattactctgcagtttccatttgcattatcgatgagtaagatgcttgttaagcagcatggtgtgactgaaaggatactagatcggaaaatgaattttctttctgaaagggaagtctgagcgagtctcctaaatactctgggctttagcttctccagctgtgaagagctggattgatgcagtacacctaaggaataatcatatatactgggtttttgttttgctgtggattcttttttttttttttttttttagagggggtctcactttgttgcccaggctggtcttgaactcctgagctcaagtgatcctcctacctcagtctcccaaagtgctgggattacaggcatgagccaccgtgcctggctttgctgtggattcttttgggtgtcttttgttttcctacacgatttatagaggatgaggggcggagaaagagatagaaaaaagggatgagctagctgttagagcaagggttttggtgagagataatattgattgaagggattttaaaggaaatgttgctgtgggggattcattgtaactctccttgtgaactgctcagtaaactctacattgttcatgaaca

SEQ ID NO: 216003 - protein, 364 aa, Artificial Sequence
  derived and/or modified sequence
MPRGRCRQQGPRIPIWAAANYANAHPWQQMDKASPGVAYTPLVDPWIERPCCGDTVCVRTTMEQKSTASGTCGGKPAERGPLAGHMPSSRPHRVDFCWVPGSDPGTFDGSPWLLDRFLAQLGDYMSFHFEHYQDNISRVCEILRRLTGRAQAWAAPYLDGDLPLPDDYELFCQDLKEVVQDPNSFAEYHAVVTCPLPLASSQLPVAPQLPVVRQYLARFLEGLALDMGTAPRSLPAAMATPAVSGSNSVSRSALFEQQLTKESTPGPKEPPVLPSSTCSSKPGPVEPASSQPEEAAPTPVPRLSESANPPAQRPDPAHPGGPKPQKTEEEVLETEGDQEVSLGTPQEVVEAPETPGEPPLSPGF

SEQ ID NO: 216004 - DNA, 6619 bp, Artificial Sequence
  derived and/or modified sequence
gttcccgactccggcaagagggtcagtgtggaggcgggagcccgggcggccggcttgaactccgtgcacgcgggcctggagctgcgcccctgcgtcttttcccgacttctgatccgcagaggggcactcggagccccagcctgggtcgcagtgccttcggtctgcgggcctcagtttctcggtggcgcctggactctcgccctcagagggaggcccgtcccacggtctgtggctacggatcccaggaccctcttcgcgggcgattcgcgtagcctcagattgcctcggatgatggcctgcgactgacagtctctcagctcttctcagctctcctgaggctgcagctgtcagctccctgatcctcagcacttgcctggaccagtgcgggtctgccacgccctgttcagccatccctgtcctgttgtgtcgtgcaagccacatctgtccacacccccaccacccaccagtgctggctctcctctcttctcccctgtgctcccagcatgcctcgtggccggtgccgtcagcagggccctcgcattcccatctgggcagccgccaattatgccaacgcacatccatggcagcagatggacaaggcgtctcctggggtggcatacaccccccttgtggatccctggattgagcggccctgctgtggggacaccgtgtgtgtgcgaacgaccatggagcagaagagcacagctagtggcacttgtggcggtaaacctgcagaaaggggtcccctagctgggcacatgcccagctcccgaccccacagggtggacttctgctgggtaccaggctcagacccaggcacctttgatggctccccgtggctactggaccgcttcttggcccagctgggcgattacatgtccttccactttgagcactatcaggacaacatcagccgtgtctgcgagatcctcaggcgcctaacaggccgagcccaggcctgggcagccccctaccttgatggggacctgcccctgcctgacgattacgagctcttctgccaggatctcaaggaagttgttcaagacccgaacagttttgctgagtaccatgctgtggttacctgtcccctgcccctggcctccagccagctgccagtggcccctcagctgcctgtggtgaggcaatacttagctaggttcttagagggcctggcactcgacatgggtactgcccccaggtctttaccagccgccatggccacccctgctgtgtctgggtccaactctgtatctagaagtgctctgttcgagcagcagctgaccaaggagagcacccctgggcccaaggagcccccagtcctgcccagttctacatgtagctccaagcctggtcctgtggaaccagcctcttcccagccagaggaggcagcccccacacctgtccctagactgtcggagtcagctaatcctcctgcccagagaccagacccagctcatccaggaggtccaaaaccccagaaaacagaggaggaggttttggagacagagggagaccaggaggtgtccttaggtaccccacaggaggtggtggaggccccggagaccccaggagagccaccactttctcctgggttctgaacacagcccaggtgggaacaatgctgcccctcatgatgaagtggcctgtgtggcttgagcgccccatagtccccagtcagagcagagtggtgtccccagatgacttcagaccccatagctgggcaagatgcgcttgttttggactctgcgctgagcagaaccagctcccccaactccagcagagcttgacctccgccctgtgccctttccctgctgctggctctctgctgcatccctgcccgtcttctgggagtgccgtctcacccaggcctgctcccacgagggggtcgttttgtagatcaactctcagcagatagttgcatcatctttgtcacctccacccccataaaacaccccccttggtgtcttccacactggctgggactgaactgggtctgccacgtctgccctgttgggacctcgttcctgtatggggtttctgtgtctgtccccctagccccaccctctctgctccctgtgacttctgtcccagctggaatgtgaggaaggctgcctggaggaagtggccactttgattctgggggatgagtgggatagcatcttggcaaagaatgatgtttcctgtgggattaccagcagttctgggcagctggaaggtttggatgcaggaaggtgggatgcaagccccttgccaggctcagctgcaggcattcgccctttgtgtgttaacactgtagctctaatcgtgcctggtgttctgaagcaggctcctcttccctgctgctgtgctgccatcccctgctcactccgcactcgcatgcattgcggattcagcacttaagccctagtgtgtaaatgacttggatctccctcctggcagactgtgaccctcagcacaggggctctgtcttagtcagctctgtggcctggtacacaattggtgctcattaaacacgtgttggattactggctgaggtggtgcagtggctgcctaccagcaagtctttgtttcccattctgtcaggagcagaggcctggccatgagcattccaggtcagcattgcagctgtggtttctggcaggggctttgagggtccaagggtctgatcaaagaagctgggtggggctgagtagggggtgggtggctctgcaggtagagaactgacttccgagagctgtaggtgaagtgaggaccaggcagcagtccagagctgtgaggccccaggcccagaggaatggaatgaagaaagacctgttccacacaaggaggggttttctagtggaagctgagcttggaagctcctggagccaagtttaccacaggataggcaggtacagccgcccagtgtgtgcagtgtgtgcccactctggtgcttggacaagaagttcaagtccctttcaggtttacaattgtgaaaacaacaaaacaacaccttcctggaaagtaggaagaaaaagcagaaatgtgaattggaaatacagccaactattttaggaaaaactaattagcaagcatctgattaaacttattcagaaactggccgggagcagtgtctcacacctgtaatcccagcactctgggaggccaaggtgggtggatcacctgaggtcaggagttcaagaccagcctgaccagcatggagaaatccatctctcctaaaaatacaaaattagccaagtgtggtggtgcatgcctgtaatctcagctacttgggaggctgaggcagaagaattgcttgaacccaggaggcagagggtgtggtgagccgagatcacgccattgcactccagcctggacaacaagagtgaaactccatcccaaaaaaaaaaaaacaacaaaaaacaaaaaccttatttagaaaaatataaattgttgggattattttatggtaactatcactagaaaaggctctgggttcagatggttttatgtgtgagttatttcagggcacagataccttgtaggtaaaacaactggaaaccttggaaataggtgggaagctatttttagaaagcaggtatagccctggtagcaaagcaagtgagctggcagaagaaacccattttcagtcttgattctggtcagatgtgagaagtccctggatgtcctggcccagccccatgcttctgtgccaggtcacagctgccctccgtccgatgactcaggccccatccccccttttgtgggttgggtcagactgctccctgatgcctacctccagtgcactgtggcctggctcacctgtgggtctggcagtagaacccagagttgctctctaggatggacagcctagtcacccagctgacctttaccctgtcccacaggcttctggacaggccaccttccccatctccctttagtggacctgaagtggatactccagcctgggattgctgccttctcttttgaaccctgtcctattggggctttggggcttttgtgcccttgggacccaggcagctcctgggggtgtgtgagttatggtctgccgtgtgtctgagggccagtcatgcagcatccacctaggcaggcttgagagtccttgggagagtccaggtgacctggtttttaattaaaacgcgtcctgtttattgtggttgggctctgcccagaaaggaaggtagggccttgaagtggtgatgtccaggtttcctgcacaggtagggtggaggcaacgatggactctggcatggccttccagacaggcagtgcacacagctcctttcagagtggctttgttgccagctgctgcagcacctgctttcagacagatgatgaccaagctgctttcctgctgggggaaggaggcattccccctgggttgtttttctcttctggcccccacacactggcagacccgaaggcagggtgctcaggagctgcagagcctggcagggtttgctggacatgctcagggacgggccatggtgctggctctgctttctaatcatggtgtcagtccttcacttcccttggaaatacccagagattttatttcctgaagataggacatgatgggtgctgtgagatggtatttaaagtacctgtctgcaaggaaaactttaaaataggaagtactaaggataaggtcctatgggatattggaatattttataaagccacaatagttaaagcacttagatgtggacagatgagcagagaatagaggactttgaaacgggccaaataaatatggaaatttagtacaggctagaggtgtttccaattaacgagtaaaatggattattcagtaaaagcagttggccctctggaaaatagtaaagccatgtatgtgcctcactctttatgccagtacatattccagattaaagatttcaatgttacaattatgaaagtactagaggaaaatatgggtgaatttttttttttttttttttttgcctatgattccaggattttaaaagttttagatgcccagagttgtggaggtatggagaagtggaccttctcatactgttggtgggaatacacaataatataatttgaccacgtaacaattctaggcacatgcatgctgtgactacttgctaggtgcatgaaggctcttgccaggggtggtcatggttcggtaccactacatgggggtttagagcagggactggaggttggccttgcctcctcccctccccgcatgagctgagggtccttacctgacctttttgagctgtgaccagagtttttcctcatggggtggttagaagggttgaatgagaatgatgcccatgcagtgccttggctggggtctgggccctctaacacccacctcatgggtgtcactgttttttgaacagcagaactggaaaagcccaaagatccagcaataaaggagcaaggcaaataaagctgttaccctgcaggatcagtcagcatgagccagattgtgctgcagtaacaaagatctccaacagcgcagcggctacagttggcactgcttatttcttgcttgcacctgtgggccaccgtggctggggcctgtcagacctgtgctgacgacagcctacctggacatatttctccatgctcactgaggcaggggaaaggccacagcaggccacaagtaatgtgtgtcaccccacttccatttctgtggccaaaggaagccacagagccacacctgagttccataggacggcagcagctgatcatcctatgggctggggtgctcagtatggagaagtacaagcagccacccagcgtggggctggttggtgctgctgaggatgggaggatgggaggggcctgcatccatcccagggcaacatacctgtttgtctgctggggctgcctgacaaaggaccgcaggctaggggacttaaacaacagacatttcctcatgattctggagctagaagcctgagatcaaggtgtgggcagggttggtttctcctgaggcctcgctccttggcctgcagatagccatcttcttgccgtgtccctgtctgtgtctgtgtcctaatctctcataagctcactagtctattggatcagggcccaccctcatgacctcatttaaccctgaattacctctttaaagaccctgtcttcaaatgtaagtactaggggttaggacttgaacataaaaatattgaagggacatagttctgcccacagcggtgcccgcgataggcttctctggttttgtctttgctgttcctggcagcgctatattgggcaggcttctgtggtctccacatgcctgtgtgcagagtcccccaggccctgggttctggggcccatactgaggagtggggatggccaagccttggctgttgagtaggcagtgcccagttgtgctgtatgggatgctgtttctcacttaagaaatctttccctacctggggggtacaaaggcattatcctgtattcccaggttgtaactttctgcctttgacattcaaccttgagtccacctgtaagtgtaactgcggcagaagggaggggtctgctgtcatccttgatagcctgtgatgagcagagcccctctgccgaccgcgatgcacatgtaatatgagcaagaaataaatttttgatgtgcgaa

SEQ ID NO: 216005 - DNA, 6785 bp, Artificial Sequence
  derived and/or modified sequence
gatgtaatcggtctctggacgctgcgcggcgctcctaggagcaggcgttcccgactccggcaagagggtcagtgtggaggcgggagcccgggcggccggcttgaactccgtgcacgcgggcctggagctgcgcccctgcgtcttttcccgacttctgatccgcagaggggcactcggagccccagcctgggtcgcagtgccttcggtctgcgggcctcagtttctcggtccgcgccgggggtttgtgggggcacctggagacatttgggccgttctcgcagtctcgggaagccgcgcccgctccttgcctggcctcacggcggccgatctcgttctccactttctaggtggcgcctggactctcgccctcagagggaggcccgtcccacggtctgtggctacggatcccaggaccctcttcgcgggcgattcgcgtagcctcagattgcctcggatgatggcctgcgactgacagtctctcagctcttctcagctctcctgaggctgcagctgtcagctccctgatcctcagcacttgcctggaccagtgcgggtctgccacgccctgttcagccatccctgtcctgttgtgtcgtgcaagccacatctgtccacacccccaccacccaccagtgctggctctcctctcttctcccctgtgctcccagcatgcctcgtggccggtgccgtcagcagggccctcgcattcccatctgggcagccgccaattatgccaacgcacatccatggcagcagatggacaaggcgtctcctggggtggcatacaccccccttgtggatccctggattgagcggccctgctgtggggacaccgtgtgtgtgcgaacgaccatggagcagaagagcacagctagtggcacttgtggcggtaaacctgcagaaaggggtcccctagctgggcacatgcccagctcccgaccccacagggtggacttctgctgggtaccaggctcagacccaggcacctttgatggctccccgtggctactggaccgcttcttggcccagctgggcgattacatgtccttccactttgagcactatcaggacaacatcagccgtgtctgcgagatcctcaggcgcctaacaggccgagcccaggcctgggcagccccctaccttgatggggacctgcccctgcctgacgattacgagctcttctgccaggatctcaaggaagttgttcaagacccgaacagttttgctgagtaccatgctgtggttacctgtcccctgcccctggcctccagccagctgccagtggcccctcagctgcctgtggtgaggcaatacttagctaggttcttagagggcctggcactcgacatgggtactgcccccaggtctttaccagccgccatggccacccctgctgtgtctgggtccaactctgtatctagaagtgctctgttcgagcagcagctgaccaaggagagcacccctgggcccaaggagcccccagtcctgcccagttctacatgtagctccaagcctggtcctgtggaaccagcctcttcccagccagaggaggcagcccccacacctgtccctagactgtcggagtcagctaatcctcctgcccagagaccagacccagctcatccaggaggtccaaaaccccagaaaacagaggaggaggttttggagacagagggagaccaggaggtgtccttaggtaccccacaggaggtggtggaggccccggagaccccaggagagccaccactttctcctgggttctgaacacagcccaggtgggaacaatgctgcccctcatgatgaagtggcctgtgtggcttgagcgccccatagtccccagtcagagcagagtggtgtccccagatgacttcagaccccatagctgggcaagatgcgcttgttttggactctgcgctgagcagaaccagctcccccaactccagcagagcttgacctccgccctgtgccctttccctgctgctggctctctgctgcatccctgcccgtcttctgggagtgccgtctcacccaggcctgctcccacgagggggtcgttttgtagatcaactctcagcagatagttgcatcatctttgtcacctccacccccataaaacaccccccttggtgtcttccacactggctgggactgaactgggtctgccacgtctgccctgttgggacctcgttcctgtatggggtttctgtgtctgtccccctagccccaccctctctgctccctgtgacttctgtcccagctggaatgtgaggaaggctgcctggaggaagtggccactttgattctgggggatgagtgggatagcatcttggcaaagaatgatgtttcctgtgggattaccagcagttctgggcagctggaaggtttggatgcaggaaggtgggatgcaagccccttgccaggctcagctgcaggcattcgccctttgtgtgttaacactgtagctctaatcgtgcctggtgttctgaagcaggctcctcttccctgctgctgtgctgccatcccctgctcactccgcactcgcatgcattgcggattcagcacttaagccctagtgtgtaaatgacttggatctccctcctggcagactgtgaccctcagcacaggggctctgtcttagtcagctctgtggcctggtacacaattggtgctcattaaacacgtgttggattactggctgaggtggtgcagtggctgcctaccagcaagtctttgtttcccattctgtcaggagcagaggcctggccatgagcattccaggtcagcattgcagctgtggtttctggcaggggctttgagggtccaagggtctgatcaaagaagctgggtggggctgagtagggggtgggtggctctgcaggtagagaactgacttccgagagctgtaggtgaagtgaggaccaggcagcagtccagagctgtgaggccccaggcccagaggaatggaatgaagaaagacctgttccacacaaggaggggttttctagtggaagctgagcttggaagctcctggagccaagtttaccacaggataggcaggtacagccgcccagtgtgtgcagtgtgtgcccactctggtgcttggacaagaagttcaagtccctttcaggtttacaattgtgaaaacaacaaaacaacaccttcctggaaagtaggaagaaaaagcagaaatgtgaattggaaatacagccaactattttaggaaaaactaattagcaagcatctgattaaacttattcagaaactggccgggagcagtgtctcacacctgtaatcccagcactctgggaggccaaggtgggtggatcacctgaggtcaggagttcaagaccagcctgaccagcatggagaaatccatctctcctaaaaatacaaaattagccaagtgtggtggtgcatgcctgtaatctcagctacttgggaggctgaggcagaagaattgcttgaacccaggaggcagagggtgtggtgagccgagatcacgccattgcactccagcctggacaacaagagtgaaactccatcccaaaaaaaaaaaaacaacaaaaaacaaaaaccttatttagaaaaatataaattgttgggattattttatggtaactatcactagaaaaggctctgggttcagatggttttatgtgtgagttatttcagggcacagataccttgtaggtaaaacaactggaaaccttggaaataggtgggaagctatttttagaaagcaggtatagccctggtagcaaagcaagtgagctggcagaagaaacccattttcagtcttgattctggtcagatgtgagaagtccctggatgtcctggcccagccccatgcttctgtgccaggtcacagctgccctccgtccgatgactcaggccccatccccccttttgtgggttgggtcagactgctccctgatgcctacctccagtgcactgtggcctggctcacctgtgggtctggcagtagaacccagagttgctctctaggatggacagcctagtcacccagctgacctttaccctgtcccacaggcttctggacaggccaccttccccatctccctttagtggacctgaagtggatactccagcctgggattgctgccttctcttttgaaccctgtcctattggggctttggggcttttgtgcccttgggacccaggcagctcctgggggtgtgtgagttatggtctgccgtgtgtctgagggccagtcatgcagcatccacctaggcaggcttgagagtccttgggagagtccaggtgacctggtttttaattaaaacgcgtcctgtttattgtggttgggctctgcccagaaaggaaggtagggccttgaagtggtgatgtccaggtttcctgcacaggtagggtggaggcaacgatggactctggcatggccttccagacaggcagtgcacacagctcctttcagagtggctttgttgccagctgctgcagcacctgctttcagacagatgatgaccaagctgctttcctgctgggggaaggaggcattccccctgggttgtttttctcttctggcccccacacactggcagacccgaaggcagggtgctcaggagctgcagagcctggcagggtttgctggacatgctcagggacgggccatggtgctggctctgctttctaatcatggtgtcagtccttcacttcccttggaaatacccagagattttatttcctgaagataggacatgatgggtgctgtgagatggtatttaaagtacctgtctgcaaggaaaactttaaaataggaagtactaaggataaggtcctatgggatattggaatattttataaagccacaatagttaaagcacttagatgtggacagatgagcagagaatagaggactttgaaacgggccaaataaatatggaaatttagtacaggctagaggtgtttccaattaacgagtaaaatggattattcagtaaaagcagttggccctctggaaaatagtaaagccatgtatgtgcctcactctttatgccagtacatattccagattaaagatttcaatgttacaattatgaaagtactagaggaaaatatgggtgaatttttttttttttttttttttgcctatgattccaggattttaaaagttttagatgcccagagttgtggaggtatggagaagtggaccttctcatactgttggtgggaatacacaataatataatttgaccacgtaacaattctaggcacatgcatgctgtgactacttgctaggtgcatgaaggctcttgccaggggtggtcatggttcggtaccactacatgggggtttagagcagggactggaggttggccttgcctcctcccctccccgcatgagctgagggtccttacctgacctttttgagctgtgaccagagtttttcctcatggggtggttagaagggttgaatgagaatgatgcccatgcagtgccttggctggggtctgggccctctaacacccacctcatgggtgtcactgttttttgaacagcagaactggaaaagcccaaagatccagcaataaaggagcaaggcaaataaagctgttaccctgcaggatcagtcagcatgagccagattgtgctgcagtaacaaagatctccaacagcgcagcggctacagttggcactgcttatttcttgcttgcacctgtgggccaccgtggctggggcctgtcagacctgtgctgacgacagcctacctggacatatttctccatgctcactgaggcaggggaaaggccacagcaggccacaagtaatgtgtgtcaccccacttccatttctgtggccaaaggaagccacagagccacacctgagttccataggacggcagcagctgatcatcctatgggctggggtgctcagtatggagaagtacaagcagccacccagcgtggggctggttggtgctgctgaggatgggaggatgggaggggcctgcatccatcccagggcaacatacctgtttgtctgctggggctgcctgacaaaggaccgcaggctaggggacttaaacaacagacatttcctcatgattctggagctagaagcctgagatcaaggtgtgggcagggttggtttctcctgaggcctcgctccttggcctgcagatagccatcttcttgccgtgtccctgtctgtgtctgtgtcctaatctctcataagctcactagtctattggatcagggcccaccctcatgacctcatttaaccctgaattacctctttaaagaccctgtcttcaaatgtaagtactaggggttaggacttgaacataaaaatattgaagggacatagttctgcccacagcggtgcccgcgataggcttctctggttttgtctttgctgttcctggcagcgctatattgggcaggcttctgtggtctccacatgcctgtgtgcagagtcccccaggccctgggttctggggcccatactgaggagtggggatggccaagccttggctgttgagtaggcagtgcccagttgtgctgtatgggatgctgtttctcacttaagaaatctttccctacctggggggtacaaaggcattatcctgtattcccaggttgtaactttctgcctttgacattcaaccttgagtccacctgtaagtgtaactgcggcagaagggaggggtctgctgtcatccttgatagcctgtgatgagcagagcccctctgccgaccgcgatgcacatgtaatatgagcaagaaataaatttttgatgtgcgaa

SEQ ID NO: 216006 - DNA, 6523 bp, Artificial Sequence
  derived and/or modified sequence
gtggctgcgcgatgtaatcggtctctggacgctgcgcggcgctcctaggagcaggcgttcccgactccggcaagagggtggcgcctggactctcgccctcagagggaggcccgtcccacggtctgtggctacggatcccaggaccctcttcgcgggcgattcgcgtagcctcagattgcctcggatgatggcctgcgactgacagtctctcagctcttctcagctctcctgaggctgcagctgtcagctccctgatcctcagcacttgcctggaccagtgcgggtctgccacgccctgttcagccatccctgtcctgttgtgtcgtgcaagccacatctgtccacacccccaccacccaccagtgctggctctcctctcttctcccctgtgctcccagcatgcctcgtggccggtgccgtcagcagggccctcgcattcccatctgggcagccgccaattatgccaacgcacatccatggcagcagatggacaaggcgtctcctggggtggcatacaccccccttgtggatccctggattgagcggccctgctgtggggacaccgtgtgtgtgcgaacgaccatggagcagaagagcacagctagtggcacttgtggcggtaaacctgcagaaaggggtcccctagctgggcacatgcccagctcccgaccccacagggtggacttctgctgggtaccaggctcagacccaggcacctttgatggctccccgtggctactggaccgcttcttggcccagctgggcgattacatgtccttccactttgagcactatcaggacaacatcagccgtgtctgcgagatcctcaggcgcctaacaggccgagcccaggcctgggcagccccctaccttgatggggacctgcccctgcctgacgattacgagctcttctgccaggatctcaaggaagttgttcaagacccgaacagttttgctgagtaccatgctgtggttacctgtcccctgcccctggcctccagccagctgccagtggcccctcagctgcctgtggtgaggcaatacttagctaggttcttagagggcctggcactcgacatgggtactgcccccaggtctttaccagccgccatggccacccctgctgtgtctgggtccaactctgtatctagaagtgctctgttcgagcagcagctgaccaaggagagcacccctgggcccaaggagcccccagtcctgcccagttctacatgtagctccaagcctggtcctgtggaaccagcctcttcccagccagaggaggcagcccccacacctgtccctagactgtcggagtcagctaatcctcctgcccagagaccagacccagctcatccaggaggtccaaaaccccagaaaacagaggaggaggttttggagacagagggagaccaggaggtgtccttaggtaccccacaggaggtggtggaggccccggagaccccaggagagccaccactttctcctgggttctgaacacagcccaggtgggaacaatgctgcccctcatgatgaagtggcctgtgtggcttgagcgccccatagtccccagtcagagcagagtggtgtccccagatgacttcagaccccatagctgggcaagatgcgcttgttttggactctgcgctgagcagaaccagctcccccaactccagcagagcttgacctccgccctgtgccctttccctgctgctggctctctgctgcatccctgcccgtcttctgggagtgccgtctcacccaggcctgctcccacgagggggtcgttttgtagatcaactctcagcagatagttgcatcatctttgtcacctccacccccataaaacaccccccttggtgtcttccacactggctgggactgaactgggtctgccacgtctgccctgttgggacctcgttcctgtatggggtttctgtgtctgtccccctagccccaccctctctgctccctgtgacttctgtcccagctggaatgtgaggaaggctgcctggaggaagtggccactttgattctgggggatgagtgggatagcatcttggcaaagaatgatgtttcctgtgggattaccagcagttctgggcagctggaaggtttggatgcaggaaggtgggatgcaagccccttgccaggctcagctgcaggcattcgccctttgtgtgttaacactgtagctctaatcgtgcctggtgttctgaagcaggctcctcttccctgctgctgtgctgccatcccctgctcactccgcactcgcatgcattgcggattcagcacttaagccctagtgtgtaaatgacttggatctccctcctggcagactgtgaccctcagcacaggggctctgtcttagtcagctctgtggcctggtacacaattggtgctcattaaacacgtgttggattactggctgaggtggtgcagtggctgcctaccagcaagtctttgtttcccattctgtcaggagcagaggcctggccatgagcattccaggtcagcattgcagctgtggtttctggcaggggctttgagggtccaagggtctgatcaaagaagctgggtggggctgagtagggggtgggtggctctgcaggtagagaactgacttccgagagctgtaggtgaagtgaggaccaggcagcagtccagagctgtgaggccccaggcccagaggaatggaatgaagaaagacctgttccacacaaggaggggttttctagtggaagctgagcttggaagctcctggagccaagtttaccacaggataggcaggtacagccgcccagtgtgtgcagtgtgtgcccactctggtgcttggacaagaagttcaagtccctttcaggtttacaattgtgaaaacaacaaaacaacaccttcctggaaagtaggaagaaaaagcagaaatgtgaattggaaatacagccaactattttaggaaaaactaattagcaagcatctgattaaacttattcagaaactggccgggagcagtgtctcacacctgtaatcccagcactctgggaggccaaggtgggtggatcacctgaggtcaggagttcaagaccagcctgaccagcatggagaaatccatctctcctaaaaatacaaaattagccaagtgtggtggtgcatgcctgtaatctcagctacttgggaggctgaggcagaagaattgcttgaacccaggaggcagagggtgtggtgagccgagatcacgccattgcactccagcctggacaacaagagtgaaactccatcccaaaaaaaaaaaaacaacaaaaaacaaaaaccttatttagaaaaatataaattgttgggattattttatggtaactatcactagaaaaggctctgggttcagatggttttatgtgtgagttatttcagggcacagataccttgtaggtaaaacaactggaaaccttggaaataggtgggaagctatttttagaaagcaggtatagccctggtagcaaagcaagtgagctggcagaagaaacccattttcagtcttgattctggtcagatgtgagaagtccctggatgtcctggcccagccccatgcttctgtgccaggtcacagctgccctccgtccgatgactcaggccccatccccccttttgtgggttgggtcagactgctccctgatgcctacctccagtgcactgtggcctggctcacctgtgggtctggcagtagaacccagagttgctctctaggatggacagcctagtcacccagctgacctttaccctgtcccacaggcttctggacaggccaccttccccatctccctttagtggacctgaagtggatactccagcctgggattgctgccttctcttttgaaccctgtcctattggggctttggggcttttgtgcccttgggacccaggcagctcctgggggtgtgtgagttatggtctgccgtgtgtctgagggccagtcatgcagcatccacctaggcaggcttgagagtccttgggagagtccaggtgacctggtttttaattaaaacgcgtcctgtttattgtggttgggctctgcccagaaaggaaggtagggccttgaagtggtgatgtccaggtttcctgcacaggtagggtggaggcaacgatggactctggcatggccttccagacaggcagtgcacacagctcctttcagagtggctttgttgccagctgctgcagcacctgctttcagacagatgatgaccaagctgctttcctgctgggggaaggaggcattccccctgggttgtttttctcttctggcccccacacactggcagacccgaaggcagggtgctcaggagctgcagagcctggcagggtttgctggacatgctcagggacgggccatggtgctggctctgctttctaatcatggtgtcagtccttcacttcccttggaaatacccagagattttatttcctgaagataggacatgatgggtgctgtgagatggtatttaaagtacctgtctgcaaggaaaactttaaaataggaagtactaaggataaggtcctatgggatattggaatattttataaagccacaatagttaaagcacttagatgtggacagatgagcagagaatagaggactttgaaacgggccaaataaatatggaaatttagtacaggctagaggtgtttccaattaacgagtaaaatggattattcagtaaaagcagttggccctctggaaaatagtaaagccatgtatgtgcctcactctttatgccagtacatattccagattaaagatttcaatgttacaattatgaaagtactagaggaaaatatgggtgaatttttttttttttttttttttgcctatgattccaggattttaaaagttttagatgcccagagttgtggaggtatggagaagtggaccttctcatactgttggtgggaatacacaataatataatttgaccacgtaacaattctaggcacatgcatgctgtgactacttgctaggtgcatgaaggctcttgccaggggtggtcatggttcggtaccactacatgggggtttagagcagggactggaggttggccttgcctcctcccctccccgcatgagctgagggtccttacctgacctttttgagctgtgaccagagtttttcctcatggggtggttagaagggttgaatgagaatgatgcccatgcagtgccttggctggggtctgggccctctaacacccacctcatgggtgtcactgttttttgaacagcagaactggaaaagcccaaagatccagcaataaaggagcaaggcaaataaagctgttaccctgcaggatcagtcagcatgagccagattgtgctgcagtaacaaagatctccaacagcgcagcggctacagttggcactgcttatttcttgcttgcacctgtgggccaccgtggctggggcctgtcagacctgtgctgacgacagcctacctggacatatttctccatgctcactgaggcaggggaaaggccacagcaggccacaagtaatgtgtgtcaccccacttccatttctgtggccaaaggaagccacagagccacacctgagttccataggacggcagcagctgatcatcctatgggctggggtgctcagtatggagaagtacaagcagccacccagcgtggggctggttggtgctgctgaggatgggaggatgggaggggcctgcatccatcccagggcaacatacctgtttgtctgctggggctgcctgacaaaggaccgcaggctaggggacttaaacaacagacatttcctcatgattctggagctagaagcctgagatcaaggtgtgggcagggttggtttctcctgaggcctcgctccttggcctgcagatagccatcttcttgccgtgtccctgtctgtgtctgtgtcctaatctctcataagctcactagtctattggatcagggcccaccctcatgacctcatttaaccctgaattacctctttaaagaccctgtcttcaaatgtaagtactaggggttaggacttgaacataaaaatattgaagggacatagttctgcccacagcggtgcccgcgataggcttctctggttttgtctttgctgttcctggcagcgctatattgggcaggcttctgtggtctccacatgcctgtgtgcagagtcccccaggccctgggttctggggcccatactgaggagtggggatggccaagccttggctgttgagtaggcagtgcccagttgtgctgtatgggatgctgtttctcacttaagaaatctttccctacctggggggtacaaaggcattatcctgtattcccaggttgtaactttctgcctttgacattcaaccttgagtccacctgtaagtgtaactgcggcagaagggaggggtctgctgtcatccttgatagcctgtgatgagcagagcccctctgccgaccgcgatgcacatgtaatatgagcaagaaataaatttttgatgtgcgaagccactga

SEQ ID NO: 216007 - DNA, 1095 bp, Artificial Sequence
  derived and/or modified sequence
atgcccagaggcagatgcagacagcagggccccagaatccccatctgggccgccgccaactacgccaacgcccacccctggcagcagatggacaaggccagccccggcgtggcctacacccccctggtggacccctggatcgagagaccctgctgcggcgacaccgtgtgcgtgagaaccaccatggagcagaagagcaccgccagcggcacctgcggcggcaagcccgccgagagaggccccctggccggccacatgcccagcagcagaccccacagagtggacttctgctgggtgcccggcagcgaccccggcaccttcgacggcagcccctggctgctggacagattcctggcccagctgggcgactacatgagcttccacttcgagcactaccaggacaacatcagcagagtgtgcgagatcctgagaagactgaccggcagagcccaggcctgggccgccccctacctggacggcgacctgcccctgcccgacgactacgagctgttctgccaggacctgaaggaggtggtgcaggaccccaacagcttcgccgagtaccacgccgtggtgacctgccccctgcccctggccagcagccagctgcccgtggccccccagctgcccgtggtgagacagtacctggccagattcctggagggcctggccctggacatgggcaccgcccccagaagcctgcccgccgccatggccacccccgccgtgagcggcagcaacagcgtgagcagaagcgccctgttcgagcagcagctgaccaaggagagcacccccggccccaaggagccccccgtgctgcccagcagcacctgcagcagcaagcccggccccgtggagcccgccagcagccagcccgaggaggccgcccccacccccgtgcccagactgagcgagagcgccaacccccccgcccagagacccgaccccgcccaccccggcggccccaagccccagaagaccgaggaggaggtgctggagaccgagggcgaccaggaggtgagcctgggcaccccccaggaggtggtggaggcccccgagacccccggcgagccccccctgagccccggcttctag

SEQ ID NO: 216008 - DNA, 1095 bp, Artificial Sequence
  derived and/or modified sequence
atgccacgaggacgttgccgacagcagggcccgagaatccccatctgggctgccgctaactacgccaacgctcatccctggcagcagatggataaagcctcaccaggggtcgcatacacaccactcgtcgatccatggattgaaagaccatgctgcggtgacaccgtgtgtgtgcgaactaccatggagcagaagtccaccgctagtggcacctgcggcggcaagccggcggaacggggacctctggcaggccatatgccctcatccagaccccaccgcgtggacttttgttgggtccccggctcagaccccggtaccttcgatggcagtccctggctgcttgaccggttcctggcccagcttggggactatatgtcttttcattttgagcattaccaagacaacatctcccgtgtttgtgaaattctgaggcgactgaccgggcgggcccaggcctgggccgcaccctacctggatggggatctgcctttgccagatgattatgagctcttttgccaagacctgaaggaggttgtgcaggatccaaattccttcgccgagtatcacgccgttgtaacttgcccactgcctctcgcttcttctcaattgccagtggcccctcagttacccgtcgtcagacaatatctggcccgctttctcgagggcctggctttggatatgggaactgcacctaggtccctgcctgcggccatggccacgccagcggttagtggcagcaatagtgtctccagatcagcgttatttgaacagcagcttacaaaggagtccactcccggcccgaaagaacctcctgtgttgccctcatccacatgttcgagtaaacctgggcccgtggagcctgcttctagtcaacccgaggaagcagctcctacccccgtgccccgactgtcagagtctgccaatcctcctgcacagagacctgacccagctcaccccggaggaccgaagccccaaaagacggaggaggaagtgctcgagaccgagggggatcaggaagtgagcctagggacaccacaggaagtggtggaagccccagagacccctggcgaacctccactatcccccggcttttag

SEQ ID NO: 216009 - DNA, 1095 bp, Artificial Sequence
  derived and/or modified sequence
atgccccgcggtcggtgtcgacagcaagggccgcgaataccgatctgggccgcagccaattatgccaatgctcacccttggcagcagatggataaagcgtccccaggcgttgcatacactcccctggtcgatccatggatcgaacggccttgctgtggagataccgtgtgcgtccgcaccactatggagcagaagagcactgccagcgggacctgtggaggcaaacctgcagagaggggtccactggctggccatatgccaagttctaggcctcatcgcgttgatttctgctgggtcccaggcagcgatcccggcaccttcgacggatcaccctggcttctggaccgcttccttgcgcagctaggggactacatgtctttccatttcgaacactaccaagacaatatcagcagagtgtgtgaaatcctgagacggttgacaggcagagcccaggcctgggcagctccatatttagatggagacctcccgcttccagacgattatgagttgttttgtcaggatctaaaagaggtggtccaagatccgaatagcttcgccgaataccacgctgtggtgacatgccctttgccgttggcatcatcacagctgcccgtcgccccccagctgccagtggtcagacaatacctcgctagatttctcgaaggcctcgccctcgacatggggaccgctccacggagtttgccggctgcaatggcgacaccagcggtcagcggcagcaacagtgtctcacggagtgccctgttcgagcagcagctgactaaagagtcaaccccaggcccaaaagaaccgccggttctgccgagtagcacatgtagcagtaaaccaggtccagtggaacccgcaagttctcagcccgaagaagccgcaccgacccccgttccaagactttccgaatctgccaaccccccagcacagcgacctgaccctgcgcaccccggagggcccaagcctcagaaaaccgaagaggaagtattggagaccgagggggaccaggaggtgtccttaggcaccccccaggaggttgtggaagctcctgagacgcctggtgagcctcccttgtcaccaggcttttag

SEQ ID NO: 216010 - DNA, 1095 bp, Artificial Sequence
  derived and/or modified sequence
atgcctcggggccgctgcagacagcagggcccccgcattcctatatgggccgctgctaactacgccaatgcgcatccatggcaacagatggacaaagccagcccaggcgtggcctacacccccttagtggacccttggatagaacgcccatgctgtggcgataccgtatgcgtccgcaccacaatggagcagaaaagtaccgcctccggtacttgcggcggcaaaccagccgaaaggggcccgctggctggacacatgcccagcagtcggccccatagagttgacttctgttgggtgcccggctcagatcctggcacttttgatggttctccctggctgctggatcgattcctcgctcagttgggtgactacatgtcctttcactttgagcattatcaggataatattagcagagtgtgcgagatcctgagacgcttgactggccgagcccaagcctgggccgctccatatctggatggtgatctgcctcttcctgatgattatgagctgttctgtcaggatctgaaagaagtcgtccaggaccctaattcattcgctgagtaccatgccgttgtcacttgtccccttcccctggcctcaagtcagctgccagtggccccccagcttccggttgtgaggcagtatctagcccgttttctcgaaggactggccctggacatgggaactgcccccagatcactgcctgctgctatggctactccggctgtcagcggatccaattctgtgtctaggtccgcgctgttcgagcaacagctgacaaaggagagtaccccaggcccaaaagaacccccagttttgccatcatcaacatgctccagcaagcccggacctgtggagccagcaagctcccaaccagaggaggccgcccctacccccgtccctcgtttgagtgagtccgcaaaccctcccgcacagcgcccagaccctgcacatcccggcgggcccaaaccacaaaaaacggaggaagaagtactcgagacggagggtgatcaggaggtctcgctgggcacacctcaggaggtggtggaggctcccgagacacccggcgagcccccgttgagcccgggtttttag

SEQ ID NO: 216011 - DNA, 1095 bp, Artificial Sequence
  derived and/or modified sequence
atgccccggggccgctgccggcagcagggcccccgcatccccatctgggccgccgccaactatgccaatgcccacccctggcagcagatggacaaggccagccctggggtggcctacacccccctggtggacccctggattgagcggccctgctgcggggacacagtgtgtgtgaggaccaccatggagcagaagagcacagccagcggcacctgtggcggcaagccagctgagcggggccccctggccggccacatgcccagcagccggccccaccgggtggacttctgctgggtgcccggcagtgaccccggcacctttgatggcagcccctggctgctggaccgcttcctggcccagctgggggactacatgtccttccactttgagcactaccaggacaacatcagccgggtgtgtgagatcctgcggcggctgaccggccgggcccaggcctgggccgccccctacctggatggagacctgcccctgcctgatgattatgagctgttctgccaggacctgaaggaggtggtgcaggaccccaacagctttgctgagtaccacgctgtggtgacctgccccctgcccctggccagcagccagctgcctgtggccccccagctgcctgtggtgcggcagtacctggcccgcttcctggagggcctggccctggacatgggcacagcccccaggagcctgcctgctgccatggccaccccagctgtgtctggcagcaacagcgtgagccgcagcgccctgtttgagcagcagctgaccaaggagagcaccccaggccccaaggagccccctgtgctgcccagcagcacctgcagcagcaagccaggccctgtggagcccgccagcagccagcctgaggaggccgcccccacccctgtgccccggctgtctgagagcgccaaccccccagcccagaggccagaccctgcccaccctgggggccccaagccccagaagacagaggaggaggtgctggagacagaaggagaccaggaggtgtccctgggcaccccccaggaggtggtggaggcccctgagaccccaggagagccccccctgagccctggcttctag

SEQ ID NO: 216012 - DNA, 1095 bp, Artificial Sequence
  derived and/or modified sequence
atgccccggggccggtgccggcagcagggcccccggatccccatctgggccgccgccaactatgcgaacgcacacccctggcaacagatggataaggcaagcccaggcgttgcttacacgccgctggtcgacccttggattgaacgaccttgctgcggagacacagtgtgtgtgcggacgaccatggaacagaaatctacagcctccggcacctgcgggggcaagcctgctgagcgtggtcccctggctggccacatgccctccagtagacctcacagggtggacttttgttgggtcccaggctcagatcccggcacctttgacgggtccccttggctgctggatcgcttcttggcacagttgggagattacatgtccttccatttcgagcactatcaggataatatcagcagagtctgcgagatcctcaggcgtctgactggcagggcgcaagcttgggccgctccatatcttgatggggatctgcctctgcccgatgactatgagttgttttgtcaagatctgaaagaggtagtgcaggatcccaattcttttgctgagtaccatgccgtggtgacatgccctctgccactcgcctcttcccaacttccagtggccccgcagctgcccgtggtgcgacagtacctcgccaggttcttggagggccttgcccttgacatggggaccgccccccggagtctgcctgcagcaatggctactcctgctgtttccgggagcaatagcgttagtagaagcgctttgtttgagcagcagctgaccaaggagtcaacacccggtccgaaagagccgccggtgcttccgtcctccacatgcagctccaaaccagggccggtagaacccgcctcatcgcagccagaggaggctgcacccaccccagtgccccgtctgagcgagagtgccaatccacccgcacaacgacctgatcccgcgcatcctggaggccctaagccacagaagaccgaggaagaggtgctggagacagagggcgatcaggaggtctccctcggcacaccccaggaggtggtcgaggcccccgagaccccgggggagccacctctgtccccaggtttctag

SEQ ID NO: 216013 - DNA, 1095 bp, Artificial Sequence
  derived and/or modified sequence
atgccccggggccggtgccggcagcagggcccccggatccccatctgggcagcagctaactatgctaatgcacacccatggcagcaaatggacaaggcctcacctggcgtggcgtatacaccgctggtcgacccctggattgagcgtccttgttgtggagacactgtctgcgtgcgaaccacaatggaacagaagtccactgcttctggcacttgtggaggaaaacctgccgaacggggtcccttggcggggcatatgccttcctcaaggccacacagagtggatttctgttgggtccctgggtcagacccgggtaccttcgacgggagtccttggcttctggataggttcctggcccagctaggggattatatgagctttcattttgagcactaccaagataatatatctcgggtctgtgagatcttgcgacgcctgacaggtcgagcacaggcctgggccgccccttacctagacggggaccttcccctgcccgatgactacgagttattttgccaggatctcaaggaggtggttcaggatcccaatagttttgccgagtaccatgccgtcgtgacctgtcccctgcctcttgcatcatcacaactgcccgttgcccctcagctacccgtggttcgacagtacctggccaggtttcttgagggcctcgcgctcgacatgggcaccgctcccaggagccttcccgccgccatggccacccctgccgtgtcaggctccaactcagtctccagaagtgctttatttgagcagcagctgactaaagagtcaacccctggacctaaagagcctcctgtcctcccaagctccacgtgttcatctaaaccaggaccagttgagcctgcttcaagccagcccgaagaagcagcacccacccccgtccctagattaagcgagagtgcaaaccctcctgcccagcgtcctgatcccgcccaccccggaggacccaagccgcagaagacagaggaagaggtactggaaacagagggggatcaagaagtctccctgggaacgccccaggaggtggtggaggcgccagagacccccggagaaccaccactgagccccggcttttag

SEQ ID NO: 216014 - DNA, 1095 bp, Artificial Sequence
  derived and/or modified sequence
atgccccggggccggtgccggcagcagggcccccggatccccatctgggccgccgctaactatgcaaatgcccacccttggcaacagatggataaggcgagccctggggtagcatacactccgctcgtagacccctggattgaaagaccatgttgcggggataccgtctgtgtcagaacgactatggagcagaagagtaccgcttccggcacctgtggtggtaaacctgcggagcgggggccgttggcgggccacatgccttcgtctcgtccccatagagttgatttttgttgggtgccgggcagcgatcccgggacttttgacgggtccccctggctactggataggtttctggctcagctgggcgactatatgtcattccacttcgagcactaccaggacaacattagcagagtctgcgaaattctccgaaggctgacaggtcgtgcacaagcctgggcagccccatacctcgatggagaccttccactcccagatgactacgagcttttctgccaggatctcaaggaggtggtccaggacccaaactcgtttgctgaataccacgctgtggttacgtgccccttgccactggcaagttcacaactccctgtcgcgccacagctccctgtagtccgacaatacctggcccgtttccttgagggactggctctggacatgggtacagccccccggagtttaccagcggctatggccactccagcagtaagcggtagtaattcggtgtccaggtcagctctgtttgagcagcagctcaccaaggaaagcacccctggtcccaaggagcccccggttttaccatcatccacctgttcttcaaaaccggggcccgtagagccagcctcgagccaaccagaggaggcagcccctacacctgtaccacgactgtccgagagtgcgaaccctcccgcccagcgcccagaccctgcacatccaggcgggccaaagcctcagaagactgaggaagaggtgctcgaaactgagggcgaccaggaggtctcactgggtacgccccaagaggtagttgaagctcccgagaccccaggggagcctccattgtcacctggcttttag

SEQ ID NO: 216015 - DNA, 1095 bp, Artificial Sequence
  derived and/or modified sequence
atgccacgaggaaggtgccgccagcagggtcccagaatccctatttgggcggctgctaactatgccaacgctcatccctggcagcagatggacaaggctagtcctggagttgcttatacacccctggtagatccttggatcgaacgtccttgctgtggtgacaccgtgtgtgtcaggaccacaatggaacaaaagtccactgcatcaggaacatgcggaggaaaacctgccgagcgcggacccctggccggtcatatgccatcttcccggcctcatcgcgttgatttttgctgggtgcccggttcagaccccggaacctttgatgggtccccatggctgctggatcgatttctcgcacagctcggcgactatatgtctttccattttgagcattaccaggataacatctcaagggtatgtgagattctcagacgtctcactggtcgcgctcaggcctgggccgctccatacctggacggagatctgcccctgcccgatgattatgaactgttttgccaggatctgaaagaggtggttcaggacccaaactctttcgctgagtaccacgcagttgtgacctgtcccctgcccctggcttccagccagctgccggtggcccctcaactgcccgttgtccgacagtatttagcgagattcctagaaggcctagcactggacatgggaacagcacccagatctctccccgcagcgatggccactcccgctgttagcggttctaactccgtgagcagatcagcgttgttcgagcagcagctcactaaggaatcaaccccagggcctaaagaaccacctgtattaccttcttctacctgcagttccaagccaggacctgtagaacctgcatcatcacagcccgaggaggccgctcctacacctgtgccccgtctgtctgagtcagcgaaccccccagctcagcgtcctgaccctgctcatcccggtggtccaaaacctcaaaagaccgaggaagaggtgctcgaaaccgagggtgatcaggaagtgtccttggggaccccacaggaagtggtggaggctcctgaaacccctggggagcctcctttatctccagggttctag

SEQ ID NO: 216016 - DNA, 1095 bp, Artificial Sequence
  derived and/or modified sequence
atgcctcgcggtcggtgccgccaacaaggacctcgcattccgatatgggccgctgccaattacgcgaatgcccacccctggcagcagatggacaaggcatcacctggggtagcatacacaccactggtcgacccatggattgaacggccttgctgcggagatactgtctgcgtgagaactactatggaacagaaaagtacagcatccgggacttgcggagggaagcccgcagaacggggacctctcgccggacacatgccaagtagcagaccacaccgcgtggacttttgctgggtgccaggctcagaccctggcacctttgacggctcaccatggttgctggaccggtttctggcacaattgggagactacatgtccttccatttcgagcactaccaggataacattagccgagtttgcgagattcttaggaggcttaccgggagggcgcaggcttgggctgctccataccttgacggcgacttgcctcttcccgatgattatgagttgttctgtcaggatctgaaggaggtcgtacaagaccctaactctttcgccgagtaccatgcagtagtcacttgccccctccccctagccagtagccagctgcccgttgcaccccagttgcccgtggttagacagtacctggcacggtttttagagggccttgccttagatatggggaccgctccccgaagcctccctgctgccatggccacacctgccgttagcggatcaaattccgttagcagatccgcgctgttcgagcagcagctcaccaaggaaagcacgccgggaccgaaagagcctcccgtgctgccctcatccacttgtagcagcaagcccggaccggtggagcctgccagctcccagcctgaggaagcagcacctaccccagttcctaggctcagcgagtcggctaatcctcccgcacagcgtcctgaccccgctcatccgggaggcccaaaaccccagaaaacggaagaggaagttttagagacggagggggaccaggaagtatccttgggcacaccccaggaggtggtagaggctcctgaaacccccggagagcctcctttgtcgcccggtttttag

SEQ ID NO: 216017 - DNA, 1095 bp, Artificial Sequence
  derived and/or modified sequence
atgccacgcggaagatgtcggcagcaggggcctcgcatacctatttgggctgctgccaattatgctaacgcccatccctggcagcagatggataaagcatcgccaggggtggcctacactccactagtggatccctggattgagaggccttgttgcggagacacagtctgcgtccgcaccactatggaacagaagtcaactgcatcaggcacctgcgggggaaaacccgctgagcgtgggccacttgctgggcacatgcctagcagccgtcctcacagagtggacttttgctgggtgccaggatcagacccgggtaccttcgacggatctccctggctgctggacaggttcctcgctcagctcggggactacatgtcattccacttcgaacactaccaggataatatcagcagggtctgcgagattctcagacgcctgacaggaagagcccaggcttgggcggcaccctatctagacggagacttacctctgcctgacgactatgagctgttctgccaagacttaaaggaggtggtccaagacccaaacagcttcgcggagtatcacgctgtcgtgacttgtccactgccactagcctcctcacaactcccagtggcacctcaactgcctgtcgtgcggcagtacctagctagatttctggaaggactcgccctagacatgggtaccgctcctcggtctctcccagctgcaatggccacacctgccgtttctggctcaaactcggtgtcacgcagcgctctttttgaacaacagttgactaaggagagcacgcccggtcctaaagagccacctgtgcttccttcctctacttgcagctcgaaacccggacccgtggaacccgcttcatctcagccagaggaagcggcacccacacctgtaccccgactcagtgaatccgccaatcctccagcacagaggcccgaccccgcacatcccggtgggccaaaacctcaaaagactgaagaggaagtactcgaaactgaaggggaccaggaggtctcactggggacacctcaggaagtggttgaggcgccagaaacaccgggagaaccgcctttgagcccaggcttctag

SEQ ID NO: 216018 - protein, 418 aa, Artificial Sequence
  derived and/or modified sequence
MAPRGRRRPRPHRSEGARRSKNTLERTHSMKDKAGQKCKPIDVFDFPDNSDVSSIGRLGENEKDEETYETFDPPLHSTAIYADEEEFSKHCGLSLSSTPPGKEAKRSSDTSGNEASEIESVKISAKKPGRKLRPISDDSESIEESDTRRKVKSAEKISTQRHEVIRTTASSELSEKPAESVTSKKTGPLSAQPSVEKENLAIESQSKTQKKGKISHDKRKKSRSKAIGSDTSDIVHIWCPEGMKTSDIKELNIVLPEFEKTHLEHQQRIESKVCKAAIATFYVNVKEQFIKMLKESQMLTNLKRKNAKMISDIEKKRQRMIEVQDELLRLEPQLKQLQTKYDELKERKSSLRNAAYFLSNLKQLYQDYSDVQAQEPNVKETYDSSSLPALLFKARTLLGAESHLRNINHQLEKLLDQG

SEQ ID NO: 216019 - protein, 320 aa, Artificial Sequence
  derived and/or modified sequence
MAPRGRRRPRPHRSEGARRSKNTLERTHSMKDKAGQKCKPIDVFDFPDNSDVSSIGRLGENEKDEETYETFDPPLHSTAIYADEEEFSKHCGLSLSSTPPGKEAKRSSDTSGNEASEIESVKISAKKPGRKLRPISDDSESIEESDTRRKVKSAEKISTQRHEVIRTTASSELSEKPAESVTSKKTGPLSAQPSVEKENLAIESQSKTQKKGKISHDKRKKSRSKAIGSDTSDIVHIWCPEGMKTSDIKELNIVLPEFEKTHLEHQQRIESKVCKAAIATFYVNVKEQFIKMLKESQMLTNLKRKNAKVRATAETTTNKI

SEQ ID NO: 216020 - protein, 320 aa, Artificial Sequence [sequence omitted]

SEQ ID NO: 216021 - protein, 337 aa, Artificial Sequence
  derived and/or modified sequence
MAPRGRRRPRPHRSEGARRSKNTLERTHSMKDKAGQKCKPIDVFDFPDNSDVSSIGRLGENEKDEETYETFDPPLHSTAIYADEEEFSKHCGLSLSSTPPGKEAKRSSDTSGNEASEIESVKISAKKPGRKLRPISDDSESIEESDTRRKVKSAEKISTQRHEVIRTTASSELSEKPAESVTSKKTGPLSAQPSVEKENLAIESQSKTQKKGKISHDKRKKSRSKAIGSDTSDIVHIWCPEGMKTSDIKELNIVLPEFEKTHLEHQQRIESKVCKAAIATFYVNVKEQFIKMLKESQMLTNLKRKNAKMISDIEKKRQRMIEVQDELLRLWTGAGLW

SEQ ID NO: 216022 - DNA, 1257 bp, Artificial Sequence
  derived and/or modified sequence
atggcccctagaggacggcgccgccccagaccacacagatctgaaggagcccggaggtctaaaaacactttagaacggactcatagcatgaaagacaaagccggacagaaatgcaagccaattgatgtgtttgacttcccagacaactcagatgtgagctccatcggacggctcggggaaaatgaaaaggatgaagagacttatgaaaccttcgacccaccgctacactctaccgccatctatgctgacgaagaggagtttagtaagcactgcggtctgagcctgtcttcaacacccccagggaaagaagccaagcggagttcagataccagcggtaacgaggcctctgaaatcgagagcgtgaagatctcagcaaaaaaacccgggagaaaactcagaccaatcagcgatgactcagaaagcattgaggaatctgatacgcgaaggaaagtcaagtccgcagagaaaattagtacacaaaggcacgaagtgattagaacaactgcaagttctgagctgtctgagaagcctgcagaatccgtcacatccaagaagaccggccccctgtctgcacagcccagcgttgaaaaagaaaacctagccattgaaagtcagagtaagacccaaaaaaaaggcaaaattagtcatgacaaacgaaaaaagagccgctcaaaggcaatcggatccgacacttcagatatcgtgcatatatggtgtccagagggaatgaagacgtcagatatcaaggaacttaatatcgtgctgcccgagtttgaaaagacccatttggagcatcaacagagaatagaaagcaaagtctgtaaagctgcgatagccaccttctatgttaatgtgaaggaacaatttatcaaaatgctgaaggagagccagatgcttaccaatctgaaaagaaaaaatgctaaaatgattagtgatatcgaaaaaaaacggcaaaggatgatagaagtgcaggacgagctgctacgtcttgagccccagctcaaacagctgcagacaaagtacgacgagctcaaagaacggaagtcatcgctcagaaacgctgcctacttcttgtccaatcttaaacagctctaccaggactattcagatgtccaagcacaggagccaaacgtgaaggagacctatgattctagttcattacccgcactccttttcaaggccaggacacttctcggagccgaatctcatttgcggaatattaatcatcagctggaaaagttactggatcagggatag

SEQ ID NO: 216023 - DNA, 963 bp, Artificial Sequence
  derived and/or modified sequence
atggcacctagaggcagaaggaggccacggccccacaggtccgagggcgccaggagatcaaaaaataccttagaacgcactcactcaatgaaagacaaagccggccagaagtgcaagcctatcgacgtttttgattttcctgataattcggacgttagcagtattgggcggctgggggagaatgaaaaagatgaagaaacatatgaaacttttgatcctccactccatagtaccgctatatacgccgacgaggaggaattttcaaaacactgtggactcagcctttcatcaacacctccgggaaaagaggccaaaaggagctcagataccagtggcaacgaagccagcgaaattgagtctgtgaagatttccgctaagaagccgggcaggaaactccgccccattagcgatgactccgagtcaatagaggaatcagatactcgccgcaaggtgaagagcgcagagaaaatcagcacccagcgtcatgaggtaattcgcaccacggcttcctccgaattgtccgaaaagcccgcagagagcgtgacatcaaagaagactggacccttgagtgcacaaccgtccgtggaaaaggagaacctagcaattgagagtcaatctaaaacccagaagaaaggtaagatttcccacgataagagaaagaaatcacggtccaaggccattgggagtgatacgtccgatatcgtccatatctggtgcccagaagggatgaaaacctcagatatcaaggaactgaatatcgtgttaccagagtttgagaagacacatctcgagcaccagcagcgcatcgaatcgaaggtatgtaaggccgccatcgcaaccttctatgtcaacgtgaaagaacagttcataaagatgctgaaggaaagccaaatgctcaccaatcttaagcgcaagaatgctaaggtaagagctactgctgaaacaacaaccaataaaatctag

SEQ ID NO: 216024 - DNA, 963 bp, Artificial Sequence
  derived and/or modified sequence
atggccccgaggggccgtcgccggcccaggcctcaccgatccgagagtgctcgcaggtccaagaacaccttggagcgcacacactctatgaaggataaagctggccagaaatgtaaacctatagatgtcttcgacttccccgacaactctgacgtctcctctattggcaggttgggagaaaacgaaaaggacgaagagacttacgagacattcgatccaccactgcacagtacagctatttatgcagatgaagaggagttctcgaagcattgtggactttctctttcctcaactccccccggcaaggaggctaaaaggagtagcgataccagcggtaacgaggcctcggagatagagtccgtcaagatctcggctaaaaagccgggccggaaattgagacccatcagcgatgattctgaatcgatcgaagagtcagataccaggagaaaggtcaaatccgctgagaagatatccacgcaaaggcacgaagttattcggaccacagcctccagcgaactgtccgagaaacctgccgagagtgtgacctccaaaaaaaccgggcctttgtcagcacaaccctcagttgagaaagaaaacctggctattgaatcccaatccaaaactcagaagaaggggaaaatcagccacgacaagcgcaaaaaaagcagatccaaagctatcggcagcgacacatccgatatcgtccatatctggtgtcctgagggtatgaaaacttcagatatcaaggagctgaacatcgtcctgcctgaattcgagaagacccatttagagcaccagcagcgcattgagtccaaagtttgcaaggctgcaattgccactttttatgtgaatgtgaaggagcagtttattaagatgcttaaggagtcccaaatgctcaccaacctgaaaagaaaaaatgctaaagtcagagcgacagccgagaccacaacaaataagatttag

SEQ ID NO: 216025 - DNA, 1014 bp, Artificial Sequence
  derived and/or modified sequence
atggctccccgcggacgacgacggccccgcccccacagatcagagggagcccgccgaagtaaaaacacactggaacgcacacactctatgaaggacaaggctggccagaagtgtaaacccattgatgtgttcgacttccccgataacagcgatgtcagcagcatagggcggcttggtgaaaatgaaaaagatgaggagacatacgaaactttcgatcccccactgcatagcacggcgatctatgcggacgaggaagaattctcaaagcattgtgggttgtcactcagtagtacccccccaggaaaggaggccaaacggagttctgacacgtccggcaatgaagccagcgagatagagtcagttaaaattagcgcaaagaaacctggacggaaacttcggcctatttcagacgactccgagtcgatcgaggagtcggacacccggaggaaggtgaaaagcgccgaaaaaatctctacccagagacacgaagtgatccggacaactgcatctagcgaactgtctgagaagcccgccgagtctgttacgtctaagaagaccggcccattgtcagcccaaccatcagtggaaaaagaaaatctagctatcgaatcacagagtaaaactcaaaaaaagggaaagatctctcacgacaagaggaaaaagtcaagatccaaagctatcggctcagacacttccgacatcgttcacatttggtgccccgagggaatgaagactagtgacatcaaggaactgaacattgtcctgcccgagtttgagaaaacccatctggagcatcaacaacgcatcgaatccaaagtctgtaaagcggcaatagctaccttttatgttaacgtgaaggaacagtttattaagatgctgaaggaatcgcagatgctgaccaacttgaaaaggaaaaacgcgaaaatgatttctgacatcgaaaagaagcgacaacgtatgatagaggtgcaagacgagctgctacgcctttggactggggctggcctctggtag

SEQ ID NO: 216026 - DNA, 1257 bp, Artificial Sequence
  derived and/or modified sequence
atggccccccggggcagaagaagaccccggccccacaggtctgagggcgcccggcgcagcaagaacaccctggagaggacccacagcatgaaggacaaggccggccagaagtgcaagcccattgatgtgtttgacttcccagacaacagtgatgtgagcagcatcggccgcctgggggagaatgagaaggatgaggagacctatgagacctttgatcctcccctgcacagcacagccatctatgcagatgaggaggagttcagcaagcactgcggcctgagcctgagcagcaccccacctgggaaggaggccaagaggagcagtgacaccagcggaaatgaggccagcgagattgagagcgtgaagatcagcgccaagaagccaggcaggaagctgcggcccatcagtgatgattctgagagcattgaggagagtgacaccaggaggaaggtgaagtctgctgagaagatcagcacccagagacatgaggtgatccgcaccacagccagcagcgagctgtctgagaagccagctgagagcgtgaccagcaagaagacaggccccctgagcgcccagcccagcgtggagaaggagaacctggccatcgagagccagagcaagacccagaagaagggcaagatcagccatgacaagaggaagaagagccgcagcaaggccatcggcagtgacaccagtgacatcgtgcacatctggtgcccagagggcatgaagaccagtgacatcaaggagctgaacatcgtgctgcctgagtttgagaagacccacctggagcaccagcagagaattgagagcaaggtgtgcaaggccgccatcgccaccttctacgtgaatgtgaaggagcagttcatcaagatgctgaaggagagccagatgctgaccaacctgaagaggaagaatgccaagatgatcagtgacatcgagaagaagaggcagaggatgattgaggtgcaggatgagctgctgcggctggagccccagctgaagcagctgcagaccaagtatgatgagctgaaggagaggaagagcagcctgagaaatgctgcctacttcctgagcaacctgaagcagctgtaccaggactacagtgatgtgcaggcccaggagcccaacgtgaaggagacctatgacagcagcagcctgcctgccctgctcttcaaggcccggaccctgctgggcgctgagagccacctgaggaacatcaaccaccagctggagaagctgctggaccagggctag

SEQ ID NO: 216027 - DNA, 963 bp, Artificial Sequence
  derived and/or modified sequence
atggccccccggggcagaagaagaccccggccccacaggtctgagggcgcccggcgcagcaagaacaccctggagaggacccacagcatgaaggacaaggccggccagaagtgcaagcccattgatgtgtttgacttcccagacaacagtgatgtgagcagcatcggccgcctgggggagaatgagaaggatgaggagacctatgagacctttgatcctcccctgcacagcacagccatctatgcagatgaggaggagttcagcaagcactgcggcctgagcctgagcagcaccccacctgggaaggaggccaagaggagcagtgacaccagcggaaatgaggccagcgagattgagagcgtgaagatcagcgccaagaagccaggcaggaagctgcggcccatcagtgatgattctgagagcattgaggagagtgacaccaggaggaaggtgaagtctgctgagaagatcagcacccagagacatgaggtgatccgcaccacagccagcagcgagctgtctgagaagccagctgagagcgtgaccagcaagaagacaggccccctgagcgcccagcccagcgtggagaaggagaacctggccatcgagagccagagcaagacccagaagaagggcaagatcagccatgacaagaggaagaagagccgcagcaaggccatcggcagtgacaccagtgacatcgtgcacatctggtgcccagagggcatgaagaccagtgacatcaaggagctgaacatcgtgctgcctgagtttgagaagacccacctggagcaccagcagagaattgagagcaaggtgtgcaaggccgccatcgccaccttctacgtgaatgtgaaggagcagttcatcaagatgctgaaggagagccagatgctgaccaacctgaagaggaagaatgccaaggtgcgggccacagctgagaccaccaccaacaagatctag

SEQ ID NO: 216028 - DNA, 963 bp, Artificial Sequence
  derived and/or modified sequence
atggccccccggggcagaagaagaccccggccccacaggtctgagagcgcccggcgcagcaagaacaccctggagaggacccacagcatgaaggacaaggccggccagaagtgcaagcccattgatgtgtttgacttcccagacaacagtgatgtgagcagcatcggccgcctgggggagaatgagaaggatgaggagacctatgagacctttgatcctcccctgcacagcacagccatctatgcagatgaggaggagttcagcaagcactgcggcctgagcctgagcagcaccccacctgggaaggaggccaagaggagcagtgacaccagcggaaatgaggccagcgagattgagagcgtgaagatcagcgccaagaagccaggcaggaagctgcggcccatcagtgatgattctgagagcattgaggagagtgacaccaggaggaaggtgaagtctgctgagaagatcagcacccagagacatgaggtgatccgcaccacagccagcagcgagctgtctgagaagccagctgagagcgtgaccagcaagaagacaggccccctgagcgcccagcccagcgtggagaaggagaacctggccatcgagagccagagcaagacccagaagaagggcaagatcagccatgacaagaggaagaagagccgcagcaaggccatcggcagtgacaccagtgacatcgtgcacatctggtgcccagagggcatgaagaccagtgacatcaaggagctgaacatcgtgctgcctgagtttgagaagacccacctggagcaccagcagagaattgagagcaaggtgtgcaaggccgccatcgccaccttctacgtgaatgtgaaggagcagttcatcaagatgctgaaggagagccagatgctgaccaacctgaagaggaagaatgccaaggtgcgggccacagctgagaccaccaccaacaagatctag

SEQ ID NO: 216029 - DNA, 1014 bp, Artificial Sequence
  derived and/or modified sequence
atggccccccggggcagaagaagaccccggccccacaggtctgagggcgcccggcgcagcaagaacaccctggagaggacccacagcatgaaggacaaggccggccagaagtgcaagcccattgatgtgtttgacttcccagacaacagtgatgtgagcagcatcggccgcctgggggagaatgagaaggatgaggagacctatgagacctttgatcctcccctgcacagcacagccatctatgcagatgaggaggagttcagcaagcactgcggcctgagcctgagcagcaccccacctgggaaggaggccaagaggagcagtgacaccagcggaaatgaggccagcgagattgagagcgtgaagatcagcgccaagaagccaggcaggaagctgcggcccatcagtgatgattctgagagcattgaggagagtgacaccaggaggaaggtgaagtctgctgagaagatcagcacccagagacatgaggtgatccgcaccacagccagcagcgagctgtctgagaagccagctgagagcgtgaccagcaagaagacaggccccctgagcgcccagcccagcgtggagaaggagaacctggccatcgagagccagagcaagacccagaagaagggcaagatcagccatgacaagaggaagaagagccgcagcaaggccatcggcagtgacaccagtgacatcgtgcacatctggtgcccagagggcatgaagaccagtgacatcaaggagctgaacatcgtgctgcctgagtttgagaagacccacctggagcaccagcagagaattgagagcaaggtgtgcaaggccgccatcgccaccttctacgtgaatgtgaaggagcagttcatcaagatgctgaaggagagccagatgctgaccaacctgaagaggaagaatgccaagatgatcagtgacatcgagaagaagaggcagaggatgattgaggtgcaggatgagctgctgcggctgtggacaggagctggcctgtggtag

SEQ ID NO: 216030 - DNA, 1998 bp, Artificial Sequence
  derived and/or modified sequence
cggattggctgttcggagcggcgaggggcttggcgggagcttccagtcgctcgagagcggagagcggcaccatggccccgcgggggcggcggcggccgcggcctcacaggtctgagggcgcaagacgttcaaagaacactttagaaagaacacattccatgaaagataaagctggtcaaaagtgcaagcctattgacgtgttcgactttcctgataattctgatgtctcaagcattggcaggctgggtgaaaatgagaaagatgaagaaacttatgagacctttgatcctcctttacatagcacagctatatatgctgatgaagaagaattctccaaacattgtggactgtctctctcttcaactcctccaggaaaagaagcaaaaagaagttcagacacttctggaaatgaagcaagtgaaatcgaatctgtaaaaattagtgcaaaaaagccaggaagaaagctcaggcccattagtgatgactctgaaagcattgaagaaagtgatacaaggagaaaagttaaatcagcagagaaaataagtacacaacgtcatgaggttattcgaaccacagcgtcttcagaactttcagagaaaccagctgagtctgtcacttctaaaaagacaggaccccttagtgcccagccctctgttgaaaaagagaacttggcaatagaaagtcaatcgaaaactcagaaaaaagggaagatatctcatgacaaaaggaagaaatcaagaagtaaagccataggctcagatacttctgacattgtgcacatttggtgtccagaaggaatgaaaaccagtgacatcaaggagttgaatattgttttgcctgaatttgagaaaacccacctagagcatcaacaaagaatagaatctaaagtttgtaaggcagccatcgccacattttatgttaatgttaaagaacaattcatcaaaatgcttaaagaaagccagatgttgacaaatctgaaaaggaagaatgctaagatgatttcagatatcgaaaagaaaaggcagcgtatgattgaagtccaggatgaactgcttcggttagagccacagctgaaacaactacaaacaaaatatgatgaacttaaagagagaaagtcttcccttaggaatgcagcatatttcttatctaatttaaaacagctttatcaagattattcagatgttcaagctcaagaaccaaacgtaaaggaaacgtatgattcatccagccttccagctctgttatttaaagcaagaacacttctgggagccgaaagccatctgcgaaatatcaaccatcagttagagaagctccttgaccagggatgagaagagcagtctactaaaatgtgcctataggaagactagtctcatgctgttaccttctgaaactgtacctttataaatcaattgttttgcaaagaagttatggcctacttagaatctaaaatttgttattcaaattaaatggctgtgaacaatgttaaatagcatcagtttgtccaatagttttaaaggccataatcatcttttctggttaatatcttgagtaattttaaaatgttgacaccttaatcggtcccaggtatgagctataataaacttgtaaaattaagttgatgtgaacataattttgattaattaataaggcgatttctcctgaatttacaccaaagctaatttttaatgaaattggtttacagaagtaaaaaacaaaaattggaaagcaaagtaataaaacttagtttatataaacaggttgaatgatatatttatcaaatctcacagacatcaggcaaattatagcctggtgacaaaagtgttcatagtgaattagttactcttgtaatacttctataattagttcatcaggaatttcatccacttcactgttataactgagaagactgttctctgcagcttcagctaattcagcatcttcagtagcttctaaaaaataagcatcatcaatgccattatcccagacagcatcagcaga

SEQ ID NO: 216031 - DNA, 1549 bp, Artificial Sequence
  derived and/or modified sequence
attggctgttcggagcggcgaggggcttggcgggagcttccagtcgctcgagagcggagagcggcaccatggccccgcgggggcggcggcggccgcggcctcacaggtctgagggcgcaagacgttcaaagaacactttagaaagaacacattccatgaaagataaagctggtcaaaagtgcaagcctattgacgtgttcgactttcctgataattctgatgtctcaagcattggcaggctgggtgaaaatgagaaagatgaagaaacttatgagacctttgatcctcctttacatagcacagctatatatgctgatgaagaagaattctccaaacattgtggactgtctctctcttcaactcctccaggaaaagaagcaaaaagaagttcagacacttctggaaatgaagcaagtgaaatcgaatctgtaaaaattagtgcaaaaaagccaggaagaaagctcaggcccattagtgatgactctgaaagcattgaagaaagtgatacaaggagaaaagttaaatcagcagagaaaataagtacacaacgtcatgaggttattcgaaccacagcgtcttcagaactttcagagaaaccagctgagtctgtcacttctaaaaagacaggaccccttagtgcccagccctctgttgaaaaagagaacttggcaatagaaagtcaatcgaaaactcagaaaaaagggaagatatctcatgacaaaaggaagaaatcaagaagtaaagccataggctcagatacttctgacattgtgcacatttggtgtccagaaggaatgaaaaccagtgacatcaaggagttgaatattgttttgcctgaatttgagaaaacccacctagagcatcaacaaagaatagaatctaaagtttgtaaggcagccatcgccacattttatgttaatgttaaagaacaattcatcaaaatgcttaaagaaagccagatgttgacaaatctgaaaaggaagaatgctaaggttagagccacagctgaaacaactacaaacaaaatatgatgaacttaaagagagaaagtcttcccttaggaatgcagcatatttcttatctaatttaaaacagctttatcaagattattcagatgttcaagctcaagaaccaaacgtaaaggaaacgtatgattcatccagccttccagctctgttatttaaagcaagaacacttctgggagccgaaagccatctgcgaaatatcaaccatcagttagagaagctccttgaccagggatgagaagagcagtctactaaaatgtgcctataggaagactagtctcatgctgttaccttctgaaactgtacctttataaatcaattgttttgcaaagaagttatggcctacttagaatctaaaatttgttattcaaattaaatggctgtgaacaatgttaaatagcatcagtttgtccaatagttttaaaggccataatcatcttttctggttaatatcttgagtaattttaaaatgttgacaccttaatcggtcccaggtatgagctataataaacttgtaaaattaa

SEQ ID NO: 216032 - DNA, 1547 bp, Artificial Sequence
  derived and/or modified sequence
attggctgttcggagcggcgaggggcttggcgggagcttccagtcgctcgagagcggagagcggcaccatggccccgcgggggcggcggcggccgcggcctcacaggtctgagagcgcaagacgttcaaagaacactttagaaagaacacattccatgaaagataaagctggtcaaaagtgcaagcctattgacgtgttcgactttcctgataattctgatgtctcaagcattggcaggctgggtgaaaatgagaaagatgaagaaacttatgagacctttgatcctcctttacatagcacagctatatatgctgatgaagaagaattctccaaacattgtggactgtctctctcttcaactcctccaggaaaagaagcaaaaagaagttcagacacttctggaaatgaagcaagtgaaatcgaatctgtaaaaattagtgcaaaaaagccaggaagaaagctcaggcccattagtgatgactctgaaagcattgaagaaagtgatacaaggagaaaagttaaatcagcagagaaaataagtacacaacgtcatgaggttattcgaaccacagcgtcttcagaactttcagagaaaccagctgagtctgtcacttctaaaaagacaggaccccttagtgcccagccctctgttgaaaaagagaacttggcaatagaaagtcaatcgaaaactcagaaaaaagggaagatatctcatgacaaaaggaagaaatcaagaagtaaagccataggctcagatacttctgacattgtgcacatttggtgtccagaaggaatgaaaaccagtgacatcaaggagttgaatattgttttgcctgaatttgagaaaacccacctagagcatcaacaaagaatagaatctaaagtttgtaaggcagccatcgccacattttatgttaatgttaaagaacaattcatcaaaatgcttaaagaaagccagatgttgacaaatctgaaaaggaagaatgctaaggttagagccacagctgaaacaactacaaacaaaatatgatgaacttaaagagagaaagtcttcccttaggaatgcagcatatttcttatctaatttaaaacagctttatcaagattattcagatgttcaagctcaagaaccaaacgtaaaggaaacgtatgattcatccagccttccagctctgttatttaaagcaagaacacttctgggagccgaaagccatctgcgaaatatcaaccatcagttagagaagctccttgaccagggatgagaagagcagtctactaaaatgtgcctataggaagactagtctcatgctgttaccttctgaaactgtacctttataaatcaattgttttgcaaagaagttatggcctacttagaatctaaaatttgttattcaaattaaatggctgtgaacaatgttaaatagcatcagtttgtccaatagttttaaaggccataatcatcttttctggttaatatcttgagtaattttaaaatgttgacaccttaatcggtcccaggtatgagctataataaacttgtaaaatt

SEQ ID NO: 216033 - DNA, 1014 bp, Artificial Sequence
  derived and/or modified sequence
atggccccgcgggggcggcggcggccgcggcctcacaggtctgagggcgcaagacgttcaaagaacactttagaaagaacacattccatgaaagataaagctggtcaaaagtgcaagcctattgacgtgttcgactttcctgataattctgatgtctcaagcattggcaggctgggtgaaaatgagaaagatgaagaaacttatgagacctttgatcctcctttacatagcacagctatatatgctgatgaagaagaattctccaaacattgtggactgtctctctcttcaactcctccaggaaaagaagcaaaaagaagttcagacacttctggaaatgaagcaagtgaaatcgaatctgtaaaaattagtgcaaaaaagccaggaagaaagctcaggcccattagtgatgactctgaaagcattgaagaaagtgatacaaggagaaaagttaaatcagcagagaaaataagtacacaacgtcatgaggttattcgaaccacagcgtcttcagaactttcagagaaaccagctgagtctgtcacttctaaaaagacaggaccccttagtgcccagccctctgttgaaaaagagaacttggcaatagaaagtcaatcgaaaactcagaaaaaagggaagatatctcatgacaaaaggaagaaatcaagaagtaaagccataggctcagatacttctgacattgtgcacatttggtgtccagaaggaatgaaaaccagtgacatcaaggagttgaatattgttttgcctgaatttgagaaaacccacctagagcatcaacaaagaatagaatctaaagtttgtaaggcagccatcgccacattttatgttaatgttaaagaacaattcatcaaaatgcttaaagaaagccagatgttgacaaatctgaaaaggaagaatgctaagatgatttcagatatcgaaaagaaaaggcagcgtatgattgaagtccaggatgaactgcttcgtctctggacaggtgctggcctatggtaa

SEQ ID NO: 216034 - DNA, 1257 bp, Artificial Sequence
  derived and/or modified sequence
atggccccccggggccggcggcggccccggccccaccggagcgagggtgccaggcggagtaagaacactttggagcggactcactctatgaaagacaaggcaggacagaaatgtaaacccattgatgtgttcgattttcctgacaattccgacgttagtagcattggacggttgggagaaaacgaaaaggatgaggagacatatgagacgtttgaccctccactccattccacagctatatacgctgatgaggaggaattcagtaagcattgcggattatctctgagctcaacaccgccgggcaaggaggccaagcgaagctcggatacctccggcaacgaagctagtgaaatcgaatcagtgaaaataagtgctaaaaaacctggacgcaagctgagacctatctccgatgattctgaatccattgaagagtccgacacaagacgtaaagtgaagtccgctgagaaaatcagtacacagcgccacgaggtaattcggactacggccagctcagagctcagcgaaaaaccagctgagagtgtgacctctaaaaagaccggaccattaagtgctcagccgtctgtggagaaagaaaacttagcaattgaatctcagtctaagacccaaaaaaagggcaagatctctcatgacaagcgcaagaagtcaagaagtaaagcaattgggtctgatacctccgacatcgtgcatatctggtgccctgagggcatgaagacatctgacatcaaggagttaaacatagtcctaccagagttcgagaaaacgcatctcgagcaccagcagaggattgaaagcaaggtgtgtaaagctgctatcgctactttctatgtcaacgtgaaggaacagttcattaagatgttaaaggagtcacagatgctcactaacttaaaacgtaagaacgctaagatgatcagtgacatcgagaaaaaacggcagcggatgatcgaagtgcaggacgaactgctgcgcctggaaccgcagctgaagcaattacagactaagtacgatgagctcaaggaacgcaaaagtagtctgaggaacgctgcctattttttgagcaacctgaagcagctgtaccaggactactcagatgtgcaggcccaagaaccaaacgtgaaggagacctacgatagctcatcattacctgcactcctgttcaaagccagaactctgctgggtgcggaatcacacttaagaaatataaaccatcagctagaaaagctgctggaccaaggctag

SEQ ID NO: 216035 - DNA, 963 bp, Artificial Sequence
  derived and/or modified sequence
atggccccccggggccggcggcggccccggccccaccggagcgagggcgctagacggagtaagaataccctggaaaggactcattccatgaaggacaaggccggtcagaagtgcaagccaatcgatgtatttgactttcccgacaacagcgatgtgagctctatcggccgcctaggcgagaatgaaaaagatgaagaaacatacgagacatttgacccgccgctgcattccacagcgatatatgccgacgaggaggaattttcaaagcattgcgggctaagcttgtcctccactccccccggcaaggaggccaagagaagctccgatacctcaggaaacgaggctagtgagatcgaaagcgtcaagatcagcgcgaaaaagcccgggaggaagctcaggccgatctccgatgattcggagagcattgaagagtctgacacgcgaagaaaggtaaaatctgcagagaaaatttccactcagagacatgaggtgatccgtaccaccgcatcctctgagctgagcgaaaagcccgctgaaagtgtgacgtccaaaaagaccgggccactctcagcccagccctctgtagagaaagagaatctggcaattgagagtcaaagtaaaacccagaagaagggcaagatctcccacgacaaaagaaagaaaagccggagtaaagcgataggctccgatacttctgacatagttcacatttggtgcccagaagggatgaaaacatctgatattaaagagcttaacattgtgttacctgaatttgagaagactcatttagaacaccaacagaggatcgaatccaaagtctgcaaggctgcgattgccacattctatgttaacgttaaagagcaatttatcaaaatgttaaaggagagtcagatgctgactaatctgaagagaaaaaacgctaaggtgcgtgctacagcagaaacaacaacaaataaaatatag

SEQ ID NO: 216036 - DNA, 963 bp, Artificial Sequence
  derived and/or modified sequence
atggccccccggggccggcggcggccccggccccaccggagcgagtctgcgagacggtccaaaaacactttggaaaggacacactccatgaaggataaagcaggccagaagtgcaagcctattgacgtcttcgacttcccagacaatagcgatgtatcatccattggcaggctgggagaaaacgaaaaggatgaggagacctacgaaacctttgatcccccattgcacagcaccgccatctacgctgacgaggaagagttctcgaagcattgtggtttatctctatctagcacgcctcctggtaaagaggccaagaggagctccgatacaagtggcaatgaggctagcgaaatcgaatcagtgaagatcagtgccaaaaaaccagggaggaagctacgccctatttccgatgatagcgagagcatcgaagaaagcgatactcgacggaaggtgaaaagcgcggaaaagatctccactcagagacatgaagtgatcagaacaaccgcctcatctgaactcagcgaaaaaccagcggaaagcgtgacgtctaaaaagactggtccattgtctgcccagccctcagtggagaaagaaaacttggcaatcgagagtcaatcgaagacacagaagaaaggcaagatcagccacgataaacgaaagaaatcccgatcgaaggctatcggcagcgatacttccgatatcgtgcacatttggtgccctgaggggatgaagactagcgacattaaggagttaaacattgtgctgccggagtttgagaaaactcacctcgagcaccaacaacggattgagtctaaagtgtgcaaggctgccatcgctaccttctatgtcaacgtcaaagagcagtttataaagatgctcaaggagtctcagatgctgactaacctgaagaggaagaacgccaaagtgagggctactgctgagactacaaccaacaagatttag

SEQ ID NO: 216037 - DNA, 1014 bp, Artificial Sequence
  derived and/or modified sequence
atggccccccggggccggcggcggccccggccccaccggagcgagggagcccgcagatctaaaaacacactggagcgcacccactctatgaaagataaagccgggcaaaagtgcaagcctatcgatgtgtttgacttcccagataattctgacgtctcatccataggcaggttgggcgaaaatgaaaaggacgaggagacctacgagactttcgatccccccttgcattctactgctatctatgcagacgaggaagagttctccaagcattgcggactgagcctctcatcaacacccccaggaaaggaagctaaacgatccagcgacacatctgggaatgaagcttccgaaatagaaagtgtgaaaatctcagcgaaaaagcctgggcgtaagctgcgacccatcagcgatgattcagagagcattgaggaaagtgacactaggagaaaggtgaaaagtgcggagaagatttccacacagaggcatgaagtgataaggaccacagcctcctccgagcttagcgagaaacctgccgagtcagtcaccagcaaaaagacagggccactgtccgcacagccatctgtggagaaggagaacctggcaatcgaatctcagtcgaagacgcagaaaaaggggaaaattagtcatgacaagagaaagaaatctaggtccaaggccataggctccgacacatcagacatcgtgcacatatggtgccctgaggggatgaagacttccgatatcaaagagctgaatattgttcttccagaattcgagaaaacgcatctggaacatcagcagcggatcgaatctaaggtgtgcaaggctgctatcgctaccttctatgtgaatgttaaagagcagttcattaagatgctcaaggagagccagatgcttactaatttgaagcggaaaaacgctaagatgatctctgacatcgaaaaaaagaggcagcgaatgatcgaggtccaagatgaactgttgcgcttgtggacaggggccggactgtggtag

SEQ ID NO: 216038 - DNA, 1257 bp, Artificial Sequence
  derived and/or modified sequence
atggcaccacgcggtcggaggcgcccaaggccacacagaagcgagggggcacgcaggagcaagaacaccctggagcgtacccatagtatgaaagataaggccggacaaaaatgcaaacctatcgacgtgtttgacttccccgacaatagtgatgtatctagtatcgggagactgggagaaaatgagaaagatgaggaaacttatgagacctttgacccccctcttcactcaactgccatttacgcagatgaagaggagttttctaaacattgtggcctcagcctttccagcaccccccctgggaaggaggcgaagcgaagcagcgacaccagtggcaacgaagcctctgagatcgagtctgtgaaaatctccgccaagaaacccggtcggaagctgagaccaatcagcgacgactctgagtccatagaagagagtgacacaagaaggaaagttaagtcggccgaaaaaatctccactcaacgacacgaggttattcgaactacggccagttccgagctgtctgaaaagcctgctgagtctgtgacaagtaaaaagaccgggcctctgtcagcccagccatctgtcgaaaaagaaaacctggccatagagtcacaatcaaaaacgcaaaaaaagggaaagatcagtcacgacaaaaggaaaaaatcaagatccaaggcaatcggctctgacaccagcgacattgtgcatatctggtgccctgaaggcatgaaaacttccgatatcaaagaactgaacattgttttgccggagttcgaaaagactcacttggagcaccagcaaagaatcgaatccaaagtctgcaaggctgccatcgcgacattttatgtgaacgtcaaagagcagtttattaagatgctaaaagagagccagatgctgaccaatctcaagcggaagaatgcaaagatgatatccgatatcgaaaagaagaggcagcgcatgattgaagtccaggatgaactccttagactcgagccccagctgaaacagctgcaaactaagtatgatgaacttaaagaacgcaagtctagtctccggaacgccgcttatttcttaagcaacctgaagcaattatatcaggattatagcgatgtgcaggcgcaggaacccaacgtcaaagagacatatgacagttcctctctaccggctcttctgttcaaagccagaacactgctcggagcagaatcacacctgcgaaacattaatcaccaactggaaaagctccttgatcaaggctag

SEQ ID NO: 216039 - DNA, 963 bp, Artificial Sequence
  derived and/or modified sequence
atggctccaaggggcagacgccgtcctcgaccccataggtccgaaggtgctaggcgttccaagaatacactcgagagaactcattccatgaaagataaagctggacagaaatgcaagcctatcgacgttttcgactttccagataatagtgacgtttcttccatcggcaggctgggggagaacgagaaggatgaggaaacttatgaaactttcgacccacctttgcattccacagccatctacgccgacgaagaggagttctccaaacactgcggcttatcactgagctccacgccccctggcaaagaagcaaagagaagtagtgacacatcaggaaatgaagccagcgagattgagtcagtgaagattagtgctaaaaagcctggtagaaagcttcgacccatcagcgacgattcagagtccatcgaagagtcagatacgcggagaaaggtaaaatctgcagagaagatatcgactcaaaggcacgaagtgattcggacaacagcaagctccgaactgagtgagaagcctgctgagagcgttacatccaaaaaaacaggaccgcttagcgcacaaccatctgtagaaaaggaaaacttggcaatcgagtcacaatcaaagacacagaaaaaaggtaagattagtcatgataaacgtaaaaaaagcaggagcaaagccatagggtctgatacctcagacatcgtgcatatttggtgtcctgaggggatgaaaacctcagacataaaggaactgaacatcgtgctgccagagtttgagaaaacgcacctggagcaccagcagaggatcgaaagtaaggtgtgtaaagcagctatagcgacattctatgtcaacgtaaaggaacagttcattaagatgttgaaggagagtcagatgctcaccaatctgaagcgcaaaaatgccaaagtgagagcgacagccgagaccacaacgaacaagatctag

SEQ ID NO: 216040 - DNA, 963 bp, Artificial Sequence
  derived and/or modified sequence
atggcacctcgaggaagacgacgacctagacctcaccgctccgagtcagctcgtaggagcaagaacacactggagcgcacacacagtatgaaggacaaagctgggcagaaatgtaaaccaatcgatgtgtttgacttccctgacaattcggacgtcagctctatcggcaggctcggcgagaacgagaaagacgaagagacctacgagacattcgaccccccactgcacagcacagctatttatgctgacgaagaggagttctctaagcattgtggccttagtctcagttccacgccgccaggcaaggaggctaaacgcagttctgatacttcaggcaatgaagcctctgagattgagagcgttaagatttctgctaagaaaccgggtaggaagttgcgaccaatttcagacgattccgaaagcatagaggagtctgacacccgaaggaaagtgaagagcgcggaaaagatctctacacagcggcacgaggtgataagaactaccgcctcctccgagctctctgagaaacccgcagaatccgtaacgtccaaaaaaacaggcccattgtcagcccagccttccgtcgagaaagaaaacttggccatcgagagccagagcaagactcagaaaaaggggaaaatctcacacgacaaaagaaagaagagtcggtctaaggcaattggctccgatactagcgatatagtacacatatggtgccccgaggggatgaaaacttccgacatcaaggagctgaacattgtgttgcccgaattcgagaaaactcatctggagcatcaacagaggatcgagtctaaggtgtgcaaggcagccattgccaccttttatgtgaacgttaaggagcaattcattaagatgctgaaggaaagccaaatgcttaccaacttgaaacggaagaacgctaaagtgcgcgctactgccgagaccacaaccaataagatctag

SEQ ID NO: 216041 - DNA, 1014 bp, Artificial Sequence
  derived and/or modified sequence
atggcacctcgaggcaggaggcgccctagacctcaccgcagcgagggggctagacgctccaagaatacactcgagaggacccattcaatgaaggacaaggccggacagaagtgcaagccaatcgacgtcttcgacttcccagacaactccgacgttagtagcatcgggcgactgggggagaatgagaaggatgaggagacttatgaaactttcgatccccctcttcactccaccgccatttatgccgacgaggaagaattctctaagcactgcggcctctctctgtctagtacaccacctggcaaagaggctaagaggtcaagcgacacttcgggcaatgaagcctccgagattgagagtgttaagatctccgccaagaaacccggacggaagctacgaccaatttccgacgattccgagagcatagaggaatctgacacaagaaggaaggtgaaaagcgccgaaaagatttctactcaacggcacgaggtgattaggaccacggccagtagtgagctgtccgagaaacctgcagaatctgtcacttctaagaaaactgggccactctctgcccagccctctgtagaaaaagaaaacctggcgattgaaagccaatcaaagacgcagaaaaaaggaaaaatttcacatgacaagagaaagaagagcagatcgaaagctattggctctgacaccagcgacatcgtccacatttggtgcccagaaggcatgaaaacatccgacatcaaggagctaaatattgtcctccctgagttcgagaaaacacacctagagcaccagcaacgaattgagtctaaggtgtgtaaagctgcaatcgcaaccttttacgtgaacgttaaagagcagttcataaaaatgctgaaagaatctcaaatgctcacaaatctaaagcgcaaaaatgcaaaaatgatcagcgacatcgaaaagaagcgccagcggatgatcgaggtgcaggacgaattactcaggctctggaccggggcagggctctggtag

SEQ ID NO: 216042 - DNA, 1257 bp, Artificial Sequence
  derived and/or modified sequence
atggcccccagaggcagaagaagacccagaccccacagaagcgagggcgccagaagaagcaagaacaccctggagagaacccacagcatgaaggacaaggccggccagaagtgcaagcccatcgacgtgttcgacttccccgacaacagcgacgtgagcagcatcggcagactgggcgagaacgagaaggacgaggagacctacgagaccttcgacccccccctgcacagcaccgccatctacgccgacgaggaggagttcagcaagcactgcggcctgagcctgagcagcaccccccccggcaaggaggccaagagaagcagcgacaccagcggcaacgaggccagcgagatcgagagcgtgaagatcagcgccaagaagcccggcagaaagctgagacccatcagcgacgacagcgagagcatcgaggagagcgacaccagaagaaaggtgaagagcgccgagaagatcagcacccagagacacgaggtgatcagaaccaccgccagcagcgagctgagcgagaagcccgccgagagcgtgaccagcaagaagaccggccccctgagcgcccagcccagcgtggagaaggagaacctggccatcgagagccagagcaagacccagaagaagggcaagatcagccacgacaagagaaagaagagcagaagcaaggccatcggcagcgacaccagcgacatcgtgcacatctggtgccccgagggcatgaagaccagcgacatcaaggagctgaacatcgtgctgcccgagttcgagaagacccacctggagcaccagcagagaatcgagagcaaggtgtgcaaggccgccatcgccaccttctacgtgaacgtgaaggagcagttcatcaagatgctgaaggagagccagatgctgaccaacctgaagagaaagaacgccaagatgatcagcgacatcgagaagaagagacagagaatgatcgaggtgcaggacgagctgctgagactggagccccagctgaagcagctgcagaccaagtacgacgagctgaaggagagaaagagcagcctgagaaacgccgcctacttcctgagcaacctgaagcagctgtaccaggactacagcgacgtgcaggcccaggagcccaacgtgaaggagacctacgacagcagcagcctgcccgccctgctgttcaaggccagaaccctgctgggcgccgagagccacctgagaaacatcaaccaccagctggagaagctgctggaccagggctag

SEQ ID NO: 216043 - DNA, 963 bp, Artificial Sequence
  derived and/or modified sequence
atggcccccagaggcagaagaagacccagaccccacagaagcgagggcgccagaagaagcaagaacaccctggagagaacccacagcatgaaggacaaggccggccagaagtgcaagcccatcgacgtgttcgacttccccgacaacagcgacgtgagcagcatcggcagactgggcgagaacgagaaggacgaggagacctacgagaccttcgacccccccctgcacagcaccgccatctacgccgacgaggaggagttcagcaagcactgcggcctgagcctgagcagcaccccccccggcaaggaggccaagagaagcagcgacaccagcggcaacgaggccagcgagatcgagagcgtgaagatcagcgccaagaagcccggcagaaagctgagacccatcagcgacgacagcgagagcatcgaggagagcgacaccagaagaaaggtgaagagcgccgagaagatcagcacccagagacacgaggtgatcagaaccaccgccagcagcgagctgagcgagaagcccgccgagagcgtgaccagcaagaagaccggccccctgagcgcccagcccagcgtggagaaggagaacctggccatcgagagccagagcaagacccagaagaagggcaagatcagccacgacaagagaaagaagagcagaagcaaggccatcggcagcgacaccagcgacatcgtgcacatctggtgccccgagggcatgaagaccagcgacatcaaggagctgaacatcgtgctgcccgagttcgagaagacccacctggagcaccagcagagaatcgagagcaaggtgtgcaaggccgccatcgccaccttctacgtgaacgtgaaggagcagttcatcaagatgctgaaggagagccagatgctgaccaacctgaagagaaagaacgccaaggtgagagccaccgccgagaccaccaccaacaagatctag

SEQ ID NO: 216044 - DNA, 963 bp, Artificial Sequence
  derived and/or modified sequence
atggcccccagaggcagaagaagacccagaccccacagaagcgagagcgccagaagaagcaagaacaccctggagagaacccacagcatgaaggacaaggccggccagaagtgcaagcccatcgacgtgttcgacttccccgacaacagcgacgtgagcagcatcggcagactgggcgagaacgagaaggacgaggagacctacgagaccttcgacccccccctgcacagcaccgccatctacgccgacgaggaggagttcagcaagcactgcggcctgagcctgagcagcaccccccccggcaaggaggccaagagaagcagcgacaccagcggcaacgaggccagcgagatcgagagcgtgaagatcagcgccaagaagcccggcagaaagctgagacccatcagcgacgacagcgagagcatcgaggagagcgacaccagaagaaaggtgaagagcgccgagaagatcagcacccagagacacgaggtgatcagaaccaccgccagcagcgagctgagcgagaagcccgccgagagcgtgaccagcaagaagaccggccccctgagcgcccagcccagcgtggagaaggagaacctggccatcgagagccagagcaagacccagaagaagggcaagatcagccacgacaagagaaagaagagcagaagcaaggccatcggcagcgacaccagcgacatcgtgcacatctggtgccccgagggcatgaagaccagcgacatcaaggagctgaacatcgtgctgcccgagttcgagaagacccacctggagcaccagcagagaatcgagagcaaggtgtgcaaggccgccatcgccaccttctacgtgaacgtgaaggagcagttcatcaagatgctgaaggagagccagatgctgaccaacctgaagagaaagaacgccaaggtgagagccaccgccgagaccaccaccaacaagatctag

SEQ ID NO: 216045 - DNA, 1014 bp, Artificial Sequence
  derived and/or modified sequence
atggcccccagaggcagaagaagacccagaccccacagaagcgagggcgccagaagaagcaagaacaccctggagagaacccacagcatgaaggacaaggccggccagaagtgcaagcccatcgacgtgttcgacttccccgacaacagcgacgtgagcagcatcggcagactgggcgagaacgagaaggacgaggagacctacgagaccttcgacccccccctgcacagcaccgccatctacgccgacgaggaggagttcagcaagcactgcggcctgagcctgagcagcaccccccccggcaaggaggccaagagaagcagcgacaccagcggcaacgaggccagcgagatcgagagcgtgaagatcagcgccaagaagcccggcagaaagctgagacccatcagcgacgacagcgagagcatcgaggagagcgacaccagaagaaaggtgaagagcgccgagaagatcagcacccagagacacgaggtgatcagaaccaccgccagcagcgagctgagcgagaagcccgccgagagcgtgaccagcaagaagaccggccccctgagcgcccagcccagcgtggagaaggagaacctggccatcgagagccagagcaagacccagaagaagggcaagatcagccacgacaagagaaagaagagcagaagcaaggccatcggcagcgacaccagcgacatcgtgcacatctggtgccccgagggcatgaagaccagcgacatcaaggagctgaacatcgtgctgcccgagttcgagaagacccacctggagcaccagcagagaatcgagagcaaggtgtgcaaggccgccatcgccaccttctacgtgaacgtgaaggagcagttcatcaagatgctgaaggagagccagatgctgaccaacctgaagagaaagaacgccaagatgatcagcgacatcgagaagaagagacagagaatgatcgaggtgcaggacgagctgctgagactgtggaccggcgccggcctgtggtag

SEQ ID NO: 216046 - protein, 488 aa, Artificial Sequence
  derived and/or modified sequence
MPPGGGGPMKDCEYSQISTHSSSPMESPHKKKKIAARRKWEVFPGRNKFFCNGRIMMARQTGVFYLTLVLILVTSGLFFAFDCPYLAVKITPAIPAVAGILFFFVMGTLLRTSFSDPGVLPRATPDEAADLERQIDIANGTSSGGYRPPPRTKEVIINGQTVKLKYCFTCKIFRPPRASHCSLCDNCVERFDHHCPWVGNCVGKRNYRFFYMFILSLSFLTVFIFAFVITHVILRSQQTGFLNALKDSPASVLEAVVCFFSVWSIVGLSGFHTYLISSNQTTNEDIKGSWSNKRGKENYNPYSYGNIFTNCCVALCGPISPSLIDRRGYIQPDTPQPAAPSNGITMYGATQSQSDMCDQDQCIQSTKFVLQAAATPLLQSEPSLTSDELHLPGKPGLGTPCASLTLGPPTPPASMPNLAEATLADVMPRKDEHMGHQFLTPDEAPSPPRLLAAGSPLAHSRTMHVLGLASQDSLHEDSVRGLVKLSSV

SEQ ID NO: 216047 - protein, 492 aa, Artificial Sequence
  derived and/or modified sequence
EVAPEEAGGGGPMKDCEYSQISTHSSSPMESPHKKKKIAARRKWEVFPGRNKFFCNGRIMMARQTGVFYLTLVLILVTSGLFFAFDCPYLAVKITPAIPAVAGILFFFVMGTLLRTSFSDPGVLPRATPDEAADLERQIDIANGTSSGGYRPPPRTKEVIINGQTVKLKYCFTCKIFRPPRASHCSLCDNCVERFDHHCPWVGNCVGKRNYRFFYMFILSLSFLTVFIFAFVITHVILRSQQTGFLNALKDSPASVLEAVVCFFSVWSIVGLSGFHTYLISSNQTTNEDIKGSWSNKRGKENYNPYSYGNIFTNCCVALCGPISPSLIDRRGYIQPDTPQPAAPSNGITMYGATQSQSDMCDQDQCIQSTKFVLQAAATPLLQSEPSLTSDELHLPGKPGLGTPCASLTLGPPTPPASMPNLAEATLADVMPRKDEHMGHQFLTPDEAPSPPRLLAAGSPLAHSRTMHVLGLASQDSLHEDSVRGLVKLSSV

SEQ ID NO: 216048 - DNA, 1467 bp, Artificial Sequence
  derived and/or modified sequence
atgccccccggcggcggcggccccatgaaggactgcgagtacagccagatcagcacccacagcagcagccccatggagagcccccacaagaagaagaagatcgccgccagaagaaagtgggaggtgttccccggcagaaacaagttcttctgcaacggcagaatcatgatggccagacagaccggcgtgttctacctgaccctggtgctgatcctggtgaccagcggcctgttcttcgccttcgactgcccctacctggccgtgaagatcacccccgccatccccgccgtggccggcatcctgttcttcttcgtgatgggcaccctgctgagaaccagcttcagcgaccccggcgtgctgcccagagccacccccgacgaggccgccgacctggagagacagatcgacatcgccaacggcaccagcagcggcggctacagacccccccccagaaccaaggaggtgatcatcaacggccagaccgtgaagctgaagtactgcttcacctgcaagatcttcagaccccccagagccagccactgcagcctgtgcgacaactgcgtggagagattcgaccaccactgcccctgggtgggcaactgcgtgggcaagagaaactacagattcttctacatgttcatcctgagcctgagcttcctgaccgtgttcatcttcgccttcgtgatcacccacgtgatcctgagaagccagcagaccggcttcctgaacgccctgaaggacagccccgccagcgtgctggaggccgtggtgtgcttcttcagcgtgtggagcatcgtgggcctgagcggcttccacacctacctgatcagcagcaaccagaccaccaacgaggacatcaagggcagctggagcaacaagagaggcaaggagaactacaacccctacagctacggcaacatcttcaccaactgctgcgtggccctgtgcggccccatcagccccagcctgatcgacagaagaggctacatccagcccgacaccccccagcccgccgcccccagcaacggcatcaccatgtacggcgccacccagagccagagcgacatgtgcgaccaggaccagtgcatccagagcaccaagttcgtgctgcaggccgccgccacccccctgctgcagagcgagcccagcctgaccagcgacgagctgcacctgcccggcaagcccggcctgggcaccccctgcgccagcctgaccctgggcccccccaccccccccgccagcatgcccaacctggccgaggccaccctggccgacgtgatgcccagaaaggacgagcacatgggccaccagttcctgacccccgacgaggcccccagcccccccagactgctggccgccggcagccccctggcccacagcagaaccatgcacgtgctgggcctggccagccaggacagcctgcacgaggacagcgtgagaggcctggtgaagctgagcagcgtgtag

SEQ ID NO: 216049 - DNA, 1479 bp, Artificial Sequence
  derived and/or modified sequence
gaggtggcccccgaggaggccggcggcggcggccccatgaaggactgcgagtacagccagatcagcacccacagcagcagccccatggagagcccccacaagaagaagaagatcgccgccagaagaaagtgggaggtgttccccggcagaaacaagttcttctgcaacggcagaatcatgatggccagacagaccggcgtgttctacctgaccctggtgctgatcctggtgaccagcggcctgttcttcgccttcgactgcccctacctggccgtgaagatcacccccgccatccccgccgtggccggcatcctgttcttcttcgtgatgggcaccctgctgagaaccagcttcagcgaccccggcgtgctgcccagagccacccccgacgaggccgccgacctggagagacagatcgacatcgccaacggcaccagcagcggcggctacagacccccccccagaaccaaggaggtgatcatcaacggccagaccgtgaagctgaagtactgcttcacctgcaagatcttcagaccccccagagccagccactgcagcctgtgcgacaactgcgtggagagattcgaccaccactgcccctgggtgggcaactgcgtgggcaagagaaactacagattcttctacatgttcatcctgagcctgagcttcctgaccgtgttcatcttcgccttcgtgatcacccacgtgatcctgagaagccagcagaccggcttcctgaacgccctgaaggacagccccgccagcgtgctggaggccgtggtgtgcttcttcagcgtgtggagcatcgtgggcctgagcggcttccacacctacctgatcagcagcaaccagaccaccaacgaggacatcaagggcagctggagcaacaagagaggcaaggagaactacaacccctacagctacggcaacatcttcaccaactgctgcgtggccctgtgcggccccatcagccccagcctgatcgacagaagaggctacatccagcccgacaccccccagcccgccgcccccagcaacggcatcaccatgtacggcgccacccagagccagagcgacatgtgcgaccaggaccagtgcatccagagcaccaagttcgtgctgcaggccgccgccacccccctgctgcagagcgagcccagcctgaccagcgacgagctgcacctgcccggcaagcccggcctgggcaccccctgcgccagcctgaccctgggcccccccaccccccccgccagcatgcccaacctggccgaggccaccctggccgacgtgatgcccagaaaggacgagcacatgggccaccagttcctgacccccgacgaggcccccagcccccccagactgctggccgccggcagccccctggcccacagcagaaccatgcacgtgctgggcctggccagccaggacagcctgcacgaggacagcgtgagaggcctggtgaagctgagcagcgtgtag

SEQ ID NO: 216050 - DNA, 1467 bp, Artificial Sequence
  derived and/or modified sequence
atgcctccgggaggcggcggccctatgaaagactgtgagtatagccagatatccacccactcttcaagtccgatggaaagccctcataaaaaaaaaaaaatcgccgctcgtcgcaagtgggaggtgttccccggaaggaacaaattcttctgcaacgggcgcatcatgatggcacgccagaccggcgtgttctatctgacattggtgcttatcctggtgacatctgggctcttcttcgcctttgactgtccttacctggccgtgaagattacgcccgcaattccggcggtggcaggtattcttttcttctttgttatgggaacgctgctgcgaacgtctttctctgatccaggcgtcctgccacgagcaacaccagatgaggccgcagatctcgaaagacagatagatatcgctaacggcaccagcagtgggggctataggccccctccaaggacaaaggaggtgattatcaacggtcagacggtcaagcttaagtactgcttcacgtgcaagatatttcggccaccaagagcttctcactgtagtctctgcgacaactgtgtggagagatttgaccaccactgtccttgggtgggtaattgtgtggggaagcggaactacaggtttttttacatgttcatcctctccctctcatttttaaccgtttttatctttgctttcgtgataacacatgtcattctacggtctcagcaaactggatttctaaatgccctgaaggacagtcccgcctcggtgttggaagctgtagtgtgcttcttcagtgtgtggtcgattgtgggactgagtggattccacacgtatcttattagtagcaatcagacaaccaatgaagacatcaaggggtcatggagtaacaaacggggtaaagaaaactacaatccatatagttatggtaatatcttcacaaactgctgtgtggccctctgtggaccaatctctccttcgctcatcgatcgacgcgggtatattcagcctgacactccccagccggcggctccctccaatgggatcacaatgtatggagctacacagagccaaagtgatatgtgtgatcaggatcagtgtatacagtctaccaaattcgtgctgcaggcagctgctactcccctgctgcagtccgaaccttcacttacctcagacgaattacatctgcccggcaagccaggattgggtacaccctgtgcctctctcacactgggacctcctacacctccagcaagtatgcctaatctggccgaggcgacgctcgccgacgtgatgccgcggaaagacgagcatatggggcaccagttcctgacacccgatgaggcgcccagcccgccaaggttactggcagccgggtcacctcttgcccatagtcggactatgcacgtgttaggactcgcatcccaggactccctgcacgaagatagcgtgcgcggacttgtgaagctaagctctgtatag

SEQ ID NO: 216051 - DNA, 1479 bp, Artificial Sequence
  derived and/or modified sequence
gaggtggcaccagaggaagcaggtggcggagggcctatgaaggactgcgagtatagccagatctccactcatagttcttcccctatggaatctccccacaagaagaagaaaatagccgcccgccgtaagtgggaggtctttccaggcagaaacaagttcttttgtaatggccgcattatgatggcgcgacaaacaggggtgttttatctgacactggtgttgatactcgtcaccagcggcctgttctttgccttcgactgcccctatctcgccgttaaaatcactccagctatccccgcagtcgccgggatcctttttttttttgttatggggacgttactacgaacgagtttttctgaccctggcgtgcttcccagagcgacccctgatgaagcagccgatctagaacggcaaatcgatatcgcgaacggtacatcgtccggtggctaccgaccccccccgcgcacaaaagaagtaatcataaacggccagacggtaaagcttaaatactgcttcacgtgtaagattttccgcccaccacgagcctcacattgttcgctgtgcgataattgtgtagagcgcttcgatcaccattgcccttgggtgggtaattgcgttggcaaaaggaactacagattcttctatatgtttattctctcattgtctttcctgaccgttttcatttttgcttttgttatcacccatgtgatccttaggtcacagcagacggggttcttgaacgctctgaaagacagccctgcttctgttctggaagccgtggtttgtttctttagcgtatggagtatcgtggggttgagtggctttcatacctatcttatttcttcaaatcagacaacaaacgaagatattaaaggatcttggtccaacaagcgcggcaaagagaattataacccttactcctacggcaatatctttacaaactgttgtgtcgctctgtgtggccccatctctccatcgcttatagaccgcagggggtatatccaacctgacacacctcagccagccgccccgtctaacgggattactatgtacggcgctacccagagccaaagtgacatgtgcgatcaggatcagtgtatccagtctacaaagtttgttctgcaagccgcggcaacccctctgcttcaaagcgagccctcgctcactagcgatgaactgcacctgccggggaagccagggctgggaaccccttgtgcttctctgacccttggccccccaacgccaccagcctcaatgcctaacctggccgaggccactttagccgatgtcatgccccgcaaagatgaacacatgggccatcaattcctgacccccgatgaggcaccctcacctccaaggctgctggccgccgggagcccattagcgcacagcaggactatgcacgtgcttggcttagcctcccaggatagcctgcatgaggacagcgtgcgtggccttgtgaaattatcgtctgtgtag

SEQ ID NO: 216052 - DNA, 1467 bp, Artificial Sequence
  derived and/or modified sequence
atgcctcctgggggcggcggccccatgaaggactgtgagtacagccagatcagcacccacagcagcagccccatggagagcccccacaagaagaagaagattgctgcccggaggaagtgggaggtgtttcctggcaggaacaagttcttctgcaatggccgcatcatgatggcccggcagacaggagtcttctacctgaccctggtgctgatcctggtgaccagcggcctcttctttgcctttgactgcccctacctggccgtgaagatcaccccagccatcccagctgtggccggcatcctcttcttctttgtgatgggcaccctgctgcggaccagcttcagtgaccccggggtgctgccccgggccaccccagatgaggccgctgacctggagcggcagattgatattgccaacggcaccagcagcggcggctaccggcccccacccaggaccaaggaggtgatcatcaatggccagacagtgaagctgaagtactgcttcacctgcaagatcttccggcccccccgggccagccactgcagcctgtgtgacaactgtgtggagagatttgaccaccactgcccctgggtgggcaactgtgtgggcaagaggaactaccgcttcttctacatgttcatcctgagcctgtccttcctgactgtgttcatctttgcctttgtgatcacccacgtgatcctgcggagccagcagacaggcttcctgaatgccctgaaggacagccctgcctctgtgctggaggccgtggtgtgcttcttctctgtgtggagcatcgtgggcctgagcggcttccacacctacctgatcagcagcaaccagaccaccaatgaagacatcaagggctcctggagcaacaagaggggcaaggagaactacaacccctacagctatggcaacatcttcaccaactgctgcgtggccctgtgtggccccatcagccccagcctgattgaccggcggggctacatccagcctgacaccccccagcctgctgcccccagcaatggcatcaccatgtatggagccacccagagccagagcgacatgtgtgaccaggaccagtgcatccagagcaccaagtttgtgctgcaggccgccgccacccccctgctgcagagcgagcccagcctgaccagtgatgagctgcacctgcccgggaagccaggcctgggcaccccctgtgccagcctgaccctgggcccccccaccccaccagcctccatgcccaacctggccgaggccaccctggctgatgtgatgcccaggaaggatgagcacatgggccaccagttcctgaccccagatgaggcccccagccccccccggctgctggccgccggcagccccctggcccacagcaggaccatgcacgtgctgggcctggccagccaggacagcctgcacgaggacagcgtgcggggcctggtgaagctgagctctgtgtag

SEQ ID NO: 216053 - DNA, 1479 bp, Artificial Sequence
  derived and/or modified sequence
gaggtggcccctgaggaggccggcggcggcggccccatgaaggactgtgagtacagccagatcagcacccacagcagcagccccatggagagcccccacaagaagaagaagattgctgcccggaggaagtgggaggtgtttcctggcaggaacaagttcttctgcaatggccgcatcatgatggcccggcagacaggagtcttctacctgaccctggtgctgatcctggtgaccagcggcctcttctttgcctttgactgcccctacctggccgtgaagatcaccccagccatcccagctgtggccggcatcctcttcttctttgtgatgggcaccctgctgcggaccagcttcagtgaccccggggtgctgccccgggccaccccagatgaggccgctgacctggagcggcagattgatattgccaacggcaccagcagcggcggctaccggcccccacccaggaccaaggaggtgatcatcaatggccagacagtgaagctgaagtactgcttcacctgcaagatcttccggcccccccgggccagccactgcagcctgtgtgacaactgtgtggagagatttgaccaccactgcccctgggtgggcaactgtgtgggcaagaggaactaccgcttcttctacatgttcatcctgagcctgtccttcctgactgtgttcatctttgcctttgtgatcacccacgtgatcctgcggagccagcagacaggcttcctgaatgccctgaaggacagccctgcctctgtgctggaggccgtggtgtgcttcttctctgtgtggagcatcgtgggcctgagcggcttccacacctacctgatcagcagcaaccagaccaccaatgaagacatcaagggctcctggagcaacaagaggggcaaggagaactacaacccctacagctatggcaacatcttcaccaactgctgcgtggccctgtgtggccccatcagccccagcctgattgaccggcggggctacatccagcctgacaccccccagcctgctgcccccagcaatggcatcaccatgtatggagccacccagagccagagcgacatgtgtgaccaggaccagtgcatccagagcaccaagtttgtgctgcaggccgccgccacccccctgctgcagagcgagcccagcctgaccagtgatgagctgcacctgcccgggaagccaggcctgggcaccccctgtgccagcctgaccctgggcccccccaccccaccagcctccatgcccaacctggccgaggccaccctggctgatgtgatgcccaggaaggatgagcacatgggccaccagttcctgaccccagatgaggcccccagccccccccggctgctggccgccggcagccccctggcccacagcaggaccatgcacgtgctgggcctggccagccaggacagcctgcacgaggacagcgtgcggggcctggtgaagctgagctctgtgtag

SEQ ID NO: 216054 - DNA, 1467 bp, Artificial Sequence
  derived and/or modified sequence
atgccccccggcggcggcggccccatgaaggactgcgagtacagccaaattagtacccactctagcagcccaatggagtcaccacacaagaaaaagaagatcgccgcacggcgcaagtgggaggtgttccctggacgtaataaattcttctgtaacggaaggatcatgatggcccggcaaaccggagttttctatttgacactggtcctgattttagtgacatctggcttgttcttcgctttcgattgtccctacctggccgttaagatcacccccgccatccccgcagtcgctggtatcctgttctttttcgttatgggcaccctattgcggacaagcttctcagatcccggagtcctgcctagggccacccccgatgaagctgctgatctcgagaggcagatcgacatagccaacgggacttcatccggcggatatcgtccccctcctcgcaccaaggaagtcatcattaacgggcaaaccgtaaaactaaagtattgcttcacgtgtaaaatattcaggccgcctagggcttcccactgtagtctgtgcgataactgtgtagagaggtttgatcaccactgtccctgggtagggaattgcgtggggaaacgcaattaccgcttcttttacatgtttatcctgtcgttgtcatttctgactgtattcattttcgcttttgtgataactcacgtaattctccgatcacagcaaaccggatttctaaacgccctgaaggatagtccggctagcgtcctggaagccgtagtgtgcttcttcagcgtctggtcaatagtagggctctcaggctttcatacttacctaatatcaagtaaccaaactactaacgaagatatcaagggatcttggtctaataagcggggtaaagaaaactacaatccctactcttacggaaatattttcacaaactgctgtgtcgcgctctgcgggcctatttcccccagcttaatcgacaggcgaggatacatacagccggacacaccccagccagcggcaccgagtaatggaattaccatgtacggcgccacccagagccagtcagacatgtgtgatcaagaccaatgcatccagtcgaccaaattcgtgttgcaggcggccgctaccccactgctgcagtccgagccgagcctgacatctgatgaactacacctgcctggaaaacccggcctgggcacaccgtgcgcttctctgacactgggacccccgaccccccccgcctccatgcctaatcttgccgaagcaacccttgctgatgtgatgccccgaaaggatgaacatatgggtcatcaattcctgacccccgacgaggcgcccagtccccctcgactgctggccgcagggagcccactcgcacactctaggactatgcacgtcttaggcctcgcaagccaagactcactgcatgaggattccgtcagggggcttgtcaaactttctagcgtgtag

SEQ ID NO: 216055 - DNA, 1479 bp, Artificial Sequence
  derived and/or modified sequence
gaggtggcccccgaggaggccggcggcggcggccccatgaaggactgtgaatactcccagatcagcacccactcaagcagtccgatggagagcccgcacaagaagaagaaaattgccgctcgccggaagtgggaggtgtttcctgggagaaacaagtttttctgtaacggcagaattatgatggcaaggcaaaccggagtgttctacctgacactagtgcttattctggtgacatccgggctttttttcgcattcgattgcccttacttagccgttaaaataaccccagccatcccagctgtggctggcattctgttcttcttcgttatgggcaccttgctgagaacctccttcagtgaccctggtgtgctccccagagcaaccccagacgaggcagctgacctggagcggcaaatcgacatagccaacggcacctcaagcgggggctaccggccgccaccaaggaccaaggaagttatcataaacggacaaacagtgaagctcaaatattgttttacttgtaagatcttcaggccaccgagagccagccattgctcactctgcgacaactgtgtggaaagatttgaccatcattgcccctgggtgggcaattgtgtggggaagcgaaactatcgctttttctacatgtttatactgagtctgtcgtttttgactgtgtttattttcgccttcgtgataacacatgtcattctccgatcccagcagacaggcttcttaaatgccctcaaggatagtccagcgagcgtactggaagcagtggtctgttttttctccgtgtggagtatcgtgggactcagtggctttcacacctacttgatttctagcaaccagacaaccaatgaggatattaagggctcctggagcaacaagcgcggaaaggaaaattacaatccgtatagttacggaaatatcttcaccaactgttgtgtggcactgtgtggacccatctctccaagtttgatcgacaggcgggggtacatacaacctgacaccccccagccagcagcaccttccaacgggattaccatgtatggtgccacccagtcacaatccgacatgtgtgatcaggaccaatgtatacaatctactaagttcgtcctgcaggcggccgccacgcctttgttgcagagcgaaccgtcccttacttccgatgagctccacctaccaggaaaaccaggactgggaaccccctgtgccagtctcacacttggtccacctactcctcctgcgtccatgccgaacctcgcagaggccaccctcgctgacgtgatgcctagaaaagatgaacatatgggtcaccaattcctaacccctgacgaggccccaagtccaccccgcttgctggcggccgggagccctcttgcccattccaggaccatgcacgtgctgggcctggccagccaggatagcttgcacgaggactcagtgcggggccttgtgaagttatcctctgtatag

SEQ ID NO: 216056 - DNA, 1467 bp, Artificial Sequence
  derived and/or modified sequence
atgccaccaggtggcggtggcccaatgaaagattgtgagtactcacagatttcaacccactcgtccagtcccatggagagtccccataaaaagaaaaagatcgcagctcgcaggaagtgggaggtctttccgggacgaaacaagttcttttgtaatggacggatcatgatggcccgacagaccggagtgttctatttgaccctggtccttatattggtcacttcgggtctgttcttcgccttcgactgcccctacttagctgtgaagatcactcctgcaatacctgccgttgcgggtattctgtttttcttcgttatgggcacactgctacgcacttccttttctgatccaggtgtgctgccacgcgctacccctgacgaagccgcagacctggagaggcagatcgatatcgcaaatggcacctcaagtgggggatatagacctccacccaggacaaaagaggtgattattaatgggcagactgtaaaattaaagtactgctttacttgcaagatctttagacctccaagggcttcacactgttcactttgtgacaactgtgtggaaagattcgaccaccattgcccgtgggtgggtaattgtgttggaaagcgcaattatagattcttttacatgtttatcctgtcactgagcttcttaaccgtgtttatcttcgcgtttgtcattacccacgttatactcagatctcagcagactggctttttgaatgccttaaaagatagtccagcatccgtgctagaggccgtggtgtgctttttctccgtgtggtcgattgtcggcctgagtggcttccatacatacctcatcagctccaaccaaaccaccaacgaggatatcaagggcagctggagcaataaaaggggtaaagagaactacaatccgtacagctacggtaacattttcaccaactgttgcgtggccctctgcggccctatctctccatccttaatcgaccggagaggctacattcagccagacactcctcagcctgctgcaccttcaaacggaattactatgtatggagctacacagagccagtccgatatgtgcgatcaggatcagtgcatccaaagtacaaaatttgtgctccaagccgctgctactcccttactgcagtccgaacctagccttacctcagacgagcttcacctgccagggaagcctggcctcgggaccccatgtgccagtctgacactcggcccaccaactcctcccgcaagcatgccaaacctcgcagaggcaaccctcgctgacgtgatgccacgaaaggacgagcatatggggcaccagtttctgacccccgacgaggccccatcaccgccaaggctgttggccgctgggtccccgctggcccacagccgaacaatgcatgtgcttggtctggccagccaggactcacttcacgaagactccgtcagggggctggttaagctgtcatctgtgtag

SEQ ID NO: 216057 - DNA, 1479 bp, Artificial Sequence
  derived and/or modified sequence
gaagttgctccggaggaggccggtggcggaggacccatgaaggattgcgaatacagccagataagtactcacagcagcagccccatggaatcccctcataaaaaaaagaaaatcgctgcgaggcggaaatgggaagtattcccgggaaggaacaagtttttctgcaacgggcgaattatgatggccaggcagacaggggtcttctatcttactctcgtcttgattcttgttacaagtggcctctttttcgcgtttgactgtccatacttggcggttaaaatcacgcctgccattcccgctgttgcgggaattttgtttttcttcgtcatggggacactgctccgcacatcgttttccgatcctggagtcctcccacgggcaactccagacgaagccgctgacctcgagaggcagatcgacatcgcaaacggaactagttccgggggatataggccccctcctaggactaaggaagtgattattaacggccagacagttaagctgaagtattgtttcacctgtaaaatcttccgacccccaagggcttcacattgctccctttgcgacaattgcgtagaacggtttgaccatcattgcccttgggtcggcaattgtgtggggaaaaggaattatcggttcttctacatgtttatcttgagcctgtcctttctgacagtgtttatattcgcgttcgtgataacccatgtgatccttaggtcccagcagactggattcctgaatgctctgaaggattcccctgcttccgttcttgaggctgtagtgtgctttttctccgtctggtccatcgtggggttgtctggcttccacacatacctgatctcttccaatcagactactaacgaggacattaagggcagttggtctaataagcgcggaaaggaaaactacaacccctatagttatggcaacatcttcacaaattgttgcgtggctctttgcgggcctatttcccctagcctgattgaccggcgaggttatattcagccagatactccccagcccgcagctccctccaatggtattacaatgtacggggcaacccagagccagtccgatatgtgcgaccaagaccagtgcatccagtccaccaagttcgtgctacaagccgcagctacaccattgttgcaatcagagccctcccttacatcagacgaactccacctacctgggaaaccaggactggggaccccatgcgcatccctgaccctgggccctccaacaccacccgctagtatgccgaacttggctgaagccacactagctgacgtgatgccccgtaaagacgagcatatgggtcaccaattcctgaccccggacgaggccccttcacctccccgactgttggccgctggatcccccctggcccatagccgcacaatgcatgtcctgggcctagcctcccaggactccctgcacgaagattctgtgagaggtttggttaaattatcctctgtctag

SEQ ID NO: 216058 - DNA, 7380 bp, Artificial Sequence
  derived and/or modified sequence
cgcccacccggcccggaggaggcggacccactcggagcgccgcgcgcgcgccgggctgagccttgcaaacaagtgtctgtgctgtgtccccgcggccctcctcgcgccggggccgcttcctccgggtaggagggagcaagggagccctcgccgcgcggcccgcgagccgccgccgccctcggcccgcgcatccccgcgcgggggccgcggattcgactaggctgccaggcgcagcgacaccgggtcgcggtgcgagcggcgccccggctctcgccgagaggctcctgacagaaaaacgtgcgtggttgtccccacccctgggaggggttgccggtgccgcgcgcggccgcccagtcgccagcgctctctcctgggaggatccgctgccggaggaaggagtggacccaacctggccgcgccgcagaagtggctcccgaggaagccggcgccggggccgccgcctcgtgtcccctcggggcgcagtgctcgggggtcggcgggccagagccgaggcgcggccggggagccgggggctgcggggccgagcgggcagccgcgcgagggggcgggcgctcggcgacccgggggccggccgggctgagccccgcgccccgggacgcgggctggaagcgacggaggagtgctgccgcgggctgcggaccagcgccgtcccctcacggagcggggattctgctatgacagttgggctccccggagggttaacctgggtgtcctcggcaaagttgtcgccgagccgggagcccgtgtaggggccgcggcgccgcggctcggggggcggccgggcggccggcggcggtcgtggctcggcggggcccgcgcggccggggggctcctgggggtgtgcgcccccagccggctgccctcgtggatgcctcccggcggcggcgggcccatgaaagactgcgagtacagccagatcagcacccacagctcctcccccatggagtcgccccacaagaagaagaaaatcgcggcccggaggaaatgggaggtgttcccgggaagaaacaagttcttctgtaacgggaggatcatgatggcccggcagacgggcgtcttctacctgacgctcgtcctcatcctggtcactagcggactcttcttcgccttcgactgtccgtacctggcggtgaaaatcacccctgccatccctgcagtcgctggcatcctgttcttctttgtgatggggaccctgctccgcaccagcttcagcgaccccggagtcctcccacgagccacgcctgatgaagccgccgatctggaaaggcaaatagatatcgcaaacggcaccagttcaggggggtaccgcccgcctcccagaaccaaagaagtcatcatcaatggccagaccgtgaaacttaaatactgtttcacctgcaagattttccggccccctcgcgcctcccattgcagcctttgtgataactgcgtagaacggtttgatcaccactgtccctgggtaggcaactgtgtggggaaaagaaactacagatttttttatatgtttattttatctctgtcttttctgacagtctttatatttgcattcgttatcacccacgtcattcttcgttcacagcaaacaggattcctaaatgcccttaaggacagtcctgcaagcgtcctggaggctgtggtgtgcttcttctctgtctggtccatcgttggcctctcaggattccacacctacttgatcagctccaaccagacaacaaatgaggacattaaaggatcctggtcaaataaaagaggtaaagaaaattacaatccctacagctacggaaatatctttaccaactgctgtgttgccctgtgtgggcccatctcaccaagcctgatcgacagaagagggtacatccagcccgacacgccgcagccagcagcaccctccaatggcatcaccatgtacggggccacgcagtcacagagtgacatgtgcgaccaagaccagtgcattcagagcaccaaattcgttttgcaggctgcagccacgcccctgctgcagagcgagcccagcctcaccagcgacgagctgcacctgcccgggaagcctggcctgggcacgccctgcgccagcctcacactgggcccgcccacaccgcccgcctccatgcccaacctcgccgaggccacgctcgcggacgtgatgccccggaaagatgagcacatgggccaccagttcctgacgcccgatgaggcgccctcgccccccaggctactggcggcgggcagccccctggcgcacagccgcaccatgcacgtgctgggcctggccagccaggactccctgcatgaggactctgtgcgcggcctggtgaagctcagctccgtgtgacccacatggccccaggccgggggacaccagaggctcctccatgggcagcaggagtgagcggaggggtgtgtcccacagcgactttcccagccaatgccacggtggagatgacagccccaggtctggggtacagagaccacttaggatggcacagggtggctggccccggatgctgagagcttggtttcatttgaattttcttccccaacctgagtgctttgacaacaatggaaatagagaagtggctgctttcttttggtgaccctccaggggtggaatcggagtgtgtctgcccgcccttgtgacagacacacggaaggcttctgacgcttgtggccagactgcaattgcacttatgtgttatgctactaatatttgaaacagacctgccattccatttgttaattaaaaaaaaaaaaaatcctaaagggaaaaaaccgaccaggtgtggatctgcatgccacgctgccgtctgtgttacagtggtgttgctatttccaaggaagtgctgctttctttttctttttttaattttgtgaattttcaagtgctgttttgttggaagacagtgcaacgaactgagactaatggacagtgtcatcactcagcttactgggctgaggcgtctgtggagaggtggcaccggggctgcagagggcggctggggttccgtcgtgtcgggtgtcacttcaccttctgtttggccgctcgatgaggtctcgtgttgagatattgtgtgccacaacccccacagtcttcacctccgtgtgtgatgaaacttcccgtggacagccaataaaatgacgtcctctgttattttggatctgcgtacggttatccttaatagcataaatgaaaacaaagtcatccagatggggagagtttttcttgaaatgtccctagcgaggaatggtccccagacaaccaaaagtcaaatctttgaactgggagatatttatagaataatttcttagataagaggcaagttttccatcatttattttctttaattatctctttttgacaccatcttagtggaatttgctctacgtttgcagtttgccgtgcaacagttgatcggaagtagggagaggggaggggacgctcagggagaaggttctgtcgggcgtcttctgggcttccttctgtgttaacgtgtcactcaatcccagaagtgcaacttgaggtcctagtaaaggtatcagaaaatgaggaggagaaatcggcttacagtctaagctgagatcatgtaggtcatcatccttcctagacactgatcagaatgaaattaagaaaatgaccactttgttcactttcattggtcacctagaagggaacgaactggctctggacttagggagtgtgtcactatgggggcagccacaggggacacagcaactcctctcctggcttctttccagaccataaatctaacagctaaagctactcaagttcaaagccatggccttgctccttataaccatatgaaagacaagacacattgaccaatgatacaagtaacccaagtgatttgcatttatggaaaaaggctattactcctgagaaagagttgccattttatataaaagaaaagaagataggaaaaagaaaagcacacaagttttatttggaatgaaggcaattcacaggtcacaaaataattcatgctgaaagggcctgcagagttcttgcactgtgatgtcttcgagccatctttattgtcatgctgcatgcacgtatagaaaatggaataggtccattctatgtagccatttttgattttctgaaccacctaactacttgtacccacctgcaatgtgtaattcatggggcagtgccctccttacacaaccgcacacgctcacaggcaccaactcacagggattctccttgtccacgctacctgtgagcccaaagtgacagccccacaaaggagcttccacaacttcccaaaccgtctctgctccttgctttcttccacctgctccccagaggccccaggaaggagttggccctgatgagaacggtgctccatgggtgaccgcgaatccggcttagccctcactccggtcccacgtgtggcccagtccattctcagctcattcccctggaaagcaagatcatggtcttcagaggcctcccgcttctaacatttcctaactcagtggttgccactctcctgtgaccagcccttcttcccacctcactgtgaaaaattcccagaagccaggatcacgactcacttgtcttcacataatggatatttacttaatatttattatcaatttccccacctccaaccctgtccctggcacacacttggcatcatttatccaataggggactgggaattttggtgaagtgaatcaaggctattcagggtcaagagagagattaacttgaatgggccaatttgctagataattaatgtcttaaaaaccaaaaccagagagaagcccacagccctgtcctctgtggcttgaaaaagaaacccagcatcagaggaatgagcgatgatgccccctggggcgcccacttctgtttgtcaggagggatggtcggaggggcagctcacctggcgaggtgatggctctgcatttcccacgaacatatatgtgacatgtacataaatataaatacttatgtttataaatgttgaatggttccttctagctgtggctgagtagacgttggtgtttctaacttctttcagtgtgttagagattgattacatgctagctataaaaagtaaaataaatattttaccatgctattaaagcttggaccattatcaaacacacacaaacacacactcattctgctgtttaaaaattcatctgcgttcgttctcccaggagtgctccagggaaccacaggcttcccggcacttgaaggctgaactgagcgtgagtgccctggtccccaggaagcaggcggatgctgcaggaaggtggcagacagcctgcatccaggagggccccaggaagtggggatgctgcaggaaggcggcacaaagcctgcatccgggagggccccaggaagcagggggatgctgcaggaaggtggcagacagactgcatccaggagggcacagtgacctgtcactccgttctgcagaaattggcccagcagttgcgttatgcccaaccaaaagatgctcgttccagctttcaaatgtgatgatttcagcctgtgaggacaatgccatgtccccaccctaagccagcaaaatgcgaaatctctgttctggcccagaatggcacaagggaggagtctttgcagagttccacgccaccccccagcttactgcggccttcaccggctctgtctaggattgccagctgtggttccaagtgaggagcaaacccattttatgagccatgttcctgcggagacctgatgggccaggccttctgtggctttgaaaacccctaagctcttcacctcctgggcctaggccttcttgtctgactcaacagcaagaaaaatgaacttgccaaaattggcagtaggtgtccttgacacaggggcttctgatggcatcgcccagaaaatgctggaaccagaactggtcagagactttgaagggcacagcctggcgggctactccccaagggtctcaggtctctgcccacctgactaccctgcagcaaacgcttctctgtaacctgacttctcccttcagacctcagcctacaaccatcctcttcatgccaggaaccaactgcttctcagcctcggcttagggtcttaagttcaccagaagggatcggggtttgcgttgatattataaggaatcttcccagaaggagctgcccttcatccatccacaagaatacattgagttcatttagttcttgaccaggtaagaaaagaataaaggagaacaaatattaaatactcttttctaattgatgccttactactgttttgaagctgagccgaaatcaaattgatgtttacattttctatcaagtacacatgagctgtgggagtctagcatattcttgtccaaaagagagagactttcaaatgaattcctattcctcttggtcccctccacctattttggaggtctgcatgtggagttgtatgctattttccaaggtacctcatttaaaaaaaaaaaaaaaaaaaaactgcctctcatttgttcccttaaaacgtctctctctctcataaaactaagttatcattgaaatattaaacgatctgaagcgtctttttttttttcaaataaatgtcaaagatggtaatagtttgtaaatcagtaaatcctctgtccatctgcccattgtccatggtcctgataatagagccaagatggattttcacatgtaaggtgttagtccattaatccagccattaaaagtagttgggagattgaagattagatggtttctggagcaaccgaatttgcagctgccacaaaactagataaatagccacaactggagttattttttgatctcataaaccccaggaattacacacagaatggattgaaaagcagacaagcatcttgtgctattgcagagacttttctacccaggaagtgttgaatttttaaaagaaacttgatattggtgataaaggtatgaatgaacaactctcttacttgccctcgatgtttcaagatgcctggtgaaaccgagaggccacatggcatgtccaaggagacatgctttctgggttctatatgaatagagatggttttagcctgcaattaaaaaaaaaaaaaaaaacggttgaagccttgctaactttttcccagagcattctgggttgatatttcacagtcaaacgttttggcatggaaaaaaaaaaaagcattttaaactcttagtgaattcaaagctctaaatccaaacaatggtgaacacatgtacataacatttcatgttttcagagatacgtatgcttatttaagtgcctttcatgttttaatcaatgtttgcagaatttatcttaaacctgagatgaattaaaaaatttttctccttcaataaaaactgctaatggca

SEQ ID NO: 216059 - DNA, 2301 bp, Artificial Sequence
  derived and/or modified sequence
gaagtggctcccgaggaagccggcggcggcgggcccatgaaagactgcgagtacagccagatcagcacccacagctcctcccccatggagtcgccccacaagaagaagaaaatcgcggcccggaggaaatgggaggtgttcccgggaagaaacaagttcttctgtaacgggaggatcatgatggcccggcagacgggcgtcttctacctgacgctcgtcctcatcctggtcactagcggactcttcttcgccttcgactgtccgtacctggcggtgaaaatcacccctgccatccctgcagtcgctggcatcctgttcttctttgtgatggggaccctgctccgcaccagcttcagcgaccccggagtcctcccacgagccacgcctgatgaagccgccgatctggaaaggcaaatagatatcgcaaacggcaccagttcaggggggtaccgcccgcctcccagaaccaaagaagtcatcatcaatggccagaccgtgaaacttaaatactgtttcacctgcaagattttccggccccctcgcgcctcccattgcagcctttgtgataactgcgtagaacggtttgatcaccactgtccctgggtaggcaactgtgtggggaaaagaaactacagatttttttatatgtttattttatctctgtcttttctgacagtctttatatttgcattcgttatcacccacgtcattcttcgttcacagcaaacaggattcctaaatgcccttaaggacagtcctgcaagcgtcctggaggctgtggtgtgcttcttctctgtctggtccatcgttggcctctcaggattccacacctacttgatcagctccaaccagacaacaaatgaggacattaaaggatcctggtcaaataaaagaggtaaagaaaattacaatccctacagctacggaaatatctttaccaactgctgtgttgccctgtgtgggcccatctcaccaagcctgatcgacagaagagggtacatccagcccgacacgccgcagccagcagcaccctccaatggcatcaccatgtacggggccacgcagtcacagagtgacatgtgcgaccaagaccagtgcattcagagcaccaaattcgttttgcaggctgcagccacgcccctgctgcagagcgagcccagcctcaccagcgacgagctgcacctgcccgggaagcctggcctgggcacgccctgcgccagcctcacactgggcccgcccacaccgcccgcctccatgcccaacctcgccgaggccacgctcgcggacgtgatgccccggaaagatgagcacatgggccaccagttcctgacgcccgatgaggcgccctcgccccccaggctactggcggcgggcagccccctggcgcacagccgcaccatgcacgtgctgggcctggccagccaggactccctgcatgaggactctgtgcgcggcctggtgaagctcagctccgtgtgacccacatggccccaggccgggggacaccagaggctcctccatgggcagcaggagtgagcggaggggtgtgtcccacagcgactttcccagccaatgccacggtggagatgacagccccaggtctggggtacagagaccacttaggatggcacagggtggctggccccggatgctgagagcttggtttcatttgaattttcttccccaacctgagtgctttgacaacaatggaaatagagaagtggctgctttcttttggtgaccctccaggggtggaatcggagtgtgtctgcccgcccttgtgacagacacacggaaggcttctgacgcttgtggccagactgcaattgcacttatgtgttatgctactaatatttgaaacagacctgccattccatttgttaattaaaaaaaaaaaaaatcctaaagggaaaaaaccgaccaggtgtggatctgcatgccacgctgccgtctgtgttacagtggtgttgctatttccaaggaagtgctgctttctttttctttttttaattttgtgaattttcaagtgctgttttgttggaagacagtgcaacgaactgagactaatggacagtgtcatcactcagcttactgggctgaggcgtctgtggagaggtggcaccggggctgcagagggcggctggggttccgtcgtgtcgggtgtcacttcaccttctgtttggccgctcgatgaggtctcgtgttgagatattgtgtgccacaacccccacagtcttcacctccgtgtgtgatgaaacttcccgtggacagccaataaaatgacgtcctctgttattttgg

SEQ ID NO: 216060 - protein, 183 aa, Artificial Sequence
  derived and/or modified sequence
MNGFSTEEDSREGPPAAPAAAAPGYGQSCCLIEDGERCVRPAGNASFSKRVQKSISQKKLKLDIDKSVRHLYICDFHKNFIQSVRNKRKRKTSDDGGDSPEHDTDIPEVDLFQLQVNTLRRYKRHYKLQTRPGFNKAQLAETVSRHFRNIPVNEKETLAYFIYMVKSNKSRLDQKSEGGKQLE

SEQ ID NO: 216061 - DNA, 552 bp, Artificial Sequence
  derived and/or modified sequence
atgaacggcttctctacagaggaggatagtagagaggggcctcctgcggctcctgccgctgccgcccctgggtatggacagagctgttgcctcattgaagacggggaaaggtgcgttcggcccgccggcaacgccagttttagtaagcgggtgcagaagagcatttctcaaaagaagttgaaattggacattgataagagtgtccgccatctgtacatctgtgacttccataagaatttcatacagagtgtccgcaacaaaagaaagcgcaagaccagcgacgatgggggcgattcgccggaacatgataccgacatccccgaagtagacctgtttcagctccaggtcaatactctgcggcgctataaaagacattacaagcttcagaccaggccaggatttaataaggcgcagttggctgagactgtttctaggcattttagaaacattccggtcaatgagaaggagaccctggcctacttcatctatatggtgaaaagcaacaagtccagactggaccaaaagtcagaaggaggaaagcaactggaatag

SEQ ID NO: 216062 - DNA, 552 bp, Artificial Sequence
  derived and/or modified sequence
atgaatggcttcagcacagaggaggacagccgggagggccccccagctgccccagctgctgctgcccctggctacggccagagctgctgcctgattgaagatggagagcgctgtgtgcggcctgctggaaatgccagcttcagcaagagggtgcagaagagcatcagccagaagaagctgaagctggacatcgacaagtctgtgcgccacctgtacatctgtgacttccacaagaacttcatccagagcgtgaggaacaagaggaagaggaagaccagtgatgatggaggagacagccctgagcatgacacagacatccctgaggtggacctcttccagctgcaggtgaacaccctgcggcgctacaagaggcactacaagctgcagacccggcccggcttcaacaaggcccagctggccgagaccgtgagccgccacttcaggaacatccctgtgaatgagaaggagaccctggcctacttcatctacatggtgaagagcaacaagagccggctggaccagaagtctgagggcggcaagcagctggagtag

SEQ ID NO: 216063 - DNA, 1486 bp, Artificial Sequence
  derived and/or modified sequence
acttccgctgtcccgcgaagggcggggggagcgaactgttgtggtgcggagcgttcggcgggcggcggccgggcggcccaggggctgccgcgggactcggggcgcagccgagtggctgcaggggtggagtgggccggacgagccgcggggcccgggtgccgcgggttcgaggccgggccccgcgcgaggaggccgcgccaccccgggggagctgcccggcagcgagtttgccccgctgccgaaagaaggcgggagccggcaggggccttcgaaaccccctggcaacccaggcccggagtccttggggagcggctgtttcctgggacgccctcccggacacccccgctgcagggttacggttctgggcccccggcagaaggctcctccgggtgacccccggcggggccctgcgagccgcgggagccgaccccggggcctcgagccgggaggaagggggcttccggaggcggagggccgggggccgagggagccgggcctctcggacgcggggcagggcagcgcccgggctggagacggactctgggaccctcggctgcgggggtctcagcgacctgccccgcggcaagcgcggccgcggagtggcctaccggggaccctcccccagagggaccggcccggggcggggagatgaacggcttcagcacggaggaggacagccgcgaagggccccccgccgccccagctgccgccgccccgggctacggccagagctgctgcctcatcgaggacggcgagcgctgcgtccggcccgcgggcaacgcctccttcagcaagagggtccagaagagcatctcgcagaagaaactcaagctggacatcgacaagagcgtaaggcacctatatatctgtgattttcacaaaaatttcatccagagtgtccgaaataaaaggaagaggaagacaagtgacgatggcggagattctcccgagcacgacactgacattcctgaggttgatctgttccagctgcaggtgaacaccctacgacgttataaacgacactacaagttgcagaccagaccaggcttcaataaggcccagttagcagaaactgtgagtcgacacttcaggaacatacctgtgaatgaaaaagagacccttgcctacttcatctacatggtgaagagtaacaagagtagactggaccagaaatcggagggtggcaagcagcttgagtgaggatgaagcacatcttaaaggaatgaagtgtaatgcttgatgcacaggtgatatctactacatttaagcccataaagactgttaaatattattgtaaataaaaaagtttgaatgatgaatactgtaaatctttttggtcaggaggattatattctcatgattcagcatgtgtatagaaagactttcttttacgataactctggactaaaaaaatcaggatcattaaaagaattaaaaactatgtatttcagcattcaacaaagcattaaatcaattctactggaaa

SEQ ID NO: 216064 - DNA, 552 bp, Artificial Sequence
  derived and/or modified sequence
atgaacggcttcagcaccgaggaggacagccgggagggcccccccgccgcacccgccgcagcggccccgggatacggtcagtcatgttgtctgattgaagatggtgagcgctgtgttcggcctgctggtaatgcttccttttccaagcgtgtgcagaaaagcatttcccagaagaagttgaaactggacatcgataaaagcgtgcgtcatctttatatctgcgacttccataagaatttcatccagtctgtgcgcaacaagagaaaacgaaaaacttcagacgacggaggtgacagcccggagcatgataccgacattcctgaagttgatctgtttcagttgcaggtgaacacactccgcaggtacaaaaggcattataagctacagacgagaccagggttcaataaggcccaactcgctgaaactgtgtctcgccatttcaggaatatcccggtgaatgagaaggagaccttggcttactttatatacatggtgaagtcaaacaagtcgaggctcgaccagaagtctgagggcgggaagcagctcgaatag

SEQ ID NO: 216065 - DNA, 552 bp, Artificial Sequence
  derived and/or modified sequence
atgaacggattcagtaccgaagaagacagcagagagggtccgccagccgctcctgccgctgccgctcccggatatggccagagctgctgcctgatcgaagatggcgaaagatgcgtccgtcccgcaggcaacgcctcctttagcaagagagttcagaaaagcatcagccagaagaagctgaagctcgacatcgataaatccgtaagacatctgtacatctgtgattttcataagaacttcattcaatccgttaggaacaagaggaaacgaaaaaccagtgacgacggcggtgactctcccgagcatgacacagacattccagaggttgaccttttccagctccaggtgaataccttgcgccgatataaaaggcattacaagcttcagacacgccctgggttcaacaaggcccagctggcagagaccgtctcacgccacttcagaaacattcctgtgaatgagaaggagacgctcgcatactttatctatatggtaaaaagcaataaaagtcgattggatcagaagtccgaaggcggaaagcaacttgaatag

SEQ ID NO: 216066 - DNA, 552 bp, Artificial Sequence
  derived and/or modified sequence
atgaacggcttcagcaccgaggaggacagcagagagggcccccccgccgcccccgccgccgccgcccccggctacggccagagctgctgcctgatcgaggacggcgagagatgcgtgagacccgccggcaacgccagcttcagcaagagagtgcagaagagcatcagccagaagaagctgaagctggacatcgacaagagcgtgagacacctgtacatctgcgacttccacaagaacttcatccagagcgtgagaaacaagagaaagagaaagaccagcgacgacggcggcgacagccccgagcacgacaccgacatccccgaggtggacctgttccagctgcaggtgaacaccctgagaagatacaagagacactacaagctgcagaccagacccggcttcaacaaggcccagctggccgagaccgtgagcagacacttcagaaacatccccgtgaacgagaaggagaccctggcctacttcatctacatggtgaagagcaacaagagcagactggaccagaagagcgagggcggcaagcagctggagtag

SEQ ID NO: 216067 - protein, 725 aa, Artificial Sequence
  derived and/or modified sequence
MVMKASVDDDDSGWELSMPEKMEKSNTNWVDITQDFEEACRELKLGELLHDKLFGLFEAMSAIEMMDPKMDAGMIGNQVNRKVLNFEQAIKDGTIKIKDLTLPELIGIMDTCFCCLITWLEGHSLAQTVFTCLYIHNPDFIEDPAMKAFALGILKICDIAREKVNKAAVFEEEDFQSMTYGFKMANSVTDLRVTGMLKDVEDDMQRRVKSTRSRQGEERDPEVELEHQQCLAVFSRVKFTRVLLTVLIAFTKKETSAVAEAQKLMVQAADLLSAIHNSLHHGIQAQNDTTKGDHPIMMGFEPLVNQRLLPPTFPRYAKIIKREEMVNYFARLIDRIKTVCEVVNLTNLHCILDFFCEFSEQSPCVLSRSLLQTTFLVDNKKVFGTHLMQDMVKDALRSFVSPPVLSPKCYLYNNHQAKDCIDSFVTHCVRPFCSLIQIHGHNRARQRDKLGHILEEFATLQDEAEKVDAALHTMLLKQEPQRQHLACLGTWVLYHNLRIMIQYLLSGFELELYSMHEYYYIYWYLSEFLYAWLMSTLSRADGSQMAEERIMEEQQKGRSSKKTKKKKKVRPLSREITMSQAYQNMCAGMFKTMVAFDMDGKVRKPKFELDSEQVRYEHRFAPFNSVMTPPPVHYLQFKEMSDLNKYSPPPQSPELYVAASKHFQQAKMILENIPNPDHEVNRILKVAKPNFVVMKLLAGGHKKESKVPPEFDFSAHKYFPVVKLV

SEQ ID NO: 216068 - protein, 294 aa, Artificial Sequence
  derived and/or modified sequence
MVMKASVDDDDSGWELSMPEKMEKSNTNWVDITQDFEEACRELKLGELLHDKLFGLFEAMSAIEMMDPKMDAGMIGNQVNRKVLNFEQAIKDGTIKIKDLTLPELIGIMDTCFCCLITWLEGHSLAQTVFTCLYIHNPDFIEDPAMKAFALGILKICDIAREKVNKAAVFEEEDFQSMTYGFKMANSVTDLRVTGMLKDVEDDMQRRVKSTRSRQGEERDPEVELEHQQCLAVFSRVKFTRVLLTVLIAFTKKETSAVAEAQKLMVQAADLLSAIHNSLHHGIQAQNDTTKGGL

SEQ ID NO: 216069 - protein, 197 aa, Artificial Sequence
  derived and/or modified sequence
MVMKASVDDDDSGWELSMPEKMEKSNTNWVDITQDFEEACRELKLGELLHDKLFGLFEAMSAIEMMDPKMDAGMIGNQVNRKVLNFEQAIKDGTIKIKDLTLPELIGIMDTCFCCLITWLEGHSLAQTVFTCLYIHNPDFIEDPAMKAFALGILKICDIAREKVNKAAVFEEISRLLELIDFHEYNFKNENVQCWKE

SEQ ID NO: 216070 - DNA, 2178 bp, Artificial Sequence
  derived and/or modified sequence
atggtgatgaaggccagcgtggacgacgacgacagcggctgggagctgagcatgcccgagaagatggagaagagcaacaccaactgggtggacatcacccaggacttcgaggaggcctgcagagagctgaagctgggcgagctgctgcacgacaagctgttcggcctgttcgaggccatgagcgccatcgagatgatggaccccaagatggacgccggcatgatcggcaaccaggtgaacagaaaggtgctgaacttcgagcaggccatcaaggacggcaccatcaagatcaaggacctgaccctgcccgagctgatcggcatcatggacacctgcttctgctgcctgatcacctggctggagggccacagcctggcccagaccgtgttcacctgcctgtacatccacaaccccgacttcatcgaggaccccgccatgaaggccttcgccctgggcatcctgaagatctgcgacatcgccagagagaaggtgaacaaggccgccgtgttcgaggaggaggacttccagagcatgacctacggcttcaagatggccaacagcgtgaccgacctgagagtgaccggcatgctgaaggacgtggaggacgacatgcagagaagagtgaagagcaccagaagcagacagggcgaggagagagaccccgaggtggagctggagcaccagcagtgcctggccgtgttcagcagagtgaagttcaccagagtgctgctgaccgtgctgatcgccttcaccaagaaggagaccagcgccgtggccgaggcccagaagctgatggtgcaggccgccgacctgctgagcgccatccacaacagcctgcaccacggcatccaggcccagaacgacaccaccaagggcgaccaccccatcatgatgggcttcgagcccctggtgaaccagagactgctgccccccaccttccccagatacgccaagatcatcaagagagaggagatggtgaactacttcgccagactgatcgacagaatcaagaccgtgtgcgaggtggtgaacctgaccaacctgcactgcatcctggacttcttctgcgagttcagcgagcagagcccctgcgtgctgagcagaagcctgctgcagaccaccttcctggtggacaacaagaaggtgttcggcacccacctgatgcaggacatggtgaaggacgccctgagaagcttcgtgagcccccccgtgctgagccccaagtgctacctgtacaacaaccaccaggccaaggactgcatcgacagcttcgtgacccactgcgtgagacccttctgcagcctgatccagatccacggccacaacagagccagacagagagacaagctgggccacatcctggaggagttcgccaccctgcaggacgaggccgagaaggtggacgccgccctgcacaccatgctgctgaagcaggagccccagagacagcacctggcctgcctgggcacctgggtgctgtaccacaacctgagaatcatgatccagtacctgctgagcggcttcgagctggagctgtacagcatgcacgagtactactacatctactggtacctgagcgagttcctgtacgcctggctgatgagcaccctgagcagagccgacggcagccagatggccgaggagagaatcatggaggagcagcagaagggcagaagcagcaagaagaccaagaagaagaagaaggtgagacccctgagcagagagatcaccatgagccaggcctaccagaacatgtgcgccggcatgttcaagaccatggtggccttcgacatggacggcaaggtgagaaagcccaagttcgagctggacagcgagcaggtgagatacgagcacagattcgcccccttcaacagcgtgatgacccccccccccgtgcactacctgcagttcaaggagatgagcgacctgaacaagtacagcccccccccccagagccccgagctgtacgtggccgccagcaagcacttccagcaggccaagatgatcctggagaacatccccaaccccgaccacgaggtgaacagaatcctgaaggtggccaagcccaacttcgtggtgatgaagctgctggccggcggccacaagaaggagagcaaggtgccccccgagttcgacttcagcgcccacaagtacttccccgtggtgaagctggtgtag

SEQ ID NO: 216071 - DNA, 885 bp, Artificial Sequence
  derived and/or modified sequence
atggtgatgaaggccagcgtggacgacgacgacagcggctgggagctgagcatgcccgagaagatggagaagagcaacaccaactgggtggacatcacccaggacttcgaggaggcctgcagagagctgaagctgggcgagctgctgcacgacaagctgttcggcctgttcgaggccatgagcgccatcgagatgatggaccccaagatggacgccggcatgatcggcaaccaggtgaacagaaaggtgctgaacttcgagcaggccatcaaggacggcaccatcaagatcaaggacctgaccctgcccgagctgatcggcatcatggacacctgcttctgctgcctgatcacctggctggagggccacagcctggcccagaccgtgttcacctgcctgtacatccacaaccccgacttcatcgaggaccccgccatgaaggccttcgccctgggcatcctgaagatctgcgacatcgccagagagaaggtgaacaaggccgccgtgttcgaggaggaggacttccagagcatgacctacggcttcaagatggccaacagcgtgaccgacctgagagtgaccggcatgctgaaggacgtggaggacgacatgcagagaagagtgaagagcaccagaagcagacagggcgaggagagagaccccgaggtggagctggagcaccagcagtgcctggccgtgttcagcagagtgaagttcaccagagtgctgctgaccgtgctgatcgccttcaccaagaaggagaccagcgccgtggccgaggcccagaagctgatggtgcaggccgccgacctgctgagcgccatccacaacagcctgcaccacggcatccaggcccagaacgacaccaccaagggcggcctgtag

SEQ ID NO: 216072 - DNA, 594 bp, Artificial Sequence
  derived and/or modified sequence
atggtgatgaaggccagcgtggacgacgacgacagcggctgggagctgagcatgcccgagaagatggagaagagcaacaccaactgggtggacatcacccaggacttcgaggaggcctgcagagagctgaagctgggcgagctgctgcacgacaagctgttcggcctgttcgaggccatgagcgccatcgagatgatggaccccaagatggacgccggcatgatcggcaaccaggtgaacagaaaggtgctgaacttcgagcaggccatcaaggacggcaccatcaagatcaaggacctgaccctgcccgagctgatcggcatcatggacacctgcttctgctgcctgatcacctggctggagggccacagcctggcccagaccgtgttcacctgcctgtacatccacaaccccgacttcatcgaggaccccgccatgaaggccttcgccctgggcatcctgaagatctgcgacatcgccagagagaaggtgaacaaggccgccgtgttcgaggagatcagcagactgctggagctgatcgacttccacgagtacaacttcaagaacgagaacgtgcagtgctggaaggagtag

SEQ ID NO: 216073 - DNA, 2178 bp, Artificial Sequence
  derived and/or modified sequence
atggtgatgaaggcaagcgtggacgacgacgacagcggatgggaattgtcgatgcccgagaagatggagaagtcaaatacaaattgggtggatattactcaagactttgaggaagcttgtagagagcttaaactgggagagctgttgcacgataagctctttggcctgttcgaagccatgtccgctatcgagatgatggaccctaagatggacgcaggcatgatagggaaccaggtcaaccggaaagtccttaacttcgaacaagcaatcaaggatggcacgattaagattaaggacttgaccctgccagagctaatcggaatcatggacacttgcttttgttgcctcattacatggcttgaagggcacagcttagcacagaccgttttcacatgtctgtacatacataatcccgacttcatagaggatcctgccatgaaggcatttgcccttggcatcctgaagatctgtgatatcgccagggagaaggtcaacaaggctgccgtgtttgaagaggaggattttcaatcaatgacttacggctttaaaatggctaactccgtaacagatctgagagtcactggcatgcttaaggatgtagaagacgatatgcaaagacgggtgaagtcaacacgatcacgccagggagaggaacgggacccggaggttgaactcgagcatcagcaatgtctcgccgtattctctcgcgtaaagtttacacgagtactgctgacggtgctgatcgcctttacgaagaaggagacttcagcagttgccgaggcgcagaaattaatggtgcaggccgcggacctgctgtcagctatacacaactctctgcatcatggaatccaggcccaaaacgacacaacgaaaggggaccatcccatcatgatgggcttcgagccactggtgaaccagcgcctattgccccctacgttccctcgatacgcaaagattattaagcgtgaggaaatggtcaactactttgcacgactgatcgatcgcatcaagacggtctgtgaggttgtgaacctgactaacctccattgcatcctggactttttctgcgaattttccgaacaatctccctgcgtgctcagtcgtagtctgttgcaaactacttttctggtggacaataagaaagtgtttggcacccatttgatgcaggatatggtcaaggatgctttgagaagctttgtgagtccacctgtgttgagcccaaagtgctacctgtacaacaatcatcaagcaaaggattgtatcgattcatttgtgacccactgcgtcaggcccttctgctcactcatccagatccacggccataatagggcacgacagcgagataagctcggccatattctcgaggagttcgctacactgcaggacgaggctgagaaggttgatgcagcactgcacacaatgttactgaagcaagaaccacagcgccaacacttggcctgtctgggaacgtgggtactgtaccacaaccttcgcattatgatccaatacctgctgagtgggttcgagttagaactgtactctatgcacgaatattactacatttactggtacctctcagaattcttgtatgcctggttgatgtcaaccctatcccgggccgacgggtcacaaatggctgaggagcgcattatggaggaacagcaaaaggggagatcctcaaagaaaaccaagaaaaaaaaaaaggtccgcccactgtctcgcgaaatcacaatgtctcaagcctatcagaatatgtgcgctggtatgttcaaaaccatggttgccttcgatatggacgggaaagttaggaaaccaaagtttgaactggactctgagcaggtgcgctacgagcaccgctttgccccgtttaatagtgtgatgactcctcctcctgtgcactatttgcagtttaaggagatgagtgatctgaataagtattctcccccaccacagtccccagaactctacgtggctgcctctaaacactttcaacaggccaaaatgatattagagaatatccctaatccagatcacgaggtgaatcggatactgaaggtggctaagcccaatttcgttgtgatgaaactcctggcgggaggacataagaaagagtctaaagtgccccctgagtttgatttctctgcacataagtatttccccgtggtgaaactggtgtag

SEQ ID NO: 216074 - DNA, 885 bp, Artificial Sequence
  derived and/or modified sequence
atggtaatgaaagcttccgttgacgatgacgatagcggctgggaattgtctatgccggagaagatggaaaaaagcaatactaattgggtggacattacgcaggactttgaggaggcctgtcgagagctgaaattaggggaacttctgcacgacaagctgttcggcttatttgaggccatgtccgccatagagatgatggacccaaagatggacgctggaatgatcgggaatcaagtgaatcggaaagtgctcaattttgagcaggcaatcaaagacggcaccataaagatcaaagacctgactctgcctgagctgatcgggattatggacacttgcttctgttgtctgataacttggttggagggacactcccttgcccagacggtgttcacgtgtctctatatccacaatcctgatttcatcgaggaccccgccatgaaagctttcgctctaggaatcctgaaaatttgcgacatcgcccgggaaaaagtgaacaaagcggccgtgttcgaggaagaggatttccagagcatgacatatgggttcaagatggccaacagcgtgaccgatctcagggtcacaggtatgcttaaagatgttgaggacgatatgcagcgaagagtcaaatcgactcgcagccgccagggcgaagaacgtgacccagaggtggaattggagcaccaacaatgtctcgccgtattcagtcgggtgaagtttactcgggtgctgctgacagttttgattgcgttcaccaaaaaggaaaccagcgccgttgccgaagcccagaagttaatggtgcaggccgctgatctgctgagcgctatccacaattccctccatcacggcatccaggctcagaatgacaccactaagggcggcctgtag

SEQ ID NO: 216075 - DNA, 594 bp, Artificial Sequence
  derived and/or modified sequence
atggtgatgaaggccagcgtggacgatgatgacagtggctgggagttgagcatgcctgagaagatggagaagagtaacacaaattgggtcgacataacccaggatttcgaagaggcttgtagagaattgaagctcggtgaactgctgcacgacaagctctttggtcttttcgaagcaatgtccgcaattgaaatgatggaccctaagatggacgcagggatgatcggaaatcaagtaaacaggaaagtactgaatttcgaacaggccatcaaagacggaaccatcaagattaaggacctcacactcccagaactcattggcataatggatacatgcttctgctgcctcattacgtggctggaagggcattctttggcacagacagtgtttacgtgtctttatatccacaaccctgactttatcgaagaccccgccatgaaggcattcgcacttggtatactgaaaatctgcgatattgctcgcgagaaagtgaataaggccgccgtctttgaggagataagtcggcttttggaattgatcgacttccacgagtacaacttcaagaatgaaaacgtgcagtgctggaaagagtag

SEQ ID NO: 216076 - DNA, 2178 bp, Artificial Sequence
  derived and/or modified sequence
atggtgatgaaggcctctgtggatgatgatgacagcggctgggagctgtccatgcctgagaagatggagaagagcaacaccaactgggtggacatcacccaggactttgaggaggcctgccgggagctgaagctgggggagctgctgcatgacaagctgtttggcctgtttgaggccatgtctgccatcgagatgatggaccccaagatggatgctggcatgattggcaaccaggtgaacaggaaggtgctgaactttgagcaggccatcaaggatggcaccatcaagatcaaggacctgaccctgcctgagctgattggcatcatggacacctgcttctgctgcctgatcacctggctggagggccacagcctggcccagaccgtcttcacctgcctgtacatccacaacccagacttcatcgaggaccctgccatgaaggcctttgccctgggcatcctgaagatctgtgacatcgcccgggagaaggtgaacaaggctgctgtgtttgaggaggaggacttccagagcatgacctacggcttcaagatggccaacagcgtgacagacctgcgggtgacaggcatgctgaaggatgtggaggatgacatgcagaggagagtgaagagcaccaggagccggcagggcgaggagcgggaccctgaggtggagctggagcaccagcagtgcctggccgtgttcagccgggtgaagttcaccagggtgctgctgactgtgctgattgccttcaccaagaaggagaccagcgctgtggccgaggcccagaagctgatggtgcaggccgctgacctgctgagcgccatccacaacagcctgcaccacggcatccaggcccagaatgacaccaccaagggggaccaccccatcatgatgggctttgagcccctggtgaaccagaggctgctgccccccaccttccccaggtatgccaagatcatcaagcgggaggagatggtgaactactttgcccggctgattgaccgcatcaagacagtgtgtgaggtggtgaacctgaccaacctgcactgcatcctggacttcttctgtgagttcagcgagcagagcccctgtgtgctgagccgcagcctgctgcagaccaccttcctggtggacaacaagaaggtgtttggcacccacctgatgcaggacatggtgaaggatgccctgcggagctttgtgagcccccctgtgctgagccccaagtgctacctgtacaacaaccaccaggccaaggactgcatcgacagctttgtgacccactgtgtgcggcccttctgcagcctcatccagatccacggccacaacagagcccggcagagggacaagctgggccacatcctggaggagtttgccaccctgcaggatgaggccgagaaggtggatgctgccctgcacaccatgctgctgaagcaggagccccagaggcagcacctggcctgcctgggcacctgggtgctgtaccacaacctgcgcatcatgatccagtacctgctgagcggctttgagctggagctgtacagcatgcatgagtactactacatctactggtacctgtctgagttcctgtatgcctggctgatgagcaccctgagcagagcagatggcagccagatggccgaggagcgcatcatggaggagcagcagaagggccgcagcagcaagaagaccaagaagaagaagaaggtgcggcccctgagccgggagatcaccatgagccaggcctaccagaacatgtgtgccggcatgttcaagaccatggtggcctttgacatggatggcaaggtgaggaagcccaagtttgagctggacagcgagcaggtgcgctatgagcacagatttgcccccttcaacagcgtgatgaccccacctcctgtgcactacctgcagttcaaggagatgtctgacctgaacaagtacagccccccaccccagagccctgagctgtatgtggccgccagcaagcacttccagcaggccaagatgatcctggagaacatccccaacccagaccacgaggtgaaccgcatcctgaaggtggccaagcccaactttgtggtgatgaagctgctggccggcggccacaagaaggagagcaaggtgcccccagagtttgacttcagcgcccacaagtacttccctgtggtgaagctggtgtag

SEQ ID NO: 216077 - DNA, 885 bp, Artificial Sequence
  derived and/or modified sequence
atggtgatgaaggcctctgtggatgatgatgacagcggctgggagctgtccatgcctgagaagatggagaagagcaacaccaactgggtggacatcacccaggactttgaggaggcctgccgggagctgaagctgggggagctgctgcatgacaagctgtttggcctgtttgaggccatgtctgccatcgagatgatggaccccaagatggatgctggcatgattggcaaccaggtgaacaggaaggtgctgaactttgagcaggccatcaaggatggcaccatcaagatcaaggacctgaccctgcctgagctgattggcatcatggacacctgcttctgctgcctgatcacctggctggagggccacagcctggcccagaccgtcttcacctgcctgtacatccacaacccagacttcatcgaggaccctgccatgaaggcctttgccctgggcatcctgaagatctgtgacatcgcccgggagaaggtgaacaaggctgctgtgtttgaggaggaggacttccagagcatgacctacggcttcaagatggccaacagcgtgacagacctgcgggtgacaggcatgctgaaggatgtggaggatgacatgcagaggagagtgaagagcaccaggagccggcagggcgaggagcgggaccctgaggtggagctggagcaccagcagtgcctggccgtgttcagccgggtgaagttcaccagggtgctgctgactgtgctgattgccttcaccaagaaggagaccagcgctgtggccgaggcccagaagctgatggtgcaggccgctgacctgctgagcgccatccacaacagcctgcaccacggcatccaggcccagaatgacaccaccaagggcggcctgtag

SEQ ID NO: 216078 - DNA, 594 bp, Artificial Sequence
  derived and/or modified sequence
atggtgatgaaggcctctgtggatgatgatgacagcggctgggagctgtccatgcctgagaagatggagaagagcaacaccaactgggtggacatcacccaggactttgaggaggcctgccgggagctgaagctgggggagctgctgcatgacaagctgtttggcctgtttgaggccatgtctgccatcgagatgatggaccccaagatggatgctggcatgattggcaaccaggtgaacaggaaggtgctgaactttgagcaggccatcaaggatggcaccatcaagatcaaggacctgaccctgcctgagctgattggcatcatggacacctgcttctgctgcctgatcacctggctggagggccacagcctggcccagaccgtcttcacctgcctgtacatccacaacccagacttcatcgaggaccctgccatgaaggcctttgccctgggcatcctgaagatctgtgacatcgcccgggagaaggtgaacaaggctgctgtgtttgaggagatcagccggctgctggagctgattgacttccacgagtacaacttcaagaatgaaaatgtgcagtgctggaaggagtag

SEQ ID NO: 216079 - DNA, 2649 bp, Artificial Sequence
  derived and/or modified sequence
atacgcatgcgtgcacgctgccggtcgggctgggctgagaggggagggggcggcggcggccgaggcggcgtcgttatttccgtggtccggacagtgcgtggcggcgcgggtgaccacgggagaagtaggcataatggttatgaaagcttctgtagatgatgacgattcaggatgggagctcagtatgccagaaaaaatggagaaaagcaatacaaactgggtggacattacccaagattttgaagaagcttgtcgagaattaaagttgggagaactacttcatgataagctatttggtctttttgaagccatgtctgctattgaaatgatggatcccaagatggatgctggcatgattggaaaccaagttaatcgaaaagttctcaattttgaacaagctatcaaggatggcactattaaaattaaagatctcaccttgcctgaactgatagggattatggatacatgtttttgctgtttgataacgtggttagaaggccattcactggcacagacagtatttacgtgcctttacattcataatccagactttatagaagatcctgctatgaaggcttttgctctgggaatcttgaaaatctgtgacattgcaagggaaaaagtaaataaagctgctgtttttgaagaggaagattttcagtcaatgacttatggatttaaaatggctaacagtgtgacagatcttcgagttacaggcatgctaaaagatgtggaggatgacatgcaaagaagagtaaagagtactcgaagtcgacaaggagaagaaagagatccagaagttgaactagaacaccaacaatgtttagcagtattcagcagagtgaaatttactcgtgtgttactgacagtgcttatagcctttactaagaaagagaccagtgctgttgcagaagctcaaaaattgatggttcaagcagcagatcttctttctgccattcataattcattgcatcatggcatccaggcccagaatgatactacaaaaggagatcatccaattatgatgggttttgaaccccttgtgaaccagaggctacttccacctaccttccctcgatatgcaaaaataattaaaagggaagaaatggtgaactattttgcaagattaatagatagaataaaaactgtctgtgaggttgtgaatttaacaaatttacattgtatcctggattttttctgtgaatttagtgaacagtcaccatgtgttctttcaagatctctgttacaaaccactttcctggtggataacaaaaaggtctttggaactcatctcatgcaagacatggtgaaagatgcacttcggtcttttgtcagtcctccggtgctttcccccaagtgctacctatataataatcaccaggctaaggactgtatcgactcctttgttactcactgtgttcggccattctgtagtcttattcagatccatggacataacagggctcgacagagagataagcttggtcatattcttgaggaatttgccaccttgcaggatgaggcagagaaggttgatgcagcgcttcacaccatgctgttgaaacaggaaccccaaaggcaacatttggcctgtttaggtacctgggtcctttaccataaccttcgcattatgatacagtaccttctaagtggctttgaattggaactctacagtatgcacgagtactattacatatattggtatctctctgaattcctttacgcatggttgatgtcaacattgagtcgtgccgatggctctcaaatggcagaggaaaggataatggaagagcagcagaaaggccgtagtagtaaaaaaacaaagaaaaaaaagaaagttcgcccattgagccgagagatcacaatgagccaagcatatcagaacatgtgtgctggaatgtttaaaaccatggtagcatttgacatggacggcaaagtacgtaaaccgaagtttgagcttgatagtgaacaagttcggtatgaacacaggtttgctccattcaacagtgtgatgaccccgccgccagtgcactacttacagttcaaggaaatgtctgacctcaataaatatagccctcctcctcagtctcctgaactgtatgtggcagctagtaagcactttcaacaggcaaaaatgatattggaaaatattcctaacccggaccatgaggttaatagaattttaaaggttgccaaacccaactttgtggttatgaagttattggcaggaggacacaaaaaggaatctaaagttcctcctgaatttgatttctctgctcataaatattttcctgttgtgaaacttgtttgagagagactggggaggtggccataaaggggcagagtcttctttcagacccaactcttagagggcacatcaccaggctccacatcacgggaagtgagatggatttcttgggtaacaactcattataaggaatacttttagtttgacagccttatatgacatgaatgaaaactgctgttttaaagtggtttattatgttccatggaagaaactggtcttattgaatgcattgatgaacgttatatggttttattacagatttaatcacaaatcattttttatgaatgattgagtgaaaatagtgtttataaaggttaataaatttcttgacaaaaaaaaaa

SEQ ID NO: 216080 - DNA, 1797 bp, Artificial Sequence
  derived and/or modified sequence
gcttatgcgcccagtgggaccggggctgggctgggctgacccgggcagggcggaagggaagcgtgtgcccgcctcaggtgtgcctcggccctaggcccggccggcgggaccctgcggtgcctgccggctcctcattgctcccggcgaggttctgcctgggtccgggccggctctggcccgggagaggtcccagcgagctctggccagatgaagggctaccttgattgacttcggtagctgccgcatggggtcctgggctgcgagaggggaccctgaatagtgccttggtcttttgtggctattattgaaagttggaagctctggagttgttcttttcgggccagaggcataatggttatgaaagcttctgtagatgatgacgattcaggatgggagctcagtatgccagaaaaaatggagaaaagcaatacaaactgggtggacattacccaagattttgaagaagcttgtcgagaattaaagttgggagaactacttcatgataagctatttggtctttttgaagccatgtctgctattgaaatgatggatcccaagatggatgctggcatgattggaaaccaagttaatcgaaaagttctcaattttgaacaagctatcaaggatggcactattaaaattaaagatctcaccttgcctgaactgatagggattatggatacatgtttttgctgtttgataacgtggttagaaggccattcactggcacagacagtatttacgtgcctttacattcataatccagactttatagaagatcctgctatgaaggcttttgctctgggaatcttgaaaatctgtgacattgcaagggaaaaagtaaataaagctgctgtttttgaagaggaagattttcagtcaatgacttatggatttaaaatggctaacagtgtgacagatcttcgagttacaggcatgctaaaagatgtggaggatgacatgcaaagaagagtaaagagtactcgaagtcgacaaggagaagaaagagatccagaagttgaactagaacaccaacaatgtttagcagtattcagcagagtgaaatttactcgtgtgttactgacagtgcttatagcctttactaagaaagagaccagtgctgttgcagaagctcaaaaattgatggttcaagcagcagatcttctttctgccattcataattcattgcatcatggcatccaggcccagaatgatactacaaaaggaggtctctgacatcttctagagatggaggtggaagtcagagataatgtgtaaaactgaaaagaaacgaaggagtactctaagcttgttttttgccaatgtgtagatcagaggtgtccaatcttttttttttgagacgaagtttcactattgttgcctaggctggagtgcaatggcgtgatctcggctcaatgcaacctctgcctcccgggttcaaatgattctcttacctcaccctcctgagtagctggaattacaggtgcctgtcaccatgcccggctaactttttgtattctttttttagtggagacggagtttcaccatgttggccaggctggtctcgaactcctgacctcaagtgatccgccctccttggccttccaaagtgctgggattacaggcgtgagccactgcgcctgaccggggtgtccaatcttttggcttcccagggccaccctggaagaagaattggtcttgcatcacacataaaatatgctaatgagagctgatgagccaaaaaaagaaaaaatcaccaaaacaaatctcataatgttttaataaagtttacaaact

SEQ ID NO: 216081 - DNA, 690 bp, Artificial Sequence
  derived and/or modified sequence
gagaggggagggggcggcggcggccgaggcggcgtcgttatttccgtggtccggacagtgcgtggcggcgcgggtgaccacgggagaagtaggcataatggttatgaaagcttctgtagatgatgacgattcaggatgggagctcagtatgccagaaaaaatggagaaaagcaatacaaactgggtggacattacccaagattttgaagaagcttgtcgagaattaaagttgggagaactacttcatgataagctatttggtctttttgaagccatgtctgctattgaaatgatggatcccaagatggatgctggcatgattggaaaccaagttaatcgaaaagttctcaattttgaacaagctatcaaggatggcactattaaaattaaagatctcaccttgcctgaactgatagggattatggatacatgtttttgctgtttgataacgtggttagaaggccattcactggcacagacagtatttacgtgcctttacattcataatccagactttatagaagatcctgctatgaaggcttttgctctgggaatcttgaaaatctgtgacattgcaagggaaaaagtaaataaagctgctgtttttgaagagatttcgcggctcctagaactgattgattttcatgaatataattttaaaaatgaaaatgttcaatgttggaaggaatg

SEQ ID NO: 216082 - DNA, 2178 bp, Artificial Sequence
  derived and/or modified sequence
atggtgatgaaggccagcgtggacgacgacgacagcggctgggagctgagtatgccagagaagatggaaaagtccaatacaaactgggtggacattactcaagactttgaggaagcatgcagggagttgaagctgggggaactgctacacgacaagctttttggactgttcgaagctatgtcggctatcgaaatgatggaccccaagatggacgctggaatgatcggcaatcaggtcaatagaaaggtcttgaacttcgaacaggctattaaggatggtacgataaaaatcaaggacctgactctcccagagctcataggaatcatggacacctgtttctgttgtttgatcacatggctggagggccacagccttgctcagacggtcttcacttgcctctatatccataaccctgacttcatcgaagacccagcaatgaaggccttcgccttggggatcttgaagatttgcgacattgctcgcgagaaggtcaacaaagccgccgtgttcgaggaagaggacttccagtccatgacctatggctttaaaatggcgaacagcgtgactgacctgcgggtcactggaatgttgaaggacgtggaagacgatatgcaaaggcgcgttaaatcgacacggagtagacaaggcgaggagagagatcctgaggtcgaactggagcaccaacaatgccttgctgttttcagcagggtaaagttcacgcgggtgctcctaactgtactgatagcctttacgaagaaagaaacaagtgcagtggctgaggctcagaagctgatggtgcaggcggcagacctactgtctgctatccacaactcattgcaccacggcattcaggcccaaaatgatactacaaaaggcgatcatcccatcatgatgggcttcgaaccgctggttaatcagaggctacttccaccaaccttccctaggtatgctaaaattattaaacgcgaggaaatggttaactatttcgctcgcctgattgacaggattaagacagtatgcgaagtggtgaatctgactaatctgcattgcatcctggactttttttgtgagttctccgagcagtcaccatgtgtgctgagccgttcactcctccagacaaccttccttgttgataacaaaaaggtcttcgggacccaccttatgcaggacatggtaaaagacgccttgcgcagtttcgtgtcaccccccgtgctgagtcccaagtgttacctatacaacaatcatcaggcaaaagattgtatcgactcattcgtcactcactgtgtacgcccattctgttctttgattcagatccatggtcacaatagagcccgccagagagataaactgggccatatcttggaggagttcgcaactttacaggacgaggccgaaaaggtggatgccgccctgcacaccatgctgcttaagcaggaaccccagaggcagcacctggcttgcctcgggacctgggtactgtaccacaacctcagaataatgatccagtatctgctcagcgggttcgagttagaactgtatagtatgcacgagtattattacatttattggtaccttagcgaatttctgtacgcttggctaatgtccaccctaagtcgagcagatggctcccagatggcggaggagagaatcatggaggagcaacagaaaggccgcagttccaagaagacaaaaaaaaagaagaaggtgcggccactcagccgggagattaccatgagccaggcgtatcagaacatgtgtgccggcatgttcaagaccatggttgctttcgatatggatggcaaagttcgtaagccgaagtttgagctagacagtgagcaggtaagatacgagcacagatttgccccgtttaacagcgtcatgactcccccgcctgttcactatcttcaatttaaggaaatgagtgacctaaataaatatagtcccccaccacagagcccggagttgtacgtggcagcttctaagcattttcagcaagccaaaatgatcctggaaaatattcctaaccctgaccacgaagttaacaggatcctgaaggtagccaagcccaatttcgttgttatgaagctgctggctggcggacacaagaaggaatcaaaagtcccacccgagttcgacttttctgctcacaagtattttccagtcgttaagttggtgtag

SEQ ID NO: 216083 - DNA, 885 bp, Artificial Sequence
  derived and/or modified sequence
atggtgatgaaggccagcgtggacgacgacgacagcggctgggagctttctatgccagagaagatggagaaaagcaataccaactgggtcgacatcacccaggattttgaggaggcttgtagagagctcaaattgggagagctgctgcacgataagctgttcggccttttcgaggctatgtctgccatcgagatgatggatcctaagatggacgctgggatgatcggtaaccaagtgaataggaaggtgctgaacttcgagcaggccatcaaagatgggacgatcaaaatcaaagacctcacactgccagagctaattgggattatggacacttgtttttgctgcctgataacctggctggaaggccactcgctggcacaaacggttttcacttgcttgtacatccacaaccctgacttcattgaggaccctgctatgaaggcttttgctcttggaattctcaaaatctgtgatatcgcccgcgagaaagtaaacaaggccgccgtttttgaagaagaggacttccaaagtatgacttacggcttcaagatggctaactcagtcacagatctgcgggtgactggaatgttgaaggatgtcgaagacgatatgcaacgccgggtaaaatctacccgctctcgccagggcgaggagcgcgatcccgaagttgaattagagcatcagcaatgcttagcagttttttctagagtgaaattcaccagagttctcctaaccgtactgatcgcatttaccaagaaagagacatccgccgttgccgaagcgcagaaattgatggtgcaagcagcagaccttctcagcgcaattcacaatagcctgcatcatggcatccaggctcagaatgatactactaaaggaggattgtag

SEQ ID NO: 216084 - DNA, 594 bp, Artificial Sequence
  derived and/or modified sequence
atggtgatgaaggccagcgtggacgacgacgacagcggctgggagcttagcatgccggagaaaatggagaagtctaatacaaactgggttgatatcacacaggacttcgaggaagcctgcagagagctcaaattgggtgagcttctgcatgacaagctgtttggcttattcgaggctatgtccgcgatagagatgatggatccaaaaatggatgctgggatgatcggaaatcaggtgaaccgcaaggttctaaattttgaacaggccatcaaggatggcactatcaagatcaaagatttaactttgccagaactgattggtattatggacacatgtttttgctgcctaatcacatggttggaaggccactctcttgcccagacagtgtttacatgcctttacatccacaatccagactttatagaagatccagctatgaaagcctttgccctgggaattctgaagatctgtgatatcgcccgggagaaggtaaataaggccgctgtgttcgaggaaatcagccgcctgttagagcttattgattttcacgagtacaatttcaaaaacgagaacgttcagtgttggaaagagtag

SEQ ID NO: 216085 - DNA, 2178 bp, Artificial Sequence
  derived and/or modified sequence
atggtgatgaaggctagtgtcgacgatgacgacagcggctgggagctcagcatgcccgaaaaaatggagaaatctaatacaaactgggttgacatcacccaggactttgaagaggcctgccgggagctgaagctcggagaactgttgcatgacaaactgtttggcctgttcgaggctatgtccgccatcgaaatgatggaccccaagatggatgctggaatgattggtaaccaagtcaatcggaaggtgctcaactttgagcaagctatcaaggacggaacaattaagattaaggacctgaccctgcccgaactaatcggtatcatggatacatgtttctgttgcctgatcacatggctggaaggtcacagcctggctcagacagtgttcacatgcttgtacatacataacccggattttattgaggatcctgctatgaaggcattcgcgctggggatccttaaaatttgtgacatcgcgagagagaaagttaacaaggccgctgtgttcgaagaagaggattttcagtctatgacctacggctttaagatggctaacagcgtcactgacctgcgggtcacaggcatgttaaaagatgtcgaggatgatatgcaaagaagggttaagtcaacgagaagtaggcagggagaagagcgggacccggaggtagaactcgaacatcaacaatgtctggcggtgttctctcgcgtaaagtttactcgggtgcttttaaccgtactaattgcctttactaagaaggagacctcagcagtggccgaggcacagaagctgatggtgcaagccgctgatttgctgagcgcgatccacaattccctccatcacggtattcaggcccagaacgatacaactaagggcgaccaccctataatgatggggttcgaacccctggtcaatcagaggctgttaccaccgacattccctcgctatgcaaaaattattaaacgcgaagagatggttaactacttcgccagattaatcgaccgaataaaaacggtgtgtgaggttgtcaaccttacaaacctgcactgcattctcgacttcttttgcgagttcagtgaacaaagtccatgcgtcttgagtcggagtctcctgcaaacaacattcctggtcgataataagaaggtcttcggcacacatctaatgcaggatatggtcaaggacgctctgcgttctttcgtgtccccccctgttctttcgcctaaatgctatctatacaataaccatcaggcaaaagactgtatcgatagcttcgtcacccattgcgtgagacctttctgctccctgatccagatccacgggcataaccgcgctaggcagcgagacaaactggggcatattctcgaggagttcgctactctgcaggatgaggcggagaaggtcgacgccgcactgcatactatgctcctgaagcaagaaccccagaggcaacacctagcctgtctgggtacatgggttctgtatcacaatctgcggatcatgattcagtatctactgagtggattcgagcttgaactctactcgatgcatgagtattattacatttactggtatctctccgaattcctctacgcttggctgatgagcaccctgagtcgggctgatgggagtcagatggctgaagagcgaattatggaggaacagcagaagggccgaagcagcaaaaagacaaagaaaaagaagaaagttcggccactgtcacgcgagattacaatgtcacaggcttatcagaatatgtgtgcgggaatgttcaagacgatggtcgcattcgatatggacgggaaggtccggaagcctaagtttgagctggactcagagcaggtgcggtacgaacaccgctttgcgccattcaattcagttatgactcctccacctgtgcattacctgcaattcaaagaaatgagcgacttgaacaaatacagtcctccacctcaaagccctgaactatacgtagctgcatctaagcactttcagcaggccaaaatgatcctggagaacattcccaatccagaccacgaagttaatcgcattctgaaggtagcgaagccaaatttcgtcgtgatgaaactcctggccggaggacacaagaaggagtccaaagtgcctcctgagttcgatttctcagcccataagtacttcccagtagtaaaactagtctag

SEQ ID NO: 216086 - DNA, 885 bp, Artificial Sequence
  derived and/or modified sequence
atggtcatgaaggcctccgttgatgatgatgactctggatgggagctgtcaatgccggagaaaatggaaaaaagtaacacgaactgggtagacatcacacaggacttcgaagaggcgtgtcgggaactgaaactcggtgagctgctccacgataaattattcgggcttttcgaagctatgagtgcgatcgagatgatggatccaaaaatggatgccggtatgattggcaaccaagtcaacaggaaggtgctgaatttcgagcaggccattaaggacggaactattaagattaaagacctcacactgcccgagctgatcggaatcatggatacttgcttttgttgcttgatcacttggctcgaaggccattctctcgcccaaacggtgttcacttgtctttacattcataaccccgatttcattgaggaccccgcaatgaaggcatttgccctgggcatcctcaagatatgcgatattgcgagggagaaagttaacaaggcagctgttttcgaggaagaagattttcagagcatgacatacgggtttaagatggctaattcagtgacagacctccgtgttaccggcatgctgaaagatgtggaagacgatatgcaacggagagtcaagtctacgcgaagcagacagggggaggagcgagaccccgaggtggagctggaacatcagcaatgtcttgccgtcttcagccgcgtgaagtttactagggtgcttctcacagttctgatagcatttacaaagaaggaaacaagcgccgtcgctgaggcgcagaagctgatggtgcaagccgctgatctgttaagtgctattcacaactcccttcaccacggcattcaagcccaaaacgacaccacaaaggggggtctctag

SEQ ID NO: 216087 - DNA, 594 bp, Artificial Sequence
  derived and/or modified sequence
atggtgatgaaagctagcgtggatgatgatgattccggatgggaactgtcaatgcctgagaaaatggagaaaagcaataccaattgggtggatattacccaagacttcgaggaggcgtgtcgggaactgaaactgggcgagttactgcacgataaactgtttggcttgtttgaggcgatgtccgcaatcgagatgatggaccccaagatggatgcgggaatgattggaaatcaggtgaaccggaaggtattgaacttcgagcaggcaattaaagacggcaccattaagatcaaggatctcaccttacccgaactgatcggaatcatggacacatgtttctgttgccttataacctggctcgagggccactcactggcacagacagtcttcacatgcctgtatattcacaaccctgattttatcgaggaccctgccatgaaggcgttcgctcttgggattctgaagatatgtgacattgcacgcgagaaggtgaacaaagccgctgtgttcgaggagataagcaggctcttggagctgatcgatttccacgaatacaacttcaagaatgagaacgttcagtgttggaaggaatag

SEQ ID NO: 216088 - protein, 459 aa, Artificial Sequence
  derived and/or modified sequence
MEKTCIDALPLTMNSSEKQETVCIFGTGDFGRSLGLKMLQCGYSVVFGSRNPQKTTLLPSGAEVLSYSEAAKKSGIIIIAIHREHYDFLTELTEVLNGKILVDISNNLKINQYPESNAEYLAHLVPGAHVVKAFNTISAWALQSGALDASRQVFVCGNDSKAKQRVMDIVRNLGLTPMDQGSLMAAKEIEKYPLQLFPMWRFPFYLSAVLCVFLFFYCVIRDVIYPYVYEKKDNTFRMAISIPNRIFPITALTLLALVYLPGVIAAILQLYRGTKYRRFPDWLDHWMLCRKQLGLVALGFAFLHVLYTLVIPIRYYVRWRLGNLTVTQAILKKENPFSTSSAWLSDSYVALGILGFFLFVLLGITSLPSVSNAVNWREFRFVQSKLGYLTLILCTAHTLVYGGKRFLSPSNLRWYLPAAYVLGLIIPCTVLVIKFVLIMPCVDNTLTRIRQGWERNSKH

SEQ ID NO: 216089 - DNA, 1380 bp, Artificial Sequence
  derived and/or modified sequence
atggagaagacctgcatcgacgccctgcccctgaccatgaacagcagcgagaagcaggagaccgtgtgcatcttcggcaccggcgacttcggcagaagcctgggcctgaagatgctgcagtgcggctacagcgtggtgttcggcagcagaaacccccagaagaccaccctgctgcccagcggcgccgaggtgctgagctacagcgaggccgccaagaagagcggcatcatcatcatcgccatccacagagagcactacgacttcctgaccgagctgaccgaggtgctgaacggcaagatcctggtggacatcagcaacaacctgaagatcaaccagtaccccgagagcaacgccgagtacctggcccacctggtgcccggcgcccacgtggtgaaggccttcaacaccatcagcgcctgggccctgcagagcggcgccctggacgccagcagacaggtgttcgtgtgcggcaacgacagcaaggccaagcagagagtgatggacatcgtgagaaacctgggcctgacccccatggaccagggcagcctgatggccgccaaggagatcgagaagtaccccctgcagctgttccccatgtggagattccccttctacctgagcgccgtgctgtgcgtgttcctgttcttctactgcgtgatcagagacgtgatctacccctacgtgtacgagaagaaggacaacaccttcagaatggccatcagcatccccaacagaatcttccccatcaccgccctgaccctgctggccctggtgtacctgcccggcgtgatcgccgccatcctgcagctgtacagaggcaccaagtacagaagattccccgactggctggaccactggatgctgtgcagaaagcagctgggcctggtggccctgggcttcgccttcctgcacgtgctgtacaccctggtgatccccatcagatactacgtgagatggagactgggcaacctgaccgtgacccaggccatcctgaagaaggagaaccccttcagcaccagcagcgcctggctgagcgacagctacgtggccctgggcatcctgggcttcttcctgttcgtgctgctgggcatcaccagcctgcccagcgtgagcaacgccgtgaactggagagagttcagattcgtgcagagcaagctgggctacctgaccctgatcctgtgcaccgcccacaccctggtgtacggcggcaagagattcctgagccccagcaacctgagatggtacctgcccgccgcctacgtgctgggcctgatcatcccctgcaccgtgctggtgatcaagttcgtgctgatcatgccctgcgtggacaacaccctgaccagaatcagacagggctgggagagaaacagcaagcactag

SEQ ID NO: 216090 - DNA, 1380 bp, Artificial Sequence
  derived and/or modified sequence
atggagaaaacctgtattgacgctctacccctgaccatgaactcgtctgagaaacaggaaacagtgtgcatcttcggcactggtgactttgggagatcactgggcctgaagatgctccagtgtgggtacagtgtcgttttcggatcacgaaatccacagaaaacaactctgctgcctagcggggctgaggtactgagctattctgaggccgcaaagaagagcggcattatcatcatcgccattcaccgcgagcattacgatttcctcactgagctgacagaagtattgaacggcaagatcctggtggatatctcaaacaacttgaaaattaatcagtatccagaaagcaacgctgaatacctggcccacttagttcctggagcacatgtggtgaaggccttcaatacaatcagcgcttgggcccttcaatctggtgctctggatgcatcaaggcaagtctttgtatgtggaaacgactctaaggccaaacaaagggttatggatattgtacgcaacctgggcttgaccccaatggaccaaggtagcctgatggccgcgaaagaaatcgaaaagtaccccctgcagctttttcccatgtggcggttccctttctacctcagcgcagtactatgcgtgtttctgtttttttactgcgtgatcagggacgtgatttatccttacgtctacgaaaaaaaagataatacgttcagaatggctatttcaatcccaaacaggattttccctatcactgccctgacactcctggctctagtatacctcccaggggtgattgcagctatactccaactgtacagaggaacgaagtaccgccgcttccctgattggctggaccactggatgctctgcagaaaacaactggggctggtcgcattggggttcgcgttcttacacgtactctataccttagtgattccaatcaggtactacgtccgctggcggttgggtaatcttactgtgacacaggcaattttgaaaaaagagaatccctttagcacttcctccgcctggctcagtgacagctacgtcgccttgggaattttaggcttctttctgtttgttctgctgggaattacatcgcttcccagtgtttcaaacgctgtcaattggcgcgagtttagatttgttcagtccaaactgggctacttaacactaatcctttgcacagcgcacactctggtgtatggaggaaagagattcttatcaccaagtaatctacgatggtatctgcccgccgcatatgttcttgggctcatcataccatgcaccgtgctcgttatcaaatttgttctgataatgccctgtgtcgataataccctaacgaggatccgccagggatgggaacgcaatagcaagcactag

SEQ ID NO: 216091 - DNA, 1380 bp, Artificial Sequence
  derived and/or modified sequence
atggagaagacctgcattgatgccctgcccctgaccatgaacagcagcgagaagcaggagaccgtgtgcatctttggaactggagactttggccgcagcctgggcctgaagatgctgcagtgtggctacagcgtggtgtttggcagcaggaacccccagaagaccaccctgctgcccagcggggctgaggtgctgagctacagcgaggccgccaagaagagcggcatcatcatcatcgccatccaccgggagcactatgacttcctgacagagctgacagaggtgctgaatggcaagatcctggtggacatcagcaacaacctgaagatcaaccagtacccagagagcaatgctgagtacctggcccacctggtgcctggggcccacgtggtgaaggccttcaacaccatcagcgcctgggccctgcagagcggggccctggatgccagccggcaggtgtttgtgtgtggaaatgacagcaaggccaagcagagggtgatggacatcgtgaggaacctgggcctgacccccatggaccagggcagcctgatggccgccaaggagattgagaagtaccccctgcagctgttccccatgtggaggttccccttctacctgtctgctgtgctgtgtgtgttcctgttcttctactgcgtcatcagagatgtgatctacccctacgtgtatgagaagaaggacaacaccttcaggatggccatcagcatccccaaccgcatcttccccatcacagccctgaccctgctggccctggtgtacctgcccggggtgattgctgccatcctgcagctgtaccggggcaccaagtaccgccgcttcccagactggctggaccactggatgctgtgcaggaagcagctgggcctggtggccctgggctttgccttcctgcacgtgctgtacaccctggtgatccccatccgctactacgtgcgctggaggctgggcaacctgactgtgacccaggccatcctgaagaaggagaaccccttcagcaccagcagcgcctggctgagtgacagctatgtggccctgggcatcctgggcttcttcctgtttgtgctgctgggcatcaccagcctgcccagcgtgtccaatgctgtgaactggagggagttccgctttgtgcagagcaagctgggctacctgaccctcatcctgtgcacagcccacaccctggtgtatggaggcaagcgcttcctgagccccagcaacctgcgctggtacctgcctgctgcctacgtgctgggcctcatcatcccctgcaccgtgctggtgatcaagtttgtgctgatcatgccctgtgtggacaacaccctgacccgcatccggcagggctgggagaggaacagcaagcactag

SEQ ID NO: 216092 - DNA, 1380 bp, Artificial Sequence
  derived and/or modified sequence
atggagaagacctgcatcgacgccctgcccctgaccatgaacagctccgaaaaacaagaaacggtatgtatctttggcacaggagacttcggcaggtctctaggcctgaagatgctacaatgcggatactccgtggtgttcggtagtaggaatcctcaaaaaacaaccctcttgccctctggggccgaggtgctctcttacagcgaggccgccaaaaaatccgggatcatcattatcgccatacatcgagagcactacgattttctgactgaattaaccgaggttctgaacggcaaaatcctggtggacatcagcaataacctgaagatcaaccagtaccctgagagcaacgcggagtatctggcccatctggttccaggggctcacgtcgtcaaggcttttaatactatttctgcttgggccttgcagagcggagccctggacgcatcgaggcaagttttcgtatgcgggaatgatagcaaagcaaagcaacgagtgatggacattgtgaggaaccttggactgactcccatggatcagggttctctcatggccgccaaagagatcgaaaagtacccgctccagctcttccctatgtggcgttttccattctacctcagtgcagtgctttgcgtcttcctgttcttctattgtgtcattagagatgtgatctatccgtatgtctatgaaaagaaggacaacacattcagaatggcaatatccattcccaatcgaatttttccaataaccgcacttaccctcctagccttggtgtacttaccgggggtgatcgccgctatcctgcagttataccgcggaacgaaatatagaagattccccgattggctcgaccactggatgctgtgtagaaagcaactgggcctcgtggcactcggattcgcttttctgcacgtcctctacactctggtgatccccattcgctactatgttcgttggcggctgggcaatttgactgtcacacaagccattcttaagaaagaaaaccccttctcaactagttctgcctggttgagtgacagctacgtagcattgggaatattaggcttttttttgttcgtgctcctcggcataacctcactgcctagcgtgagcaatgctgtgaattggcgagagttccgattcgtgcagtccaagctaggctacctgactttaattctgtgtacggctcatacgctggtgtacggggggaagcgattcttgtccccatccaatctccgttggtaccttcccgccgcctacgtattggggctgatcattccttgcaccgtcttagtcattaagttcgtgttaatcatgccgtgtgtagataatacactgacgcgcatcaggcaaggatgggagcggaacagtaagcattag

SEQ ID NO: 216093 - DNA, 1380 bp, Artificial Sequence
  derived and/or modified sequence
atggaaaaaacttgtatcgacgcacttcccctgaccatgaacagttcagaaaagcaggaaaccgtctgcatctttgggaccggagactttggccgaagcttgggtcttaagatgctgcagtgtgggtatagtgtggtgtttgggagccggaatcctcaaaagaccactctgctgccgtcaggcgcagaggtactttcctatagcgaagcagccaaaaaatcaggtatcattattatagccatccacagagagcattacgattttctgacagaattaacggaggtgctgaacgggaagatcctggtcgacatttctaataatctgaaaattaatcaatatcctgagtccaatgccgagtaccttgcccacctcgttccgggtgcccacgtggtgaaggcttttaacacgatatcagcgtgggcattgcaatcaggtgcactggacgccagccgccaggtgttcgtgtgcgggaatgatagcaaggctaaacagcgggtaatggatatcgtaaggaatcttggcctgacacctatggatcagggtagtcttatggctgcgaaagagatcgaaaagtacccactgcaattatttcctatgtggaggttcccattttatctgtcggctgtcctgtgtgtatttctgtttttctactgtgtgatccgggatgtgatatacccatacgtctacgaaaagaaagacaacacttttaggatggcaataagtattccgaacagaatcttccccatcaccgcgttgactctactggccctggtttatctccctggtgtgatcgccgcaatactgcagctctatcgcggaactaagtataggaggtttcccgactggctggatcactggatgctgtgccgcaaacagttgggcttggtcgcgttagggtttgctttcctgcatgtgctctatacactggttattcctatacgctactacgtccgctggcgcctgggcaatctaacggttactcaggcgatactgaagaaggagaatccatttagcacatctagcgcatggcttagcgatagctacgtggcattagggatcctcggctttttcctgttcgtacttctgggcattacatctctcccaagcgtttccaacgccgtgaattggagggaatttaggttcgtgcagtccaaactaggatatttgactctgattctgtgtacggctcacaccctggtatacgggggtaaaaggtttctgtccccttcaaacctgaggtggtacctccctgctgcgtatgttctgggccttatcattccttgtaccgtgctcgtaattaaattcgtcctcatcatgccttgcgtcgataatactctgaccagaataaggcagggctgggagaggaattcaaagcactag

SEQ ID NO: 216094 - DNA, 9988 bp, Artificial Sequence
  derived and/or modified sequence
gctgagctgcaggcgcggcgaaacttccctctacccgcccggcccgcggcgcgcaccgttggcgctggacgcttcctccttggaagcgcctctccctcagttatggagaaaacttgtatagatgcacttcctcttactatgaattcttcagaaaagcaagagactgtatgtatttttggaactggtgattttggaagatcactgggattgaaaatgctccagtgtggttattctgttgtttttggaagtcgaaacccccagaagaccaccctactgcccagtggtgcagaagtcttgagctattcagaagcagccaagaagtctggcatcataatcatagcaatccacagagagcattatgattttctcacagaattaactgaggttctcaatggaaaaatattggtagacatcagcaacaacctcaaaatcaatcaatatccagaatctaatgcagagtaccttgctcatttggtgccaggagcccacgtggtaaaagcatttaacaccatctcagcctgggctctccagtcaggagcactggatgcaagtcggcaggtgtttgtgtgtggaaatgacagcaaagccaagcaaagagtgatggatattgttcgtaatcttggacttactccaatggatcaaggatcactcatggcagccaaagaaattgaaaagtaccccctgcagctatttccaatgtggaggttccccttctatttgtctgctgtgctgtgtgtcttcttgtttttctattgtgttataagagacgtaatctacccttatgtttatgaaaagaaagataatacatttcgtatggctatttccattccaaatcgtatctttccaataacagcacttacactgcttgctttggtttacctccctggtgttattgctgccattctacaactgtaccgaggcacaaaataccgtcgattcccagactggcttgaccactggatgctttgccgaaagcagcttggcttggtagctctgggatttgccttccttcatgtcctctacacacttgtgattcctattcgatattatgtacgatggagattgggaaacttaaccgttacccaggcaatactcaagaaggagaatccatttagcacctcctcagcctggctcagtgattcatatgtggctttgggaatacttgggttttttctgtttgtactcttgggaatcacttctttgccatctgttagcaatgcagtcaactggagagagttccgatttgtccagtccaaactgggttatttgaccctgatcttgtgtacagcccacaccctggtgtacggtgggaagagattcctcagcccttcaaatctcagatggtatcttcctgcagcctacgtgttagggcttatcattccttgcactgtgctggtgatcaagtttgtcctaatcatgccatgtgtagacaacacccttacaaggatccgccagggctgggaaaggaactcaaaacactagaaaaagcattgaatggaaaatcaatatttaaaacaaagttcaatttagctggatttctgaactatggttttgaatgtttaaagaagaatgatgggtacagttaggaaagtttttttcttacaccgtgactgagggaaacattgcttgtctttgagaaattgactgacatactggaagagaacaccattttatctcaggttagtgaagaatcagtgcaggtccctgactcttattttcccagaggccatggagctgagattgagactagccttgtggtttcacactaaagagtttccttgttatgggcaacatgcatgacctaatgtcttgcaaaatccaatagaagtattgcagcttccttctctggctcaagggctgagttaagtgaaaggaaaaacagcacaatggtgaccactgataaaggctttattaggtatatctgaggaagtgggtcacatgaaatgtaaaaagggaatgaggtttttgttgttttttggaagtaaaggcaaacataaatattaccatgatgaattctagtgaaatgaccccttgactttgcttttcttaatacagatatttactgagaggaactatttttataacacaagaaaaatttacaattgattaaaagtatccatgtcttggatacatacgtatctatagagctggcatgtaattcttcctctataaagaataggtataggaaagactgaataaaaatggagggatatccccttggatttcacttgcattgtgcaataagcaaagaagggttgataaaagttcttgatcaaaaagttcaaagaaaccagaattttagacagcaagctaaataaatattgtaaaattgcactatattaggttaagtattatttaggtattataatatgctttgtaaattttatattccaaatattgctcaatatttttcatctattaaattaatttctagtgtaaataagtagcttctatatctgtcttagtctattataattgtaaggagtaaaattaaatgaatagtctgcaggtataaatttgaacaatgcatagatgatcgaaaattacggaaaatcatagggcagagaggtgtgaagattcatcattatgtgaaatttggatctttctcaaatccttgctgaaatttaggatggttctcactgtttttctgtgctgatagtaccctttccaaggtgaccttcagggggattaaccttcctagctcaagcaatgagctaaaaggagccttatgcatgatcttcccacatatcaaaataactaaaaggcactgagtttggcatttttctgcctgctctgctaagacctttttttttttttactttcattataacatattatacatgacattatacaaaaatgattaaaatatattaaaacaacatcaacaatccaggatatttttctataaaactttttaaaaataattgtatctatatattcaattttacatcctttttcaaaggctttgtttttctaaaggctttgttttcctttttattatttttttcttttttatttttttgagacagtcttgctctgtcgctcaggctggagtgcagtggcacgatctcagctcactgcaacctcctcctcccaggttcaagtgattcttgttcatcagcctcccgagtagctgggactacaggcatgtgccactatgcccagctaatttttgtacttttagtagagacagggtttcaccacattggtcaggctggtcttgaaatgctggcgtcaagtgatctgcctgcctccgcctcacaaagcactgggattacaggcatgaatctggccttacgtaatatattttcttaatggctgcataatatcacatcaaataggcatttttcaaacctctttccttattaaacatgtagactatatccattttttactaaaataaataacatttcagataatatctttgcactgataatgttgccaagccatttctaaagtgaccttatcaatttaattaccattggatgagggtgttgctttcatcgcaccattgtagattgtcttttttatttcaatttgcgtttatttataactggttgcaaaggtacacagaacacacgctccttcaacttatctttgataaacccaagcaaggatacaaaaagttggacgacattgagtagagtcatggtatacggtgctgaccctacagtatcagtggaaaagataaggaaaatgtcactactcacctatgttatgcaaaacagttaggtgtgctggggctggatactgctcttttacttgagcattggttgattaaagtttaggtaccatccaggctggtctagagaagtctttggagttaaccatgctctttttgttaaagaagagagtaatgtgtttatcctggctcatagtccgtcaccgaaaatagaaaatgccatccataggtaaaatgctgacctatagaaaaaaatgaactctacttttatagcctagtaaaaatgctctacctgagtagttaaaagcaattcatgaagcctgaagctaaagagcactctgatggttttggcataatagctgcatttccagacctgacctttggccccaaccacaagtgctccaagccccaccagctgaccaaagaaagcccaagttctccttctgtccttcccacaacctccctgctcccaaaactatgaaattaatttgaccatattaacacagctgactcctccagtttacttaaggtagaaagaatgagtttacaacagatgaaaataagtgctttgggcgaactgtattccttttaacagatccaaactattttacatttaaaaaaaaagttaaactaaacttctttactgctgatatgtttcctgtattctagaaaaatttttacactttcacattatttttgtacactttccccatgttaagggatgatggcttttataaatgtgtattcattaaatgttactttaaaaatatttcctagttttgtttaattctggttttaactcatcagcattccaaataaagttactaaaaggttttgaatcacagtagttccagcatctgggactaaaaatacttcccttcagggataagcaaaagagaaggcagtgcatgggtttgaaagtgcattaacagatctgcagcttcttgcaatgtaagcttgagctcagcggggtggcacagtccagtatgctgtgtgtgcttcagtattaccctcagagaggggagagcatcagatggctaaatggggaggactgcactatcccacgctggatttttgtgagaatttggaggtaaaaaaggctttccttctccatgcagacgccacagggataaggctaatggcttgacaagcagacttcaggttggattcagactgcgtgactgggcattaaatgccttgcacaactggactgctgcagctctgatgggtgttatcctgctttcaaaaatagtattaaaacttacaaataaagagaggactgacaacctggaggaagctggaagcaaatggaaagcccctactgaaaaagccatttcaattagaaattcattcaggagctcttcattcatctattgttcagggatcacaaaagagccatgataatgataaatgcatattatgcatttcacctctgagagcataaaagcttctggaactctgttccaaaattaaggtgtaatggcagtcatggtactgcacacagtagttgcaattttcattctccatcatcacaaccatcatcttcactaccacttctccaacacacacacacacacacacacacacacacacacaccccatgagagcccacagatagccttacagggtcctacttcaattttctataatgaattaggtttacattctagaaaaatccttcactcttctaaaggtttgttcagtagaatttgggaaaagagtataagttactcttcaatgtatcagaagcatttggaccaggtgactccatcttcaatagaggctgagtaaaataagcctgagactggccgggcgcagtgactcacacctgtaatcccagcactttgggaggccaagtcaggtggatcacctgaggtcaggagtttgagaccagcctggccaacatggtgaaaccccatctctactaaaaatataaaaaattagccagcatggtggcgcatgcctgtaatcccagctactctggaggctgaggcaggagaagtgcttggacccaggaagcagaggttacaatgagccaagatcgcgccattgcactccagcctgggtgacaagagtgaaactccgtctcaaaataaataaataaataaataagactgagacctactgggctgcattcccaggacagcaggtgttcttagtcacaggatgagataggagtaagcacaaggtacaggtcacaaagaccttgctgataaaacaggatgcaataaagaagccgtccaaaacctaccaaaaccaagatggcaatgaaagtgatctttggctgtctcagctgttcattatatgctaattataatatattagcagcctaaaatacactcccactagcaccatgacagtttacaaattccatggccacatccagaagttaccctatatgttctaaaagcaggaggagccctcagttctgggaatcatctgcccctttcctgaacatctcatgaataatccatcccttgtttagcatataatcaagaaataactataactatactcagccaggcagcccatgccactgctctgcctatgaaatagcccttttattcctttacagtcttaataaacttgctttcattttatggattcacctcaaattctttcttgtgcaagatccaagaactctctcttggggtctgtattggaccccctttctggtaacatatgcattacctctcctcaagctcgaggcaaagtcctaaagtttcggataagacccatatgagggaggtgaaggatgaagggattgagggcaaagggactgagaaaaggggagtgtggaagagcaagacagtgctcttgccattacccagcaaaagccaaaaggatccagtactacttgctttctgctgtaagggaattttggaaggcttttaatgatacttacagcagagtgccatgcgtaaagcctatgctaacaatttcacatgcattatcttatttaatcctcataacagttctctaaggttctcttcttatccttatttatcagaagaggaaactgagctttgaaatctcagtactttgactaagttcacacaactaatgagaggcagagctgggatctaggcagtctgactccaggcccatctccttttaacacaacgatataataggggacacccatgctgtcctcttaaatgtccctttgaatccacaaaatagactaagtgaacgaaaccactgcaactcttcttaaaaacatttttaaagacaagaagcttattcgcattttaaatattcctgattgcccagtcctcaatactccaggtttatctatgctgatttcaattcgtcctctaaggttgtagaaacacaggatctgtggttcccgcattaagttcaattccattgcaattgccattttaatcttcccactctagtctggccacaaggtttcctaaactctaaagggagctttgttctggtggagggaggtaaaatccccagacctgaggactcgaaggggcagtcaaggagaggatagctcttctccagagcttaaaggcaaatattttctttttccctggtttctcaccttattgctttgtgtactgagtgaacttatttgtttttgagatccagtaacccatgcaagaaatttcataacacttctcatttagtactttaatactagttgaagaatctagggttacacacacacacacacacacacaccaggcttagttccattacctatagctgtaaaaatgagatttttttctcagttttgtgaaaatgaaaggctgctggactggaactcacagtattgtatatcaaaaagtatcagattgtgataaaatagaaacccagaattaaacttggccttatgatttttagaaagtcaacagattttgaaggagcccacccagtgtattcatttcatttttactaatcctttctttcatgctaagatagagatgaaaaagaatgacagacttcctgttctcatttcattacagcaaaataaataagttttagtgttccatagctctgtaggatgactatagttaaaaataacatataatttcaaatagccaggaggacattgactgttcccaacacaaagaaatgataaatgtttgcaatgatggatatgctaattacactgatctgatcactatacattgtacatacataaacatgactatgtacctcatggatatgtacaactgttatttgtcagttttagaaaataaaaaagcagaagagatctgctaccaaatgcaggaattttctatagagtctgttatagctagccttctacaggcttaactcttctcatgatggagtattgaccatcaccaacaggaaatcttttgttttaggcactccaggaaattatcagggagttctctctgtagataaccaaagtttccctagttgtacttctacccatttttcttagtgtgatcatttaaagcagtgcctcaccaactatcagagatgggggccagtaatttttgtttcatttttttccagttcattacaaatcaatgcatatgtctgtaaaacacaaaatcacacccttaaatgtgatggcaacatcaaattgccataaaagtttctaaacttttcaccccaatttctgaatttatcacagactggtaaaaaacagctcacaagccagcaccacgggcagaccacactttgcacagtgctcaaacgtaggcctaacaacctggcttggcttggcacttctaaaaaccgatcctgaggcaaggcttcttgtaaaagagtttatactggaagttaaaaatcatcaaattattagatactgggaatggagtagtaaagtagacagagcagggaaggaataaagtatgaattttcaagctggttacccatctgggcaactggagctcagttttgctgggaaagtctggaagacagtgtcagatataactaagagttattcccatcaaggggaaaggaaactgtgcttttcatccaccaaatccttgcttaacattggaatacagatgcttccaagacattaactttgtggcacttctggcttttcctacacacttattgtgtatgccaccatgtctagggggaaaaaggcccacaggcaaagaggtaccagcattcataccaccagctttcagcttgtagaggtggccgccaagaggaactcgtagttggcagtgccaactacaactactacaccaaccagctggaaactatacaaagagtatgaacaaagttcacaggagaaacaaggctctgcaacatatgaaaatatattctacttcattcataatgagacgcatgaaaattgtaactgtatcaataccatttctcacctagtagatgggcaaaaatccaaatgtttgagcacacattctgtgggtgaggctgtggaaacgtaggttcacatacattgctcttggatatgcagattaggaccgctcctgtggagagcagttagggaatatctttcaaaattaaaaaatgcagagttaagttttgatccaggagtctcactcctgagaatttatgctatagatatgcctacaagcatttgagatgaaaaagaagcattgctatttgtttttcttgtttttcatgaataacattgtaaaagtagaatatgggcagtgattcaagcattcatctttgggactggttaaggaaactatgatgctttcacagaatgaaattctatgcagctgtttaaaacaaaccaagacaccttctttcacatatatggaaagatgtccaaaatatactgttcagtttttaaaaaggtacaaaataacatatatagtatgattccttttgcatatgtgtatttgcttttaattgcctaaagaaactctcagaaggattcaaaagatccataccaaacaagatgggagaacagaggagtagtgacaggagtagaagcactgtagaccttttcatatcattttggtttttaaattacatgagtaggttacctaattattaaaataaatttaatttaaaaggtaatgggggataggaagaaatttgttaaaagatacaaaattacagctagataggaagattaagttgtagtgttctatagctctgtaggatgactacagttaacaataatatatattctaaatagctagaaggaggatattgaatgttctcaacagaaagaaatgataaatgcttaagatgatggatatactaattaccctaatctgatcactgtatattttgtgtattgcaatgtcactatgtaccccataaatatgtataattatcgtgtgtcaattaaaaatttttaattaaaaaattataaacaaaaaa

SEQ ID NO: 216095 - protein, 462 aa, Artificial Sequence
  derived and/or modified sequence
MAKFRRRTCIILALFILFIFSLMMGLKMLRPNTATFGAPFGLDLLPELHQRTIHLGKNFDFQKSDRINSETNTKNLKSVEITMKPSKASELNLDELPPLNNYLHVFYYSWYGNPQFDGKYIHWNHPVLEHWDPRIAKNYPQGRHNPPDDIGSSFYPELGSYSSRDPSVIETHMRQMRSASIGVLALSWYPPDVNDENGEPTDNLVPTILDKAHKYNLKVTFHIEPYSNRDDQNMYKNVKYIIDKYGNHPAFYRYKTKTGNALPMFYVYDSYITKPEKWANLLTTSGSRSIRNSPYDGLFIALLVEEKHKYDILQSGFDGIYTYFATNGFTYGSSHQNWASLKLFCDKYNLIFIPSVGPGYIDTSIRPWNTQNTRNRINGKYYEIGLSAALQTRPSLISITSFNEWHEGTQIEKAVPKRTSNTVYLDYRPHKPGLYLELTRKWSEKYSKERATYALDRQLPVS

SEQ ID NO: 216096 - protein, 198 aa, Artificial Sequence
  derived and/or modified sequence
MAKFRRRTCIILALFILFIFSLMMGLKMLRPNTATFGAPFGLDLLPELHQRTIHLGKNFDFQKSDRINSETNTKNLKSVEITMKPSKASELNLDELPPLNNYLHVFYYSWYGNPQFDGKYIHWNHPVLEHWDPRIAKNYPQGRHNPPDDIGSSFYPELGSYSSRDPSVIETHMRQMRSASIGNYCIYIYVCLCLYICI

SEQ ID NO: 216097 - protein, 207 aa, Artificial Sequence
  derived and/or modified sequence
MAKFRRRTCIILALFILFIFSLMMGLKMLRPNTATFGAPFGLDLLPELHQRTIHLGKNFDFQKSDRINSETNTKNLKSVEITMKPSKASELNLDELPPLNNYLHVFYYSWYGNPQFDGKYIHWNHPVLEHWDPRIAKNYPQGRHNPPDDIGSSFYPELGSYSSRDPSVIETHMRQMRSASIGNYCIYICVFVSVYMHINDFLCNFTS

SEQ ID NO: 216098 - DNA, 411 bp, Artificial Sequence
  derived and/or modified sequence
atgggcgattctcggagagatgtgctacacgaaccggccattgctctgctgtcttcaccccagacgcagtctcggctgcagattgacgccttcatcgcacggcggtgctgggggtcccagtgggatataaccgggtacatccaccaacaggatttccctactgcagtcttcattggctttagcaacgaattcaacatctgcatcccacacccatttacggaatggctgcagtgtgtccgaaagtactctcagtcatggggagtgcgcaagggtcagagacacattcggtacggcatgtgcagcgagcgaactcaccacctcagccggacttacagcagtttgcttgagcgagaagagaagttagccttttacggcgtgcttaccatgtgtcagatctggtgcgagacctag

SEQ ID NO: 216099 - DNA, 1389 bp, Artificial Sequence
  derived and/or modified sequence
atggccaagttccgccgtcggacctgcatcatcttggcgctgttcatcctctttattttctcccttatgatgggacttaagatgctacgtccaaataccgcgactttcggcgcccctttcggactggatttgttgcccgagctgcaccagaggacgatccacttgggaaaaaatttcgactttcagaaatctgaccggataaattccgaaaccaacaccaaaaacctgaaatccgtggagattacaatgaagccaagtaaggcctcagagttgaatctggatgaactgccgcctctcaacaactatctccacgtcttctattactcgtggtatggaaaccctcagtttgacggaaagtatattcattggaatcacccagtgttagaacattgggatcccaggatcgccaagaactatccgcaggggagacataacccacctgacgacatcgggtcttccttctaccccgagctgggatcctacagctctagggacccgagtgtgattgaaacgcatatgcgacagatgcggtctgctagcatcggcgtactcgctctctcatggtatccgcctgacgttaacgacgaaaacggcgagccaaccgataatctggtgcccaccattctcgataaagcacacaaatacaacctaaaagtgaccttccatatcgaaccatattcaaatcgggacgatcaaaacatgtacaaaaatgtaaagtacataatcgacaaatacggcaaccacccggccttttaccgatataagacgaaaacgggaaacgcactgccaatgttctatgtttatgacagttatatcactaagccagaaaagtgggctaacctgttgacaacatccggcagccgctctatcaggaacagcccatacgatgggctgtttatagcactgttggtggaggagaagcacaaatacgacattctgcagtcgggctttgatgggatctacacatattttgccacaaacggatttacgtacggatcaagccatcaaaactgggctagtctgaaactgttttgtgacaagtacaacttgatctttatcccatctgttgggcccgggtacatagatacatcaattagaccctggaatactcagaataccagaaatcgaatcaacgggaagtactacgagatcggcttgtccgcagcacttcagacgcggccaagtcttatctccataacaagcttcaacgagtggcacgagggcacgcagatcgagaaagcagtaccaaagcgcacgagcaacacggtctatcttgattatcgaccccataagccggggctttacctcgagcttactcggaagtggtccgaaaagtatagcaaggaacgggctacctacgctctggacagacagctaccggtctcctag

SEQ ID NO: 216100 - DNA, 597 bp, Artificial Sequence
  derived and/or modified sequence
atggctaaattccggaggaggacatgcattatcctcgccctgtttattctctttatcttctctcttatgatgggcctcaagatgctccggcccaatacagcaacttttggggccccttttggccttgaccttctccctgagctgcatcagcgtaccatccacttgggcaaaaattttgattttcagaagtccgaccggattaactcagagaccaataccaaaaacttaaaaagcgtggagattacgatgaagccgtctaaggccagcgagctcaatctggatgagcttcccccactaaacaattatctgcatgtgttctactattcttggtatgggaatccccaattcgacgggaaatacatccactggaatcaccctgtattagaacactgggatcccagaattgctaaaaactatcctcagggtcgacataaccctcctgacgacataggctccagtttttatccagaactcggttcttattcgagccgagatccatctgtgatcgagacccatatgcgacagatgaggtcagcgtccatcggcaattactgcatttacatctatgtgtgtctgtgcctctatatttgcatctag

SEQ ID NO: 216101 - DNA, 624 bp, Artificial Sequence
  derived and/or modified sequence
atggccaaatttaggcggcgtacttgtataatcctagctttgtttattctgttcatcttcagcttaatgatgggtctaaaaatgctgcgcccaaatacggcgacttttggcgcgccttttgggttggatctgctccccgagctacaccagcgcaccattcatctgggcaagaattttgacttccagaagtccgatcgaattaactcagagacaaatactaaaaatcttaagtccgtcgagattactatgaagccttctaaagccagcgagctgaaccttgacgagctcccaccccttaacaattatctgcacgtgttttactatagctggtatggaaatcctcagttcgatggcaagtatatccactggaaccaccctgtgctcgagcattgggacccacgaatcgcgaagaactatccgcagggcagacacaacccacccgatgatattggctcaagcttttaccccgagctcgggtcctactcttccagggacccctccgtgattgaaacacacatgcgccagatgcggtcagcctccattggcaactactgtatttatatttgcgtgtttgtttcagtgtatatgcacataaacgattttctgtgtaactttacgagctag

SEQ ID NO: 216102 - DNA, 1389 bp, Artificial Sequence
  derived and/or modified sequence
atggccaagttcagaagaaggacctgcatcatcctggccctcttcatcctcttcatcttcagcctgatgatgggcctgaagatgctgcggcccaacacagccaccttcggggcccccttcggcctggacctgctgcctgagctgcaccagaggaccatccacctgggcaagaactttgacttccagaagagtgaccgcatcaacagcgagaccaacaccaagaacctgaagtctgtggagatcaccatgaagcccagcaaggccagcgagctgaacctggatgagctgccccccctgaacaactacctgcacgtgttctactacagctggtacggcaacccccagtttgatggcaagtacatccactggaaccaccctgtgctggagcactgggaccccagaattgccaagaactacccccagggccgccacaaccccccagatgacatcggcagcagcttctacccagagctgggcagctacagcagccgggaccccagcgtgattgagacccacatgaggcagatgaggtctgccagcattggagtgctggccctgtcctggtaccccccagatgtgaatgatgaaaatggagagcccacagacaacctggtgcccaccatcctggacaaggcccacaagtacaacctgaaggtgaccttccacatcgagccctacagcaacagagatgaccagaacatgtacaagaatgtgaagtacatcatcgacaagtatggcaaccacccagccttctaccgctacaagaccaagacaggaaatgccctgcccatgttctacgtgtatgacagctacatcaccaagccagagaagtgggccaacctgctgaccaccagcggcagccgcagcatccggaacagcccctatgatggcctcttcatcgccctgctggtggaggagaagcacaagtatgacatcctgcagagcggctttgatggcatctacacctactttgccaccaacggcttcacctacggcagcagccaccagaactgggccagcctgaagctgttctgtgacaagtacaacctgatcttcatccccagcgtgggccctggctacatcgacaccagcatccggccctggaacacccagaacaccaggaaccgcatcaacgggaagtactatgagatcggcctgtctgctgccctgcagacccggcccagcctcatcagcatcaccagcttcaatgagtggcatgagggcacccagatcgagaaggctgtgcccaagaggaccagcaacacagtgtacctggactaccggccccacaagccaggcctgtacctggagctgaccaggaagtggagcgagaagtacagcaaggagcgggccacctacgccctggaccggcagctgcctgtgtcctag

SEQ ID NO: 216103 - DNA, 597 bp, Artificial Sequence
  derived and/or modified sequence
atggccaagttcagaagaaggacctgcatcatcctggccctcttcatcctcttcatcttcagcctgatgatgggcctgaagatgctgcggcccaacacagccaccttcggggcccccttcggcctggacctgctgcctgagctgcaccagaggaccatccacctgggcaagaactttgacttccagaagagtgaccgcatcaacagcgagaccaacaccaagaacctgaagtctgtggagatcaccatgaagcccagcaaggccagcgagctgaacctggatgagctgccccccctgaacaactacctgcacgtgttctactacagctggtacggcaacccccagtttgatggcaagtacatccactggaaccaccctgtgctggagcactgggaccccagaattgccaagaactacccccagggccgccacaaccccccagatgacatcggcagcagcttctacccagagctgggcagctacagcagccgggaccccagcgtgattgagacccacatgaggcagatgaggtctgccagcatcggcaactactgcatctacatctacgtgtgcctgtgcctgtacatctgcatctag

SEQ ID NO: 216104 - DNA, 624 bp, Artificial Sequence
  derived and/or modified sequence
atggccaagttcagaagaaggacctgcatcatcctggccctcttcatcctcttcatcttcagcctgatgatgggcctgaagatgctgcggcccaacacagccaccttcggggcccccttcggcctggacctgctgcctgagctgcaccagaggaccatccacctgggcaagaactttgacttccagaagagtgaccgcatcaacagcgagaccaacaccaagaacctgaagtctgtggagatcaccatgaagcccagcaaggccagcgagctgaacctggatgagctgccccccctgaacaactacctgcacgtgttctactacagctggtacggcaacccccagtttgatggcaagtacatccactggaaccaccctgtgctggagcactgggaccccagaattgccaagaactacccccagggccgccacaaccccccagatgacatcggcagcagcttctacccagagctgggcagctacagcagccgggaccccagcgtgattgagacccacatgaggcagatgaggtctgccagcatcggcaactactgcatctacatctgtgtgtttgtgtctgtgtacatgcacatcaatgacttcctgtgcaacttcaccagctag

SEQ ID NO: 216105 - DNA, 4575 bp, Artificial Sequence
  derived and/or modified sequence
gtctgggctcggggcgcggcggcagtcagctctatgttcgcggtcttaacctctcctctggccgagtccttgcaagaagtgaattacccgaccctgcaaaacacttactattttggagtttaaagtatgtcatcatggcaaagtttcggagaaggacttgcatcattttggcactttttattctatttattttctctctgatgatgggtttaaaaatgctgagaccaaatacagctacttttggagctccttttggacttgaccttcttccagaacttcatcaacgaactattcatttggggaaaaattttgatttccaaaagagtgacagaatcaacagtgaaacaaataccaagaatttaaaaagtgttgaaatcactatgaaaccttccaaagcctctgaacttaacttggatgaactaccacctctgaacaattatctacatgtattttattacagttggtatggaaatccacaatttgatggtaaatatatacattggaatcatccagtgttagagcattgggaccctagaatagccaagaattatccacaagggagacacaaccctccagatgacattggctccagcttttatcctgaattgggaagttacagttctcgggatccttctgtcatagaaactcacatgagacaaatgcgctcagcttcaattggtgtactagccctctcttggtacccacctgatgtaaatgatgaaaatggagaacctactgataacttggtacccactattttggataaagctcataaatataacctaaaggttacttttcacatagaaccatatagcaatcgagatgatcaaaacatgtacaaaaatgtcaagtatattatagacaaatatggaaatcatccggccttttacaggtacaagacgaagactggcaatgctcttcctatgttttatgtctatgattcctatattaccaagcctgaaaaatgggccaatctgttaaccacctcagggtctcggagtattcgcaattctccttatgatggactgtttattgcccttctggtagaagaaaaacataagtatgatattcttcaaagtggttttgatggaatttacacatattttgccacaaatggctttacttatggctcatcacatcagaattgggctagcctaaaattattttgtgataaatacaacttaatatttatcccaagtgtgggcccaggatacatagataccagcatccgtccatggaacacgcaaaacactcggaaccgaatcaatgggaagtattatgaaattggtctgagtgccgcacttcagacacgccccagcttaatttctatcacctcttttaatgagtggcatgaaggaactcagattgaaaaagctgttcccaaaagaaccagtaatacagtgtacctagattaccgtcctcataaaccaggtctttacctagaactgactcgcaagtggtctgaaaaatacagtaaggaaagagcaacttatgcattagatcgccagctgcctgtttcttaatgcattgattaaagtttaatagttatcaaaatcacctaatttttaaaaatagctttcgttttgagttctggaaagaaaactgtcaaaatcagtatatactattagttatatttaaaaatatttttttaaattctttacagataatattatacttgttacccttcacaataccacatgagaaaatatctgagacaaaatgtatacaaatatattccttatggcataatttattgcatttctgactgaaatcaaaattctgatttgatggcaattgaattttcattttacaatagataaatgcttgtgctacctaaagcacttagcacacagttaaattatatttacatcctagacccaaataaataggattgtgtgtatatttgggatatctattgaagaaaaaaagaaaaccccttaaagataatgtacatgcttcatgtcatgtctttaaaataatttaatcaactttattgtcttagtatttagactctggataactctacaataatgaggaaattcttaagaataacaaaatcactgtaccttcctctcaattttgctgtgaacctgaaatggctttaaattaatactcttattttttatttaatttaattacataaattaaaccttaccatgaccaaattgtgttaggacggcctgctatctacagcacagtgtgtcatttgcagatttgtggttacctataccacgctaggtgttttgacatgtttagtgtttctgctttacagtgctgaattccatattttagaagctatgaaagtccttttatgaaaaagttactgattgcttctcagttattaggaaaacagttgtttcacaattattatgtagatatgatgcccaaatatcatttttagtatatcttgtcgatctttaagttgttactattgtgttattcatgtctttaaatcagataccaaatattttttaggaaagaaaaatgttattactgtcattaggttgtcttttaatactttaagttattttgacgaaaagtaatagagaaaatttacttagcattttagattctagagacatggaaatgaaaattattttatgtctagagtaggtcctgaagtttggctttacattaagtttagcactgtatcagaatgaagaaactaatattttacataaaaactaatactttcaattttttatatagtaatatccccattttgtaaatgttagacttttatcatacctgtaagttaaaatacttgttatcaataacttgtcatgttgtgacaaattgatcacttgtgtacgaaaaataaatctccttaaaaactaaataaaatgcactgtattcttacagttaatgtttataactatagtaaaaaattaatatatatcctattacataaatgttatttcttaggtgttccattaagaagagcaatagaataatgctaaaaaataatgcctataaatcttcagagtataaagacatccattcagaaacaaaaattagcactaaattttttataaaatagaccagatgacaaaatttattttatttttaaacagtggttttgacacaaattatgttattgaaaagcattattaatgtttaatttatttaaaattttggaatttgccatttctcagagaatgatcaggccttaggaaattaatacagtagtagtaatcattttctaggggaaaataaaagaataaatcactatactgatattttgatacaagcaagcacttacatggtaatcactatatagatccaacctgtggattttcttcttatgtccatttaactagaatatattattttaggtataatttacaaatgtcacacctaataatcttttataatataccatatttcattaaagttttgttagagaagtatctaccacagaggagtttttgtcattgtgtacgttgtgtatttgaacccaccatgacagaaagtaaattttaggaaatagttatgagattaagggaaaatctataaaaacaaggttagcatattctcaacacagataccaccactttctttttcccattatagacatggtgaatccacacagcatacttcatctctgagctttgttgtgattcctcaacacattaccctaaccagccagcagtaacagatttcagagtaagataaagcagattctgtcttcattgcaaaaagttattctcaatggaagaatggcatctgatctcataattactagtttatattaatatagtttttttctccctttttaataaaataattacagtcatccctcagtgtctgtgggggattggttccagttacccctatagataccaaaatctgcagatgctcaagtccctgatataaactggcatagtagttgcatataatctatgcacatcctcctgtatacattaagtcatctctagattatttataacacttaatacaatgtaaatgctatgtagttgttataccatactggttagtgaataattacatgaaaaaaaagagtctgtacatcttcagagtttcagtcggcaatttcttggccatggatgtagaacctacagataaggtgagccaactgcattaggaaataactctaataattctgttaattcttagagaggaaaactttcaaaatcttcctcaggtatttattacaactgcctttaccattttagttgtaacacagtttaaattgttatgataacaagtaaataagagcaaagaatgtatttcttaattcaaaactatacgtttgaattcaatatggtataacttaaagtggtataatacatacaatgcatgaatcataatggattcttttataagttattaatttttatggtttaatcagtctaattgttttgactgttatagaaaccaaatattttactgtttcttttaaggactaatattgtcaaaaactgctgttattaacttcacttgagttgtttaacttccttctgttttaagattgtaattaaaaattactattttgttatatggaatggttaatttttacctaataaaaacatagatgaaatacattgtatttta

SEQ ID NO: 216106 - DNA, 1076 bp, Artificial Sequence
  derived and/or modified sequence
gtctgggctcggggcgcggcggcagtcagctctatgttcgcggtcttaacctctcctctggccgagtccttgcaagaagtgaattacccgaccctgcaaaacacttactattttggagtttaaagtatgtcatcatggcaaagtttcggagaaggacttgcatcattttggcactttttattctatttattttctctctgatgatgggtttaaaaatgctgagaccaaatacagctacttttggagctccttttggacttgaccttcttccagaacttcatcaacgaactattcatttggggaaaaattttgatttccaaaagagtgacagaatcaacagtgaaacaaataccaagaatttaaaaagtgttgaaatcactatgaaaccttccaaagcctctgaacttaacttggatgaactaccacctctgaacaattatctacatgtattttattacagttggtatggaaatccacaatttgatggtaaatatatacattggaatcatccagtgttagagcattgggaccctagaatagccaagaattatccacaagggagacacaaccctccagatgacattggctccagcttttatcctgaattgggaagttacagttctcgggatccttctgtcatagaaactcacatgagacaaatgcgctcagcttcaattggtaattattgtatatatatatatgtgtgtttgtgtctgtatatatgcatataaatgattttttgtgtaactttactagttaattttctcattattattaattatattgttaagctcatacctccaaattaaactgtatgtatgatcttaaacatccaggcaaccacattttaacactgcccttagtgtatattgtttaatttttacattttggagcatttctggatatattgttgatttctaatttaattcactttctcaattttattaaattatgatttacataaaatacaatgaatttcccactttaagtttatagctcattgatgttactcaaaagtatatacctgtttgaataccaccccaatcaagaagtaaaatatttctatagcccaaaaa

SEQ ID NO: 216107 - DNA, 1069 bp, Artificial Sequence
  derived and/or modified sequence
gtctgggctcggggcgcggcggcagtcagctctatgttcgcggtcttaacctctcctctggccgagtccttgcaagaagtgaattacccgaccctgcaaaacacttactattttggagtttaaagtatgtcatcatggcaaagtttcggagaaggacttgcatcattttggcactttttattctatttattttctctctgatgatgggtttaaaaatgctgagaccaaatacagctacttttggagctccttttggacttgaccttcttccagaacttcatcaacgaactattcatttggggaaaaattttgatttccaaaagagtgacagaatcaacagtgaaacaaataccaagaatttaaaaagtgttgaaatcactatgaaaccttccaaagcctctgaacttaacttggatgaactaccacctctgaacaattatctacatgtattttattacagttggtatggaaatccacaatttgatggtaaatatatacattggaatcatccagtgttagagcattgggaccctagaatagccaagaattatccacaagggagacacaaccctccagatgacattggctccagcttttatcctgaattgggaagttacagttctcgggatccttctgtcatagaaactcacatgagacaaatgcgctcagcttcaattggtaattattgtatatatatatgtgtgtttgtgtctgtatatatgcatataaatgattttttgtgtaactttactagttaattttctcattattattaattatattgttaagctcatacctccaaattaaactgtatgtatgatcttaaacatccaggcaaccacattttaacactgcccttagtgtatattgtttaatttttacattttggagcatttctggatatattgttgatttctaatttaattcactttctcaattttattaaattatgatttacataaaatacaatgaatttcccactttaagtttatagctcattgatgttactcaaaagtatatacctgtttgaataccaccccaatcaagaagtaaaatatttctatagccc

SEQ ID NO: 216108 - DNA, 1389 bp, Artificial Sequence
  derived and/or modified sequence
atggccaagttccggcggcggacctgcatcatcctggccctgttcattctgtttatattttccctgatgatgggattaaaaatgctgcggccgaatacggctacctttggcgcacctttcggactagatcttcttcctgaactgcaccagcgtaccatccacctcggcaagaacttcgacttccagaaaagtgataggataaactctgaaaccaacaccaaaaacctcaagtccgtggagatcaccatgaagccttcaaaagcaagcgagttaaacctcgacgagttaccacccttgaacaattacttgcacgtcttttactattcctggtacggtaaccctcagtttgacggcaaatacatccactggaaccatccagtgctggagcactgggatccccgtatcgccaagaattacccccagggacgacacaacccgcccgatgacatcggaagttccttttatccagaactcggctcttatagttcacgcgatccttcggtgattgagactcacatgaggcagatgcgcagtgcctccatcggtgttctcgctctgtcttggtatcctcccgacgttaatgatgagaatggcgagcctaccgacaacctcgtgcctactatcctggacaaggctcacaagtacaatctaaaagtgacgttccatattgagccctattctaacagagatgatcagaacatgtataagaatgtgaagtacatcattgacaagtacggaaaccaccccgctttttatagatataagacgaagactggaaacgcactgcccatgttctacgtttacgacagttacattactaagccggagaagtgggccaatctcctcacaactagcgggtcaaggtccatcagaaactcaccctatgatggactcttcattgctctgctggtggaagaaaaacacaaatatgacattctccagtcgggatttgacggaatttacacctatttcgccaccaacggttttacgtatggttcctcacaccagaactgggcgagtttaaagctgttttgcgacaagtataatcttatctttatcccctctgtgggcccaggctatatcgatacctcaatccggccttggaacacccagaatacaagaaaccggattaacggtaaatactacgaaattggactctctgcggcgctgcagacccgccctagcctgatcagtataacaagtttcaacgagtggcatgagggtacacagatcgaaaaggcggttccaaaaaggaccagcaataccgtttatctcgattacagacctcataaacccggactgtatctggagctaaccaggaagtggtccgagaaatatagcaaggaacgtgccacatacgcactggatcgacagctgcccgtgtcatag

SEQ ID NO: 216109 - DNA, 597 bp, Artificial Sequence
  derived and/or modified sequence
atggccaagttccggcggcggacctgcatcatcctggccctgttcattctcttcatcttctctctgatgatgggtctgaagatgctacgccccaacacagctacattcggcgccccgttcgggttggacctgctccctgagttgcaccaacggacgatacacctaggaaaaaattttgatttccagaaatctgatcgcatcaactctgaaacaaacacgaagaatcttaagagtgtggaaatcacgatgaagcctagcaaggcgtccgagctgaacctggatgaactgcctccactgaacaattacctccatgtgttctactactcctggtatggtaatccccagttcgatggcaagtacattcactggaaccatcctgtgctcgaacactgggatcctcgcattgccaagaactatccccaaggtcggcacaaccctccagatgatattggatcctccttctatcccgaattaggatcatactcaagtcgcgatccttctgtaattgaaacacacatgagacagatgagatccgcatcaattggaaactattgtatttacatctacgtgtgtctgtgcctgtatatctgcatttag

SEQ ID NO: 216110 - DNA, 624 bp, Artificial Sequence
  derived and/or modified sequence
atggccaagttccggcggcggacctgcatcatcctggccctgttcatcctgtttatcttctccttgatgatgggcctaaaaatgctgagaccaaatacagcaacatttggcgcaccattcggactggatttactcccagagctccatcagcggaccattcaccttggcaaaaattttgattttcagaagagcgatcgtatcaacagcgagacgaacacaaaaaaccttaaaagcgttgagatcactatgaaacccagcaaagcttcagaacttaatctggatgagttaccaccactaaacaactaccttcatgtattctactactcctggtacggcaatccacaattcgacggtaagtatattcattggaatcatccagtgctggaacactgggacccccgcatcgccaagaactacccccaaggccgacataatccccccgacgatatagggtctagcttttatcctgagctggggagttactcttcccgcgacccctctgtcatcgaaacccatatgagacagatgcggtctgcatctattgggaattattgcatctatatctgcgtattcgtctcggtgtatatgcatatcaacgatttcctatgcaattttaccagttag

SEQ ID NO: 216111 - DNA, 1389 bp, Artificial Sequence
  derived and/or modified sequence
atggcgaaattcagacggaggacctgtattatcctcgctttgtttatcttattcatattctcccttatgatggggctcaagatgttgcggcctaataccgctaccttcggcgcaccatttggcctggatctgttgccggaactgcaccagaggaccatacaccttggtaagaactttgatttccagaagtccgaccgaattaattctgagacgaacacgaaaaatctcaaatctgtggaaattaccatgaagccctccaaagcctctgagcttaatctggatgaacttcctcctctcaacaattatctgcatgtgttctattattcctggtatggcaatccccaatttgatggtaagtatatccactggaatcatcccgtacttgagcactgggaccctaggatcgccaagaattaccctcagggcaggcataacccacctgatgacattggatcatccttttatccagagttaggcagctattccagcagggatccctcagtgatcgaaacgcacatgcgccagatgcgcagcgcgtcaataggggttctcgcactcagctggtaccccccagatgtcaatgatgaaaacggcgaacccaccgataaccttgtgcctaccatcttagataaggctcacaagtataacctgaaggtaacattccatatagaaccatactctaacagggatgaccagaacatgtacaaaaatgtcaaatacattattgacaagtacggaaaccatcccgctttctacagatacaagactaagactggcaatgccctgcctatgttttatgtgtacgattcttatatcacgaaacccgaaaagtgggccaacctcttgaccacctccggatcacgatctattagaaacagcccctatgatggcctgttcatcgctctgctggttgaggaaaagcacaaatatgacattctccagagtggtttcgacggtatatatacctactttgctacgaacggctttacatatggcagctcccaccaaaactgggctagtctcaagcttttctgcgacaagtataatctgatcttcataccctcagtgggtcctggatatattgacactagtatcaggccgtggaacacgcaaaacactagaaacagaataaacgggaagtattacgaaatagggctgtccgctgcactccagacccgaccctctctgatttctatcactagctttaatgaatggcacgagggtactcagatcgagaaggccgtcccaaagcggacaagtaacactgtgtacctcgattaccggccacacaaacctggcctctacctggaactgacacggaagtggagcgagaagtactctaaggagagggctacttatgctctggatcgccagctgcccgtgagttag

SEQ ID NO: 216112 - DNA, 597 bp, Artificial Sequence
  derived and/or modified sequence
atggctaaattccggagacggacctgcatcatattggccctttttatcttgttcattttttctctgatgatggggctgaagatgctgcgacctaataccgcaacttttggggcacctttcggcttggacctgctgcctgagttgcaccaaaggacaatccacctaggtaaaaactttgacttccagaagtccgaccgcatcaacagtgagactaataccaaaaatctcaaatccgtggagattaccatgaaacccagcaaagcctccgagttaaacctggacgagctgccacctctgaataattatctgcacgtcttctactactcctggtacgggaaccctcagttcgatggcaagtatattcactggaatcatccggtgttggagcactgggacccccgaattgccaaaaattatccacaaggacgccataacccccctgatgacattggctcttccttctaccctgaacttggaagttatagctcacgggatccatcggtgattgagacccatatgcgccagatgcgctctgcatctatcggcaactattgcatctatatttacgtgtgtctctgtctatacatctgcatctag

SEQ ID NO: 216113 - DNA, 624 bp, Artificial Sequence
  derived and/or modified sequence
atggcgaagtttcgacgaagaacatgtataatcctggcactgtttattctgttcatctttagtctcatgatgggcctcaagatgttgagacctaacactgccacatttggcgcacccttcggtttggacctactccctgagttacatcagcgcactatacacctaggaaagaacttcgactttcagaagtccgacaggattaacagcgagactaataccaaaaacctcaaaagtgtggagatcacgatgaagccatctaaggcttctgaacttaacctggacgagctccctcccctgaataattatcttcatgtcttctactacagctggtatgggaacccgcagttcgatggaaagtatatccactggaaccatccggtgctggaacactgggatccacgcatcgcaaagaactatcctcaggggcgacataacccccctgacgacattggctcaagcttttacccagagttgggaagttactccagtagggacccctcagtgatcgagactcacatgaggcagatgcgaagcgcttctatcgggaattactgtatatacatttgtgtgtttgtgtcggtttatatgcatatcaacgacttcttgtgtaatttcacatcctag

SEQ ID NO: 216114 - DNA, 1389 bp, Artificial Sequence
  derived and/or modified sequence
atggccaagttcagaagaagaacctgcatcatcctggccctgttcatcctgttcatcttcagcctgatgatgggcctgaagatgctgagacccaacaccgccaccttcggcgcccccttcggcctggacctgctgcccgagctgcaccagagaaccatccacctgggcaagaacttcgacttccagaagagcgacagaatcaacagcgagaccaacaccaagaacctgaagagcgtggagatcaccatgaagcccagcaaggccagcgagctgaacctggacgagctgccccccctgaacaactacctgcacgtgttctactacagctggtacggcaacccccagttcgacggcaagtacatccactggaaccaccccgtgctggagcactgggaccccagaatcgccaagaactacccccagggcagacacaacccccccgacgacatcggcagcagcttctaccccgagctgggcagctacagcagcagagaccccagcgtgatcgagacccacatgagacagatgagaagcgccagcatcggcgtgctggccctgagctggtacccccccgacgtgaacgacgagaacggcgagcccaccgacaacctggtgcccaccatcctggacaaggcccacaagtacaacctgaaggtgaccttccacatcgagccctacagcaacagagacgaccagaacatgtacaagaacgtgaagtacatcatcgacaagtacggcaaccaccccgccttctacagatacaagaccaagaccggcaacgccctgcccatgttctacgtgtacgacagctacatcaccaagcccgagaagtgggccaacctgctgaccaccagcggcagcagaagcatcagaaacagcccctacgacggcctgttcatcgccctgctggtggaggagaagcacaagtacgacatcctgcagagcggcttcgacggcatctacacctacttcgccaccaacggcttcacctacggcagcagccaccagaactgggccagcctgaagctgttctgcgacaagtacaacctgatcttcatccccagcgtgggccccggctacatcgacaccagcatcagaccctggaacacccagaacaccagaaacagaatcaacggcaagtactacgagatcggcctgagcgccgccctgcagaccagacccagcctgatcagcatcaccagcttcaacgagtggcacgagggcacccagatcgagaaggccgtgcccaagagaaccagcaacaccgtgtacctggactacagaccccacaagcccggcctgtacctggagctgaccagaaagtggagcgagaagtacagcaaggagagagccacctacgccctggacagacagctgcccgtgagctag

SEQ ID NO: 216115 - DNA, 597 bp, Artificial Sequence
  derived and/or modified sequence
atggccaagttcagaagaagaacctgcatcatcctggccctgttcatcctgttcatcttcagcctgatgatgggcctgaagatgctgagacccaacaccgccaccttcggcgcccccttcggcctggacctgctgcccgagctgcaccagagaaccatccacctgggcaagaacttcgacttccagaagagcgacagaatcaacagcgagaccaacaccaagaacctgaagagcgtggagatcaccatgaagcccagcaaggccagcgagctgaacctggacgagctgccccccctgaacaactacctgcacgtgttctactacagctggtacggcaacccccagttcgacggcaagtacatccactggaaccaccccgtgctggagcactgggaccccagaatcgccaagaactacccccagggcagacacaacccccccgacgacatcggcagcagcttctaccccgagctgggcagctacagcagcagagaccccagcgtgatcgagacccacatgagacagatgagaagcgccagcatcggcaactactgcatctacatctacgtgtgcctgtgcctgtacatctgcatctag

SEQ ID NO: 216116 - DNA, 624 bp, Artificial Sequence
  derived and/or modified sequence
atggccaagttcagaagaagaacctgcatcatcctggccctgttcatcctgttcatcttcagcctgatgatgggcctgaagatgctgagacccaacaccgccaccttcggcgcccccttcggcctggacctgctgcccgagctgcaccagagaaccatccacctgggcaagaacttcgacttccagaagagcgacagaatcaacagcgagaccaacaccaagaacctgaagagcgtggagatcaccatgaagcccagcaaggccagcgagctgaacctggacgagctgccccccctgaacaactacctgcacgtgttctactacagctggtacggcaacccccagttcgacggcaagtacatccactggaaccaccccgtgctggagcactgggaccccagaatcgccaagaactacccccagggcagacacaacccccccgacgacatcggcagcagcttctaccccgagctgggcagctacagcagcagagaccccagcgtgatcgagacccacatgagacagatgagaagcgccagcatcggcaactactgcatctacatctgcgtgttcgtgagcgtgtacatgcacatcaacgacttcctgtgcaacttcaccagctag

SEQ ID NO: 216117 - protein, 581 aa, Artificial Sequence [sequence omitted]

SEQ ID NO: 216118 - DNA, 1746 bp, Artificial Sequence
  derived and/or modified sequence
atgtggggcagaaccgccagaagaagatgccccagagagctgagaagaggcagagaggccctgctggtgctgctggccctgctggccctggccggcctgggcagcgtgctgagagcccagagaggcgccggcgccggcgccgccgagcccggcccccccagaacccccagacccggcagaagagagcccgtgatgcccagaccccccgtgcccgccaacgccctgggcgccagaggcgaggccgtgagactgcagctgcagggcgaggagctgagactgcaggaggagagcgtgagactgcaccagatcaacatctacctgagcgacagaatcagcctgcacagaagactgcccgagagatggaaccccctgtgcaaggagaagaagtacgactacgacaacctgcccagaaccagcgtgatcatcgccttctacaacgaggcctggagcaccctgctgagaaccgtgtacagcgtgctggagaccagccccgacatcctgctggaggaggtgatcctggtggacgactacagcgacagagagcacctgaaggagagactggccaacgagctgagcggcctgcccaaggtgagactgatcagagccaacaagagagagggcctggtgagagccagactgctgggcgccagcgccgccagaggcgacgtgctgaccttcctggactgccactgcgagtgccacgagggctggctggagcccctgctgcagagaatccacgaggaggagagcgccgtggtgtgccccgtgatcgacgtgatcgactggaacaccttcgagtacctgggcaacagcggcgagccccagatcggcggcttcgactggagactggtgttcacctggcacaccgtgcccgagagagagagaatcagaatgcagagccccgtggacgtgatcagaagccccaccatggccggcggcctgttcgccgtgagcaagaagtacttcgagtacctgggcagctacgacaccggcatggaggtgtggggcggcgagaacctggagttcagcttcagaatctggcagtgcggcggcgtgctggagacccacccctgcagccacgtgggccacgtgttccccaagcaggccccctacagcagaaacaaggccctggccaacagcgtgagagccgccgaggtgtggatggacgagttcaaggagctgtactaccacagaaaccccagagccagactggagcccttcggcgacgtgaccgagagaaagcagctgagagacaagctgcagtgcaaggacttcaagtggttcctggagaccgtgtaccccgagctgcacgtgcccgaggacagacccggcttcttcggcatgctgcagaacaagggcctgaccgactactgcttcgactacaacccccccgacgagaaccagatcgtgggccaccaggtgatcctgtacctgtgccacggcatgggccagaaccagttcttcgagtacaccagccagaaggagatcagatacaacacccaccagcccgagggctgcatcgccgtggaggccggcatggacaccctgatcatgcacctgtgcgaggagaccgcccccgagaaccagaagttcatcctgcaggaggacggcagcctgttccacgagcagagcaagaagtgcgtgcaggccgccagaaaggagagcagcgacagcttcgtgcccctgctgagagactgcaccaacagcgaccaccagaagtggttcttcaaggagagaatgctgtag

SEQ ID NO: 216119 - DNA, 1746 bp, Artificial Sequence
  derived and/or modified sequence
atgtggggacggaccgcacgccgcaggtgccctagggaactccggcgggggagagaagcgctgttagtgctcctggctctgctcgctcttgcaggtcttggaagtgtgctacgcgcacagagaggggccggagctggcgccgcagagcccggtcccccaaggacaccacgccctggcagacgtgagcccgtcatgcccaggccacctgtcccagcaaatgccttaggggccagaggcgaagcagtgcgtttacagttgcagggtgaggaattgcgactccaggaggagagcgtgcgcctgcaccagatcaatatctatttatctgacagaatctctctgcatcggcgcctaccggagcgttggaatccactatgcaaggaaaagaagtacgactatgataacctgcctcggacctcagttattatcgcattctacaacgaggcttggtccaccttactgcgtacggtgtactccgtgctggagacaagccctgacatactcctcgaggaggtcatactcgtcgacgactacagtgaccgcgaacacttgaaggagagacttgccaatgagctctctggactgcctaaggtgcgtttaatccgtgctaacaaacgcgagggtctcgtgcgggctcgcctgctgggtgcaagcgcagcgcgcggcgacgtcctcactttcttagattgtcactgtgaatgtcatgaagggtggctcgagccacttttacagcggatacatgaagaggagtcggcagtggtctgtcctgtcattgacgtgattgattggaatacctttgaatacctgggcaactctggcgagccccagatcgggggattcgattggagactcgtgtttacctggcatacagtccccgagcgggaaaggattcgaatgcagtcacccgtagacgtgattagatcacccactatggcgggcggtctgttcgccgtcagcaagaaatacttcgagtatctaggatcctatgacactgggatggaagtgtggggcggcgagaacctggaattcagctttcgcatttggcagtgtgggggtgtcttggagacccacccttgctcccacgttggccatgtgtttccaaagcaggcaccgtattccaggaataaggcccttgccaatagtgtgcgagccgcggaagtgtggatggatgagttcaaggaattgtactaccaccgaaatcctcgcgcccgcctggagccgtttggagacgtgaccgagagaaagcagctgcgggataagttgcagtgtaaagatttcaaatggtttctggagacggtctacccagaacttcacgtgccagaggataggccaggcttcttcgggatgctgcagaataagggtctcacagactattgctttgattataaccctcctgacgagaatcaaatagtaggccaccaggtaatcctctacctctgccatggcatgggtcagaaccagttttttgaatacacaagccagaaggaaatccggtacaatacacatcagccagaaggctgcatcgcggtcgaagccggaatggacacactcattatgcacctgtgtgaggaaacagccccagaaaatcagaagttcattttgcaggaggacggctccctgtttcacgagcagtccaagaaatgtgtccaggccgccagaaaagaaagctccgattcttttgtaccccttttgcgcgactgcaccaacagcgaccaccagaaatggttctttaaggagcggatgctgtag

SEQ ID NO: 216120 - DNA, 1746 bp, Artificial Sequence
  derived and/or modified sequence
atgtggggccgcacagcccggcggcgctgcccccgggagctgcggcggggccgggaggccctgctggtgctgctggccctgctggccctggccggcctgggctctgtgctgcgggcccagagaggagctggagctggagctgctgagcccggcccccccaggaccccccggcccggccggcgggagcctgtgatgccccggccccctgtgcctgccaatgccctgggcgcccggggggaggccgtgcggctgcagctgcagggcgaggagctgcggctgcaggaggagagcgtgcggctgcaccagatcaacatctacctgagtgaccgcatcagcctgcaccggcggctgcctgagcgctggaaccccctgtgcaaggagaagaagtatgactatgacaacctgcccaggaccagcgtcatcatcgccttctacaatgaggcctggagcaccctgctgaggacagtgtacagcgtgctggagaccagcccagacatcctgctggaggaggtgatcctggtggatgactacagcgaccgggagcacctgaaggagcggctggccaatgagctgagcggcctgcccaaggtgcggctcatccgggccaacaagcgggagggcctggtgcgggcccggctgctgggcgccagcgctgcccggggagatgtgctgaccttcctggactgccactgtgagtgccacgagggctggctggagcccctgctgcagaggatccacgaggaggagagcgctgtggtgtgccctgtgattgatgtgattgactggaacacctttgagtacctgggcaacagcggggagccccagatcggcggctttgactggaggctggtgttcacctggcacacagtgcctgagcgggagcgcatccgcatgcagagccctgtggatgtgatccgcagccccaccatggccggcggcctgtttgctgtgtccaagaagtactttgagtacctgggcagctatgacaccggcatggaggtgtggggcggggagaacctggagttctccttccgcatctggcagtgtggcggcgtgctggagacccacccctgcagccacgtgggccacgtgttccccaagcaggccccctacagcaggaacaaggccctggccaacagcgtgcgggctgctgaggtgtggatggatgagttcaaggagctgtactaccacaggaacccccgggcccggctggagccctttggagatgtgacagagaggaagcagctgcgggacaagctgcagtgcaaggacttcaagtggttcctggagaccgtgtacccagagctgcacgtgcctgaggacaggcctggcttcttcggcatgctgcagaacaagggcctgacagactactgctttgactacaaccccccagatgagaaccagatcgtgggccaccaggtgatcctgtacctgtgccacggcatgggccagaaccagttctttgagtacaccagccagaaggagatccgctacaacacccaccagcctgagggctgcatcgctgtggaggccggcatggacaccctcatcatgcacctgtgtgaggagacagcccctgagaaccagaagttcatcctgcaggaggatggcagcctcttccacgagcagagcaagaagtgtgtgcaggccgccaggaaggagagcagtgacagctttgtgcccctgctgcgggactgcaccaacagcgaccaccagaagtggttcttcaaggagaggatgctgtag

SEQ ID NO: 216121 - DNA, 1746 bp, Artificial Sequence
  derived and/or modified sequence
atgtggggccggaccgcccggcggcggtgcccccgggagctgcggcgaggtagggaggccctgttggtcttgttggcgcttcttgcactggctggcctgggcagcgtgctacgggcccaaagaggtgcaggggctggtgcagcggagcctggtccccccagaaccccacgacccggcagaagggaaccggtcatgcccaggcctcccgttccggctaacgccctcggcgcgcgcggagaggccgtgagactgcagctgcaaggagaggagctcaggctgcaggaagaaagtgtgcgactgcaccaaatcaatatttatctgtccgacagaatcagcctccacagacgccttcccgagagatggaatcccctgtgcaaggagaaaaagtacgattacgacaacctgcctcgaacgtctgtcatcattgccttctataacgaggcttggtctacactcctgagaaccgtgtactctgtgttagagacctcaccagatattctgctggaagaagtaatcctggtggacgactacagcgacagggagcacctgaaggagcggctcgccaacgaactcagtgggctccccaaagtcagactgatacgagcaaataaacgcgagggactagtgagagcacgactgctaggtgcctccgccgcaaggggagacgtcctgacgtttctggattgccattgtgaatgccatgagggttggctcgaacccctgttgcagagaatacatgaagaggagagtgcagtcgtgtgccctgtgatcgacgtgattgattggaatacctttgaatacctgggcaacagcggcgaaccccagatcggcggattcgattggcgactcgtcttcacgtggcatactgtgcccgagcgagaacgcattaggatgcagagccccgttgatgttatcagatcccctaccatggccgggggtctgttcgccgtttctaaaaaatatttcgagtatcttgggtcctacgataccgggatggaagtttggggcggcgagaatcttgaattcagcttcaggatttggcagtgcgggggggtgcttgaaacacatccatgctcccacgtcgggcatgtctttccgaaacaggcgccttatagcagaaacaaggccctagcaaactccgtacgcgccgccgaggtgtggatggacgaattcaaagaactgtactaccataggaatccacgcgcccgcttggagccctttggagatgtaacagaacgaaagcagcttcgggacaagctccagtgtaaggatttcaagtggttcctcgaaaccgtgtatcctgaacttcatgttcctgaggatcgccccggattttttgggatgctgcagaacaaggggctcaccgattactgcttcgattacaaccctcccgatgagaaccagattgttggtcaccaggtcattctctatctgtgccacggcatgggccagaatcaattcttcgagtacacatcccagaaggagatccggtataacacgcaccaaccagaggggtgcattgccgtagaagctggaatggacacactgattatgcatttgtgtgaggaaaccgctcctgaaaaccagaagttcattttgcaggaggacggtagcttgttccacgagcagagcaaaaaatgtgtccaggccgcacgcaaagagagctcggattcttttgtgccgctactacgcgattgtactaatagtgaccatcagaaatggtttttcaaggagcgcatgctctag

SEQ ID NO: 216122 - DNA, 1746 bp, Artificial Sequence
  derived and/or modified sequence
atgtggggaaggaccgccagacggaggtgcccacgcgagcttagacggggacgggaggccctcctggtcctcctggccctgcttgccctcgcaggtctcggttccgtgcttcgagcgcagcgtggcgcaggagccggtgcagccgaacccggtccgcctaggactccacgccctggtagacgagaaccggtcatgcctcgtccacctgtccccgctaacgcactcggggctcggggagaagctgtccggctgcagctgcaaggagaggaactccgtctccaggaggagagcgtcaggctgcatcagataaatatttatctctctgaccgcatatcactgcacaggcgcctgcctgaaagatggaatccgctgtgcaaggaaaagaagtatgactacgataatttgcccagaacttcagttatcatcgctttctataacgaggcctggtccacactgttaaggaccgtgtatagcgtgttagaaacctcgcccgatatcctgctggaggaagttatattggtagatgattactcagatcgggaacatttaaaagaacgtctcgccaatgaactgtctggtctccccaaggtacgactgattcgggctaataaacgggaaggcctggtccgtgcacggctgctgggcgcttctgctgcccgaggagacgttctaacatttcttgactgccactgcgaatgccacgaaggctggctcgaacccttgctgcagaggatccacgaggaggaaagtgctgtcgtgtgtcctgtgattgatgtgatcgactggaacacattcgagtatctgggcaattccggcgagccacagattgggggattcgattggaggttggtcttcacctggcataccgtgcccgagagagagcggatacgaatgcagagtccagtcgatgtgattagaagtcccacaatggcgggaggacttttcgcagtgtcaaagaagtatttcgaatatctcggctcctatgatacgggaatggaagtgtggggaggcgagaacttggagttcagtttcagaatctggcagtgtgggggtgtgctggagacacacccgtgttcccacgtgggccacgttttccctaaacaggcgccatatagtcggaataaggcgctggccaactcagtaagagccgctgaggtatggatggacgagttcaaggagctgtattaccatcgcaacccacgtgctaggctcgagccattcggtgatgttaccgagaggaaacagctgcgtgacaagctgcagtgtaaggatttcaagtggttcctggagaccgtgtacccagaactacacgtcccagaggacaggccgggatttttcggcatgttgcagaataaaggcctgaccgattactgttttgactataatccaccagatgagaaccaaatcgtgggacaccaggtaatcttgtatctatgtcacggtatgggtcagaaccagttcttcgaatataccagtcagaaggagattaggtacaacacccatcagcccgaaggttgcatcgccgtggaagcgggaatggacaccctgattatgcatttatgcgaggagactgctcctgaaaaccagaagttcatactgcaggaggatgggtctctcttccatgaacaaagtaagaaatgtgtacaagccgctaggaaagagagctcagacagtttcgtccccctcttgcgggattgcaccaatagcgatcaccagaagtggttctttaaggagaggatgttgtag

SEQ ID NO: 216123 - DNA, 2735 bp, Artificial Sequence
  derived and/or modified sequence
atgtgggggcgcacggcgcggcggcgctgcccgcgggaactgcggcgcggccgggaggcgctgttggtgctcctggcgctactggcgttggccgggctgggctcggtgctgcgggcgcagcgtggggccggggccggggctgccgagccgggacccccgcgcaccccgcgccccgggcggcgcgagccggtcatgccgcggccgccggtgccggcgaacgcgctgggcgcgcggggcgaggcggtgcggctgcagctgcagggcgaggagctgcggctgcaggaggagagcgtgcggctgcaccagattaacatctacctcagcgaccgcatctcactgcaccgccgcctgcccgagcgctggaacccgctgtgcaaagagaagaaatatgattatgataatttgcccaggacatctgttatcatagcattttataatgaagcctggtcaactctccttcggacagtttacagtgtccttgagacatccccggatatcctgctagaagaagtgatccttgtagatgactacagtgatagagagcacctgaaggagcgcttggccaatgagctttcgggactgcccaaggtgcgcctgatccgcgccaacaagagagagggcctggtgcgagcccggctgctgggggcgtctgcggcgaggggcgatgttctgaccttcctggactgtcactgtgagtgccacgaagggtggctggagccgctgctgcagaggatccatgaagaggagtcggcagtggtgtgcccggtgattgatgtgatcgactggaacaccttcgaatacctggggaactccggggagccccagatcggcggtttcgactggaggctggtgttcacgtggcacacagttcctgagagggagaggatacggatgcaatcccccgtcgatgtcatcaggtctccaacaatggctggtgggctgtttgctgtgagtaagaaatattttgaatatctggggtcttatgatacaggaatggaagtttggggaggagaaaacctcgaattttcctttaggatctggcagtgtggtggggttctggaaacacacccatgttcccatgttggccatgttttccccaagcaagctccctactcccgcaacaaggctctggccaacagtgttcgtgcagctgaagtatggatggatgaatttaaagagctctactaccatcgcaacccccgtgcccgcttggaaccttttggggatgtgacagagaggaagcagctccgggacaagctccagtgtaaagacttcaagtggttcttggagactgtgtatccagaactgcatgtgcctgaggacaggcctggcttcttcgggatgctccagaacaaaggactaacagactactgctttgactataaccctcccgatgaaaaccagattgtgggacaccaggtcattctgtacctctgtcatgggatgggccagaatcagtttttcgagtacacgtcccagaaagaaatacgctataacacccaccagcctgagggctgcattgctgtggaagcaggaatggatacccttatcatgcatctctgcgaagaaactgccccagagaatcagaagttcatcttgcaggaggatggatctttatttcacgaacagtccaagaaatgtgtccaggctgcgaggaaggagtcgagtgacagtttcgttccactcttacgagactgcaccaactcggatcatcagaaatggttcttcaaagagcgcatgttatgaagcctcgtgtatcaaggagcccatcgaaggagactgtggagccaggactctgcccaacaaagacttagctaagcagtgaccagaacccaccaaaaactaggctgcattgctttgaagaggcaatcattttgccatttgtgaaagttgtgttggatttagtaaaaatgtgaataagctttgtacttattttgagaactttttaaatgttccaaaataccctattttcaaagggtaatcgtaagatgttaacccttggtatttagaaaattaaaaccttataatatttttctatcaagatgtatattttacagtcgtgccttttactctcattagcaaaaaagataaagattttattttggtatttacaagaattcccaggtacgaagatatctgcatgggtggaaatcaggttcaagcaacgtactttgcattaactgataatacctcagctgcggggttaaagttttcccagtatagagagactgtcactaggaacattgtattgatttattcaggtcattgagatcttctagatgtattttaaaaagaatgctttttggttatgtgttgctaccacagttaacactccataatgttcatgtcagccaaagaggactaaccaaagctgaaatctcagagaacaatttgctttactaagctgagtcaacttgagagcgaacttctaacaatgccgcactgtagtgtggctggttctaccactatgactttaaaacatgtttatatcatttttaatttttatgatacggtagtgtcagggagaaatgtaatgttctatatgaaattcctttttcaagtttgttcattaataacagttattaatttaaatcagcgttagagtttgtgctgctgcaactgctgtgaaaatttctctgagtaattctgatttgtgaatgatcccagaccaaccctgagattttgtcaacctgattaagtcaatatgaatgattaaaaagatgtgagaacactga

SEQ ID NO: 216124 - DNA, 690 bp, Artificial Sequence
  derived and/or modified sequence
atgaagagcagcgacatcgaccaggacctgttcaccgacagctactgcaaggtgtgcagcgcccagctgatcagcgagagccagagagtggcccactacgagagcagaaagcacgccagcaaggtgagactgtactacatgctgcaccccagagacggcggctgccccgccaagagactgagaagcgagaacggcagcgacgccgacatggtggacaagaacaagtgctgcaccctgtgcaacatgagcttcaccagcgccgtggtggccgacagccactaccagggcaagatccacgccaagagactgaagctgctgctgggcgagaagacccccctgaagaccaccgccacccccctgagccccctgaagccccccagaatggacaccgcccccgtggtggccagcccctaccagagaagagacagcgacagatactgcggcctgtgcgccgcctggttcaacaaccccctgatggcccagcagcactacgacggcaagaagcacaagaagaacgccgccagagtggccctgctggagcagctgggcaccaccctggacatgggcgagctgagaggcctgagaagaaactacagatgcaccatctgcagcgtgagcctgaacagcatcgagcagtaccacgcccacctgaagggcagcaagcaccagaccaacctgaagaacaagtag

SEQ ID NO: 216125 - DNA, 636 bp, Artificial Sequence
  derived and/or modified sequence
atgaagagcagcgacatcgaccaggacctgttcaccgacagctactgcaaggtgtgcagcgcccagctgatcagcgagagccagagagtggcccactacgagagcagaaagcacgccagcaaggtgagactgtactacatgctgcaccccagagacggcggctgccccgccaagagactgagaagcgagaacggcagcgacgccgacatggtggacaagaacaagtgctgcaccctgtgcaacatgagcttcaccagcgccgtggtggccgacagccactaccagggcaagatccacgccaagagactgaagctgctgctgggcgagaagacccccctgaagaccaccgccacccccctgagccccctgaagccccccagaatggacaccgcccccgtggtggccagcccctaccagagaagagacagcgacagatactgcggcctgtgcgccgcctggttcaacaaccccctgatggcccagcagcactacgacggcaagaagcacaagaagaacgccgccagagtggccctgctggagcagctgggcaccaccctggacatgggcgagctgagaggcctgagaagaaactacagatgcaccatctgcagcgtgagcctgaacagcatcgagtag

SEQ ID NO: 216126 - DNA, 690 bp, Artificial Sequence
  derived and/or modified sequence
atgaagagcagcgatatcgaccaggacctatttacagatagctactgcaaagtgtgcagtgctcagttgattagtgagtcacagcgagttgcccattatgaatctcggaagcacgcctcgaaggtgcgactgtactacatgctgcatccacgcgatggaggctgtccagcgaagagactgcgatctgaaaacggatccgacgcagatatggtggacaaaaataagtgctgtaccttgtgtaacatgtcttttacatctgctgtagtggctgacagtcattaccagggtaagatccacgccaagcgcctgaaactacttttgggggagaagacaccgttgaagactaccgccacaccactgagccctttgaaacctcctcgcatggatactgccccagttgtcgcatccccataccagaggagggatagtgacaggtactgtggactgtgcgccgcctggtttaataaccccttgatggcccagcagcattacgatggaaagaaacataaaaagaatgctgcacgcgtcgcactcctggaacagctgggcaccacgttggacatgggcgaactcaggggcctacgaagaaattaccgctgcactatttgctccgtttccctcaatagcatcgagcagtaccacgcgcacttgaaaggaagcaagcaccagaccaacctgaaaaataaatag

SEQ ID NO: 216127 - DNA, 636 bp, Artificial Sequence
  derived and/or modified sequence
atgaagtcctctgacatcgaccaggatttattcaccgattcttattgcaaagtctgttctgctcaactgatcagtgagtcccagcgtgttgcccactatgaatctcgcaaacatgctagcaaggttcgactgtattacatgctgcaccccagggatggagggtgtcccgccaagcggcttcggagcgaaaatggcagcgacgctgatatggtggataaaaataagtgttgcactctctgcaatatgtccttcacctctgctgtcgtcgctgattctcactatcaggggaaaatccacgcaaagagacttaaattattactgggggagaagacgccccttaagactacagccacaccacttagccctctcaagcccccccggatggataccgccccggtagtcgcatcaccctaccagagaagagacagcgataggtattgcggcctctgtgcagcctggtttaacaaccctcttatggcccaacaacattacgatggaaagaagcacaagaaaaacgccgcacgagtggccctgctggagcagcttgggacaacccttgatatgggagagctgcgaggcctccgaagaaactatcggtgcactatctgcagcgtgtccctgaactcgatcgagtag

SEQ ID NO: 216128 - DNA, 690 bp, Artificial Sequence
  derived and/or modified sequence
atgaagagcagtgacatcgaccaggacctcttcacagacagctactgcaaggtgtgcagcgcccagctgatcagcgagagccagagggtggcccactatgagagcaggaagcacgccagcaaggtgcggctgtactacatgctgcaccccagagatggcggctgcccagccaagaggctgcggagtgaaaatggaagtgatgctgacatggtggacaagaacaagtgctgcaccctgtgcaacatgtccttcaccagcgctgtggtggccgacagccactaccagggcaagatccacgccaagaggctgaagctgctgctgggggagaagacccccctgaagaccacagccacccccctgagccccctgaagccacccaggatggacacagcccctgtggtggccagcccctaccagaggcgggacagcgaccgctactgcggcctgtgtgccgcctggttcaacaaccccctgatggcccagcagcactatgatggcaagaagcacaagaagaatgctgcccgggtggccctgctggagcagctgggcaccaccctggacatgggagagctgcggggcctgcggaggaactaccgctgcaccatctgcagcgtgtccctgaacagcattgagcagtaccacgcccacctgaagggcagcaagcaccagaccaacctgaagaacaagtag

SEQ ID NO: 216129 - DNA, 636 bp, Artificial Sequence
  derived and/or modified sequence
atgaagagcagtgacatcgaccaggacctcttcacagacagctactgcaaggtgtgcagcgcccagctgatcagcgagagccagagggtggcccactatgagagcaggaagcacgccagcaaggtgcggctgtactacatgctgcaccccagagatggcggctgcccagccaagaggctgcggagtgaaaatggaagtgatgctgacatggtggacaagaacaagtgctgcaccctgtgcaacatgtccttcaccagcgctgtggtggccgacagccactaccagggcaagatccacgccaagaggctgaagctgctgctgggggagaagacccccctgaagaccacagccacccccctgagccccctgaagccacccaggatggacacagcccctgtggtggccagcccctaccagaggcgggacagcgaccgctactgcggcctgtgtgccgcctggttcaacaaccccctgatggcccagcagcactatgatggcaagaagcacaagaagaatgctgcccgggtggccctgctggagcagctgggcaccaccctggacatgggagagctgcggggcctgcggaggaactaccgctgcaccatctgcagcgtgtccctgaacagcattgaatag

SEQ ID NO: 216130 - DNA, 690 bp, Artificial Sequence
  derived and/or modified sequence
atgaagagcagcgacatcgaccaggacctgttcaccgacagctactgtaaagtctgttccgcccaactgatttctgagtcccaaagagtcgcgcattatgagtcgcgcaagcacgcctccaaagtaaggctatattacatgttgcaccccagggatggcggctgtccagctaagagattgaggagcgaaaacgggtccgacgcagacatggtggataagaataaatgttgcaccctctgcaacatgtcttttacaagcgcagtcgttgctgattctcattatcagggcaagattcacgccaagcgattgaagttgcttttgggcgaaaagactcctctgaaaactactgctactccactgtcccctctgaaaccaccccggatggataccgctcctgttgtggcgagcccataccagaggagggatagcgatagatattgcggtctctgcgctgcctggttcaacaatcccctcatggcccagcagcattatgacggtaagaagcataagaagaatgctgcaagggttgctctgctggaacagcttggcaccactctagatatgggtgagctccggggcctgcgtcgcaactaccggtgtaccatatgcagcgtcagccttaattccatagaacaataccacgctcacctgaagggctccaagcaccagaccaatctcaagaataaatag

SEQ ID NO: 216131 - DNA, 636 bp, Artificial Sequence
  derived and/or modified sequence
atgaagagcagcgacatcgaccaggacctgttcaccgacagctactgtaaagtctgctctgcccagcttatctccgagagtcagcgcgtggctcattatgagagtaggaagcacgctagcaaagtgcgactgtactacatgctccatcctagggatggtggctgcccggccaaaagactccgctctgagaatggttcagacgccgatatggtcgataaaaacaaatgttgtaccctgtgcaacatgtcatttacctcagccgttgtagcagacagccattatcagggaaaaatccacgccaagagactcaagctcctcctaggtgaaaagacccccctgaaaaccactgctacgcctttatcccctctaaaaccgccccgcatggatacggctcctgtagtcgcttcaccctaccagaggagggactccgaccggtattgcggtctctgtgcagcctggttcaataacccactcatggcacagcagcactacgacgggaagaagcacaaaaagaacgcagctagagtggctctactcgagcaactgggcacgacactagatatgggagaactgcgtggactgcgcaggaactacagatgtacaatctgtagcgtaagtctcaactcgattgagtag

SEQ ID NO: 216132 - DNA, 690 bp, Artificial Sequence
  derived and/or modified sequence
atgaagagctccgacattgatcaggacctgttcacggattcctactgcaaagtgtgctctgcacagctcatcagcgaatcacagagagtcgcccactatgagagcagaaagcacgcctccaaggtgcgactgtattatatgttgcatcctcgcgacggtggctgccctgcaaaaaggctgcggagcgaaaatggtagtgatgctgatatggtagataagaataagtgttgcactctgtgtaatatgagctttactagtgcagttgttgcggatagccactaccaaggaaagattcacgccaagcggctgaaacttcttctaggtgagaaaacaccattgaagacaacagcaactcctttgtccccgctcaagcccccaaggatggacaccgctcccgtcgtagcaagcccatatcagcggagggatagcgaccgctattgcggactgtgtgctgcatggttcaacaacccgctgatggcgcagcagcactacgacggtaaaaagcataagaagaacgctgctcgtgtagctctgctggagcagttgggcaccactctggacatgggtgaacttcgcggtcttcgcagaaactacagatgcaccatatgttccgtgtccctgaatagcattgagcaataccacgcccacttgaaggggagcaagcatcaaaccaatctcaaaaataagtag

SEQ ID NO: 216133 - DNA, 636 bp, Artificial Sequence
  derived and/or modified sequence
atgaaatcatctgacatcgatcaggacctgttcacggattcatattgcaaagtctgcagcgcccagctcatctctgagtcacaaagagtggctcactatgagagcagaaagcacgcatcaaaggtcaggctgtactacatgttgcatcccagggacggagggtgtccagccaagcgtctgagatctgagaatggcagcgatgctgatatggtcgacaagaacaagtgctgtacactatgcaatatgagctttacttcggctgtcgttgcggattctcactaccagggcaagatccacgcaaaaagacttaaactgctgctcggcgaaaaaacacctctgaaaaccacagccactccacttagccccctgaagcctcccagaatggacaccgcacccgtcgttgcctcaccttaccagaggcgcgattccgatagatattgcggactatgtgccgcatggttcaacaaccccctcatggcccagcagcattacgatggcaagaaacacaagaagaatgccgcacgcgtggcattgcttgaacagctggggaccactctcgatatgggagagcttcggggtctgcggcgtaactaccggtgtacaatttgcagcgtgtccctcaacagcattgagtag

SEQ ID NO: 216134 - protein, 630 aa, Artificial Sequence
  derived and/or modified sequence
MDPSWRRSSHSWPQPMPDSGRAPVRPHLAKLEEDVWPCPQFHQTKAASGPPFVNEANSKWLDAHYDPMANIHTFSACLALADLHGDGEYKLVVGDLGPGGQQPRLKVLKGPLVMTESPLPALPAAAATFLMEQHEPRTPALALASGPCVYVYKNLRPYFKFSLPQLPPNPLEQDLWNQAKEDRIDPLTLKEMLESIRETAEEPLSIQSLRFLQLELSEMEAFVNQHKSNSIKRQTVITTMTTLKKNLADEDAVSCLVLGTENKELLVLDPEAFTILAKMSLPSVPVFLEVSGQFDVEFRLAAACRNGNIYILRRDSKHPKYCIELSAQPVGLIRVHKVLVVGSTQDSLHGFTHKGKKLWTVQMPAAILTMNLLEQHSRGLQAVMAGLANGEVRIYRDKALLNVIHTPDAVTSLCFGRYGREDNTLIMTTRGGGLIIKILKRTAVFVEGGSEVGPPPAQAMKLNVPRKTRLYVDQTLREREAGTAMHRAFQTDLYLLRLRAARAYLQALESSLSPLSTTAREPLKLHAVVQGLGPTFKLTLHLQNTSTTRPVLGLLVCFLYNEALYSLPRAFFKVPLLVPGLNYPLETFVESLSNKGISDIIKVLVLREGQSAPLLSAHVNMPGSEGLAAA

SEQ ID NO: 216135 - protein, 593 aa, Artificial Sequence
  derived and/or modified sequence
MAAASSSDSDACGAESNEANSKWLDAHYDPMANIHTFSACLALADLHGDGEYKLVVGDLGPGGQQPRLKVLKGPLVMTESPLPALPAAAATFLMEQHEPRTPALALASGPCVYVYKNLRPYFKFSLPQLPPNPLEQDLWNQAKEDRIDPLTLKEMLESIRETAEEPLSIQSLRFLQLELSEMEAFVNQHKSNSIKRQTVITTMTTLKKNLADEDAVSCLVLGTENKELLVLDPEAFTILAKMSLPSVPVFLEVSGQFDVEFRLAAACRNGNIYILRRDSKHPKYCIELSAQPVGLIRVHKVLVVGSTQDSLHGFTHKGKKLWTVQMPAAILTMNLLEQHSRGLQAVMAGLANGEVRIYRDKALLNVIHTPDAVTSLCFGRYGREDNTLIMTTRGGGLIIKILKRTAVFVEGGSEVGPPPAQAMKLNVPRKTRLYVDQTLREREAGTAMHRAFQTDLYLLRLRAARAYLQALESSLSPLSTTAREPLKLHAVVQGLGPTFKLTLHLQNTSTTRPVLGLLVCFLYNEALYSLPRAFFKVPLLVPGLNYPLETFVESLSNKGISDIIKVLVLREGQSAPLLSAHVNMPGSEGLAAA

SEQ ID NO: 216136 - protein, 165 aa, Artificial Sequence
  derived and/or modified sequence
MSPGPQLWHLLQALVSMCIRISDPTSSSACPNCLQILWNKTFGTRPKRETAEEPLSIQSLRFLQLELSEMEAFVNQHKSNSIKRQTVITTMTTLKKNLADEDAVSCLVLGTENKELLVLDPEAFTILAKMSLPSVPVFLEVSGQFDVEFRLAAACRNGNIYILRR

SEQ ID NO: 216137 - DNA, 1893 bp, Artificial Sequence
  derived and/or modified sequence
atggaccccagctggagaagaagcagccacagctggccccagcccatgcccgacagcggcagagcccccgtgagaccccacctggccaagctggaggaggacgtgtggccctgcccccagttccaccagaccaaggccgccagcggcccccccttcgtgaacgaggccaacagcaagtggctggacgcccactacgaccccatggccaacatccacaccttcagcgcctgcctggccctggccgacctgcacggcgacggcgagtacaagctggtggtgggcgacctgggccccggcggccagcagcccagactgaaggtgctgaagggccccctggtgatgaccgagagccccctgcccgccctgcccgccgccgccgccaccttcctgatggagcagcacgagcccagaacccccgccctggccctggccagcggcccctgcgtgtacgtgtacaagaacctgagaccctacttcaagttcagcctgccccagctgccccccaaccccctggagcaggacctgtggaaccaggccaaggaggacagaatcgaccccctgaccctgaaggagatgctggagagcatcagagagaccgccgaggagcccctgagcatccagagcctgagattcctgcagctggagctgagcgagatggaggccttcgtgaaccagcacaagagcaacagcatcaagagacagaccgtgatcaccaccatgaccaccctgaagaagaacctggccgacgaggacgccgtgagctgcctggtgctgggcaccgagaacaaggagctgctggtgctggaccccgaggccttcaccatcctggccaagatgagcctgcccagcgtgcccgtgttcctggaggtgagcggccagttcgacgtggagttcagactggccgccgcctgcagaaacggcaacatctacatcctgagaagagacagcaagcaccccaagtactgcatcgagctgagcgcccagcccgtgggcctgatcagagtgcacaaggtgctggtggtgggcagcacccaggacagcctgcacggcttcacccacaagggcaagaagctgtggaccgtgcagatgcccgccgccatcctgaccatgaacctgctggagcagcacagcagaggcctgcaggccgtgatggccggcctggccaacggcgaggtgagaatctacagagacaaggccctgctgaacgtgatccacacccccgacgccgtgaccagcctgtgcttcggcagatacggcagagaggacaacaccctgatcatgaccaccagaggcggcggcctgatcatcaagatcctgaagagaaccgccgtgttcgtggagggcggcagcgaggtgggccccccccccgcccaggccatgaagctgaacgtgcccagaaagaccagactgtacgtggaccagaccctgagagagagagaggccggcaccgccatgcacagagccttccagaccgacctgtacctgctgagactgagagccgccagagcctacctgcaggccctggagagcagcctgagccccctgagcaccaccgccagagagcccctgaagctgcacgccgtggtgcagggcctgggccccaccttcaagctgaccctgcacctgcagaacaccagcaccaccagacccgtgctgggcctgctggtgtgcttcctgtacaacgaggccctgtacagcctgcccagagccttcttcaaggtgcccctgctggtgcccggcctgaactaccccctggagaccttcgtggagagcctgagcaacaagggcatcagcgacatcatcaaggtgctggtgctgagagagggccagagcgcccccctgctgagcgcccacgtgaacatgcccggcagcgagggcctggccgccgcctag

SEQ ID NO: 216138 - DNA, 1893 bp, Artificial Sequence
  derived and/or modified sequence
atggatcccagctggcggcggtcctctcattcgtggccacagcctatgccagattcaggacgggcgcctgtacgcccccacctggctaagctagaagaggatgtgtggccttgccctcaattccaccaaaccaaggcggccagtgggccaccgttcgtgaacgaggccaactccaaatggttggacgcgcactacgaccccatggctaatatccacacattctccgcttgcttggcactcgcggatcttcacggagatggagagtacaagttggtggtgggtgatctagggcctggcggccagcagccccgactgaaagtcctgaaaggacctctggtcatgaccgaatcccctctgcccgcactgccagccgctgctgccactttcttgatggaacaacacgagccacgaacacctgcactcgcccttgcatctgggccctgcgtctatgtctacaagaaccttagaccctattttaagttcagcttacctcagctgcctcccaatcccttggaacaggatctctggaatcaagccaaggaggaccgcattgatcctctcacacttaaggagatgttagagtctatcagagagactgctgaagaaccattgagcatccagtcactgagatttttgcaactcgagctgagcgagatggaggcatttgtcaaccagcacaaatctaactccattaagaggcaaacagtgattacaaccatgactacactgaaaaagaatctcgctgatgaggacgcagtgtcgtgcttggttctcggcacagagaacaaagaacttctggttctggatccagaggccttcaccattttggccaagatgagtcttccttccgtccctgtgtttcttgaggtgagcggacagtttgacgtggaattccggctggctgccgcttgccggaatggcaacatatatattctgcgacgtgatagtaaacacccaaagtattgcatcgaactcagtgcccagcccgtcgggctcatcagagttcacaaagtcctggtggtggggtcaactcaagatagccttcacgggttcacccacaaaggcaagaaattgtggacagtccagatgcctgcagcgattctgacgatgaacttgctggagcaacactcacgtggccttcaggccgttatggctggcctggccaacggagaggttagaatctatcgcgacaaggccctcctgaatgtcatccatacccctgacgccgtcacatccctttgtttcggtcgctacggccgagaggataatacactgatcatgacaaccagaggggggggtcttatcatcaagatcctgaaacgaacagcggtgtttgtcgagggcggctccgaggttgggcctcccccagctcaggctatgaagctgaacgtcccaagaaagacccgtttatatgtggaccagacattgcgggaaagagaggccggaactgccatgcatagggcattccagactgatctataccttctaaggttgcgagcggccagggcttatcttcaagctctcgaaagtagcttatcccctctcagcaccactgcccgggaaccgctcaagttacatgctgtggtacagggcttgggcccaacatttaaactgaccttgcacctgcagaatactagtaccactagaccagtcctgggcctgttagtgtgcttcttatataacgaggccttatactctctgccgcgggccttcttcaaagtgccgctcctggtgcctggcctcaattatccccttgaaacattcgtggaaagtctgagcaacaagggtatcagcgatattatcaaagtgctggtgctaagagaaggacagtctgctccactgctctccgcacacgtgaacatgcccggctcagaaggccttgctgccgcttag

SEQ ID NO: 216139 - DNA, 1893 bp, Artificial Sequence
  derived and/or modified sequence
atggaccccagctggaggaggagcagccacagctggccccagcccatgccagattctggccgggcccctgtgcggccccacctggccaagctggaggaggatgtgtggccctgcccccagttccaccagaccaaggccgccagcggccccccatttgtgaatgaggccaacagcaagtggctggatgcccactatgaccccatggccaacatccacaccttcagcgcctgcctggccctggccgacctgcatggagatggagagtacaagctggtggtgggggacctgggccctgggggccagcagccccggctgaaggtgctgaagggccccctggtgatgacagagagccccctgcctgccctgcctgctgctgctgccaccttcctgatggagcagcacgagcccaggaccccagccctggccctggccagcggcccctgtgtgtatgtgtacaagaacctgcggccctacttcaagttcagcctgccccagctgccccccaaccccctggagcaggacctgtggaaccaggccaaggaggacagaattgaccccctgaccctgaaggagatgctggagagcatccgggagacagctgaggagcccctgagcatccagagcctgcgcttcctgcagctggagctgtctgagatggaggcctttgtgaaccagcacaagagcaacagcatcaagaggcagaccgtcatcaccaccatgaccaccctgaagaagaacctggctgatgaagatgctgtgtcctgcctggtgctgggcacagagaacaaggagctgctggtgctggaccctgaggccttcaccatcctggccaagatgagcctgcccagcgtgcctgtgttcctggaggtgtctggccagtttgatgtggagttccggctggccgccgcctgcagaaatggaaacatctacatcctgcggcgggacagcaagcaccccaagtactgcatcgagctgagcgcccagcctgtgggcctcatccgggtgcacaaggtgctggtggtgggcagcacccaggacagcctgcacggcttcacccacaagggcaagaagctgtggacagtgcagatgcctgctgccatcctgaccatgaacctgctggagcagcacagccggggcctgcaggccgtgatggccggcctggccaatggagaggtgcgcatctacagagacaaggccctgctgaatgtcatccacaccccagatgctgtgaccagcctgtgcttcggccgctatggaagagaggacaacaccctcatcatgaccacccggggcggcggcctcatcatcaagatcctgaagaggacagctgtgtttgtggagggcggcagcgaggtgggccccccaccagcccaggccatgaagctgaatgtgcccaggaagacccggctgtatgtggaccagaccctgcgggagcgggaggccggcacagccatgcaccgggccttccagacagacctgtacctgctgcggctgcgggccgcccgggcctacctgcaggccctggagagcagcctgagccccctgagcaccacagcccgggagcccctgaagctgcatgctgtggtgcagggcctgggccccaccttcaagctgaccctgcacctgcagaacaccagcaccaccaggcctgtgctgggcctgctggtgtgcttcctgtacaatgaggccctgtacagcctgccccgggccttcttcaaggtgcccctgctggtgcccggcctgaactaccccctggagacctttgtggagagcctgagcaacaagggcatcagtgacatcatcaaggtgctggtgctgcgggagggccagagcgcccccctgctgagcgcccacgtgaacatgcctggcagcgagggcctggccgccgcctag

SEQ ID NO: 216140 - DNA, 1893 bp, Artificial Sequence
  derived and/or modified sequence
atggaccccagctggcggcggagcagccacagctggccccagcccatgccagattctggacgggcccctgtgaggccacatctggccaaattagaagaggatgtgtggccctgcccgcagttccatcagaccaaggcagcaagtggcccaccatttgtgaatgaagccaactccaaatggctggatgcacactacgatccgatggcaaatattcacacctttagcgcctgtttagccctcgcagatctacacggcgacggtgaatataagctcgtggtgggcgacctgggccctggtggccagcaacccaggctcaaggtattaaaaggcccattggtcatgacagaaagcccactgcccgcactgcccgccgctgccgcgacctttctgatggagcagcatgagccgaggacccctgccttggctctggccagcggtccttgtgtctacgtttataagaatctgagaccctatttcaaattctccctcccacagctgcccccaaacccccttgagcaggatctgtggaaccaggccaaagaggacagaatcgaccctcttaccctgaaagagatgcttgaaagcattagggaaactgcagaggagccgctctccattcagtccctgaggtttctgcagctggagcttagcgaaatggaagcctttgtcaaccagcacaagtccaactccatcaaacgccaaacagtgatcactaccatgaccacactcaaaaaaaacctggccgatgaagatgccgtgtcgtgtctggtcctgggaacagagaataaggagctgctggtcctcgatcctgaggcgttcacaatcctggcgaagatgtcgctcccaagcgttcccgtattcctcgaagtttccggccagtttgatgtagagtttaggctagccgctgcttgcagaaatggaaatatttacatcctgagaagagacagtaaacatcctaaatactgtatcgaactgagtgcccagcctgtcgggctgatcagagtccacaaagtgctggtggttggatcgacccaggatagtctccatggatttacacacaaaggcaaaaaactgtggacagtccagatgcccgccgcgattttgaccatgaacttactcgagcaacatagtaggggactgcaagccgtcatggctggcctagccaatggagaagttagaatttaccgagacaaggctctgttgaacgtgattcacacacctgacgctgtcacaagcctgtgctttggcagatacggtagggaagacaacacacttatcatgaccacgagaggaggaggcttgataataaagatcttaaagagaaccgccgtgttcgtggagggaggctctgaggttggacctcccccagcacaggccatgaagttaaacgtgcctaggaagaccagattatatgtggaccagacactgcgagagagggaggccgggactgcaatgcacagggctttccagacagacctgtacctactgcggttacgcgcggccagggcctacttacaagctctcgagtctagtctgagtcctctaagtacaaccgcgagggagcccctcaagcttcacgctgtagtacaaggcctgggcccaacattcaagctgactttgcatttgcagaacacatctactactcggccagtgctgggtctactggtgtgcttcctctacaacgaagccttgtacagcctcccccgcgcatttttcaaggtgcccctgctggtgccaggtctaaattacccgctagagacatttgtagaaagcctcagcaacaaggggattagtgacattattaaagttttagtgttacgcgaggggcaaagcgcgcccctccttagcgctcatgtgaatatgcccggatcagaaggccttgcggcagcttag

SEQ ID NO: 216141 - DNA, 1893 bp, Artificial Sequence
  derived and/or modified sequence
atggatccttcctggcggcgatccagtcactcatggccacaaccaatgccagattccggaagggcccctgttaggcctcatctggctaaactggaggaggacgtgtggccgtgcccccagttccaccagaccaaagctgcatcgggccctccgtttgtcaatgaggcaaattccaaatggctggacgctcattacgatccaatggcaaatatccacacttttagtgcttgcttggcacttgcggacttgcacggagacggggagtacaaactcgtggtcggagatctcgggccaggaggacagcagcctagactcaaggtactgaaggggccactggtgatgacagaatcacccttacctgcactgcctgcagcggctgcaacattcctgatggaacaacacgaaccccgaaccccagcgctagcactcgctagtggaccgtgcgtgtatgtctataagaatcttagaccctacttcaagttctcccttccccagcttccaccaaaccccctggagcaagatttatggaatcaagctaaagaagatcgtatcgatccgctgactctcaaagagatgcttgagtcgatccgagagacggctgaggaacccttgagcatccagagcctccggtttttacaactagagctctccgagatggaggcttttgtgaaccagcacaaaagcaatagtattaaacggcagactgtgatcactacaatgacaacactcaagaaaaatctcgccgacgaagatgccgtttcgtgcttggtgctcgggactgagaacaaagaactgttagtattagaccccgaggcatttactatcctggctaagatgtcattgccctctgttccagtcttcttagaggtctcgggccagttcgatgtggaattcagactcgccgctgcctgtcggaatggcaatatttatattctccggagagattctaagcatcctaaatactgtatcgagttaagtgcccagcccgttggcctgattagggtccacaaggtgctcgttgtcggatccacacaggatagcctccacggattcacccacaagggcaaaaagctgtggacggttcagatgcctgccgctattttgacaatgaatttgcttgagcagcacagcaggggactgcaggccgtgatggccggacttgctaatggcgaagtccggatttatcgagacaaggctttgctgaatgtgatccacacccctgatgctgtaacaagcctctgctttggtcgatatggaagagaggataacacactcattatgacaaccaggggcggagggctgattattaagatcctcaagagaactgcggtgtttgtagaaggcggttccgaggtcggcccaccccctgctcaggcaatgaaactgaatgtgcccaggaagaccaggctttatgtggatcagactcttcgcgagagagaagctggcaccgccatgcatagagccttccagactgatctctacctcttacggcttcgggcagctcgcgcttacttgcaggcccttgagagctccctgagccctctgagtaccaccgcgagagagcctttgaaactacacgcagtggtacaaggcctcggaccgactttcaagctcaccctgcatctgcagaatacctctaccacacgaccggtactcggacttctcgtctgctttctgtacaatgaggccctctactctctgcccagggctttttttaaagtgcccctattggtgcctggacttaactacccgcttgagacttttgtagaaagcttatctaacaaagggattagtgatataattaaggttcttgtactgcgggagggtcaatctgccccactgctgtccgcccatgtgaacatgccgggtagcgagggcttggctgctgcttag

SEQ ID NO: 216142 - DNA, 3547 bp, Artificial Sequence
  derived and/or modified sequence
gctcagacgtgcagcttctggaatacgaggcgtcagctgctggcctcatccgatccttctctgagcgtttcccagaggatggacccgagttggaggagatcctcacacagctggccacagccgatgcccgattctggaagggccccagtgaggccccatctggccaagcttgaggaagatgtgtggccttgcccccaattccatcagaccaaggctgcaagtggccctccattcgtcaatgaggccaattcgaagtggttggatgcgcactacgacccaatggccaatatccacaccttttctgcctgcctagcgctggcagatttacatggggatggggaatacaagctggtggtaggggaccttggccctggtgggcagcagccccgcctgaaggtgctcaaaggaccactggtgatgaccgaaagcccgctacctgctctgccagctgctgctgccaccttcctcatggagcaacatgagccccggaccccagctctggcacttgcttcaggcccttgtgtctatgtgtataagaatctcagaccctacttcaagttcagcctgccccaattgcctccaaatcctctggaacaagacctttggaaccaggccaaagaggaccgaatcgaccccttaaccctgaaggagatgctggagagcatccgggagacggcagaggagcctttgtccatccagtcactcaggtttctgcagctggagctaagtgaaatggaggcatttgtaaaccaacacaagtccaactccatcaagcggcagacagtcatcaccaccatgaccaccttgaagaagaacctggctgacgaggatgctgtgtcttgcctggtgctgggcaccgagaacaaggagctcctggtgcttgaccccgaggccttcaccattttagccaagatgagccttcccagcgtccccgtcttcctagaggtttctggccagtttgatgttgagttccggcttgccgcggcctgccgcaatggaaacatctatattctgagaagagactccaagcaccccaagtactgcatcgagctgagcgcccagcctgtgggacttatccgggtacacaaggtcctagtggtgggcagcacccaagacagcctgcatggcttcacccacaaggggaagaagctgtggacagtgcagatgcccgcagccatcctgaccatgaacctcctggagcagcattcccggggcctgcaggccgtcatggctgggctggccaatggagaggtccgcatttatcgtgacaaggccctgctcaatgtcatccacaccccggatgcagtgaccagcctttgctttggccggtacgggcgggaggacaacaccctcatcatgaccactcgaggtggtggcctgatcatcaagatcctgaagcgtacagcagtgtttgtagagggaggaagtgaggtgggtcccccaccagcccaggccatgaaactcaatgtgccccgaaagacccggctttacgtggatcagacactgcgagagcgggaggctggcaccgccatgcaccgggccttccagacagacctatacctgctgcgcctacgtgctgcccgcgcctacctgcaggccctcgagtccagcctgagccccctgtccacgacagcccgagagccactcaagctgcacgccgtggttcagggccttggccccacctttaagctcacacttcacctgcagaacacctcaacaacccgtcctgtcctggggctgctggtctgcttcctgtacaacgaggcgctctattccctgccccgggccttcttcaaggtacccttgctggtgccagggctcaactaccccctggagacctttgtggagagtctcagtaacaagggcatctcagacatcatcaaggtgctggtgcttcgagaaggccaaagtgcacccctgctgagtgcccacgtcaacatgcctgggagcgaggggctggcggccgcctgagacctgagctgctgtgaaagcccctgcacaatcagccagggagaactgggcgggtttagtggccccaggcccactcctcatgcagcagtgtgctggggcgacagctcgtctcccctctcttaagcacccgcttcctcaccacccccactgttgggcctatagtagcaggttagtgagtacctagggcggctcaactcctcccacagcaccaacccagcatggtcccactgaagtcctactacgccctcccctccccagccttttccagaaaccatactgggctcagatcagagctccgaagcggtcaaagtgagctgagcaggacaggcccagcctttctccactgccacgtccctcatgcacatcactcatctcctgctgcaggccaaggccaaaattgggctagtcctggccagggaaatcagaagctcttcttgggtgagattgagcctcctgttgctccctggagttccggaggctgggctgcagcccactcagcttgcgggcaaaatacgtgctctcctctctccttgtcagctgagcaaacccagggaatagccctcctctccccaggaaacttctctgaaatcttagacttagccagtcttaggcctacgatgccacacaaaggttgttcagggagaagggggtgcaggaggcagagggtgccccgcagggagctggtggctccagccccactagagctcctaaagatcacacagcagctgctcctgacagggatgctcatgcccagaaagcaagcccaggagaggaaggcagagtgtgacagagcagagccagggccaggcgcaccaggagaggcgtttctggggctccagagaagtgccacgggaggcagaagtccagaactgcccatatagatgcccttctacatcctggagcccaaatcagtcatgtgggtgggaagttcccagggcagtggtcacatcgtgagaattagcaggaaaggcggggcctttcttgtcatagctatttctgaggatgaaatgggagacatatgcccagcacctgatgtaagtttatataatgtaatattatgtacctaccactaagaaatacatgaaccgtgccatgaggacagtaagtgttcataaagcaacatgaagcaagaaacagtgcagggtgcccagtgcacacactagagagaaattgtgaacattaaggacaaggagaattggtgtctttctaaaacatacttatttaaaaacacatacccacttactaatgtggaattacacagtttgtaacaagaaaacagtctctcccattctctagtactgctcccctacccagcagtcacttccagttcattcagctatttttaaaatgtgcttatatgactcttgcttgatatatcaatcttagacattacctgttgactccctgttgtcatacatgaggctttagctctcttttgtcagcaaccctcccccatccctagttattaggttaaaaaatactcagattactatttctattactatgtgaaagttaactgcggagccaagagttggactataattaaattaccttccttgtactttctttttaatgg

SEQ ID NO: 216143 - DNA, 1782 bp, Artificial Sequence
  derived and/or modified sequence
atggccgccgcatcgtcctccgactctgacgcctgtggggccgagtcgaatgaagctaacagcaaatggctggacgcgcattatgaccccatggcgaacattcacactttctccgcctgcctggccttggctgaccttcacggcgacggggagtacaagctggtggtcggagatctgggccctggtggccaacagccaaggctgaaggttctgaaggggcccctggtgatgaccgagtccccattgccggctcttccagctgccgccgcaacatttttaatggagcagcacgaaccccgcactcctgccctggctctggcatctggcccctgtgtctatgtttacaagaacttgagaccatactttaaattctccttgccacagctgccccccaaccccctggaacaggacctctggaaccaggcgaaggaggatcggattgatcctctcaccctgaaggaaatgctagagagcattcgggagactgccgaggaacctttgagtatccagtctctgcggtttctccaactagagctatcggaaatggaggcattcgttaatcaacacaagtccaactccattaagaggcagacagttatcactacgatgactaccctgaagaagaacctcgctgatgaagatgctgtgagctgcctggtgctcggaacagagaacaaagaactcctcgtgctcgatcccgaagcgttcacaatcctcgccaagatgtctctgccctctgtccccgtttttctggaagtgtcaggtcaattcgacgttgaattccgtctcgcagcagcttgcaggaacgggaacatctacatcctgcggcgcgacagcaagcacccgaagtactgcatcgaacttagtgcccagcccgtgggcctgatccgggttcacaaggttctcgtcgtggggagtactcaggactccctccacggtttcacccataagggaaagaagctgtggaccgttcaaatgcccgccgcaatccttacgatgaatctgctcgagcaacattccagggggcttcaagccgttatggccggcctcgccaacggagaagttcgaatttatagagacaaggccctcctcaacgtgatacatacccctgatgccgtgacatcactttgtttcgggcggtacggcagggaggataataccctgataatgacaacgcgcggaggcggtctgatcatcaagatcctgaagcggactgcggttttcgtggaggggggaagtgaggtagggccaccacctgcccaagcaatgaaactgaatgtccctaggaagaccagactatacgtagaccagacactgcgcgaaagggaggctggtacagccatgcatagagcattccagacagacctatatttgctgaggctgagagccgctagagcatatctgcaggcattggagtcgtcattgtctccattgtccaccacggccagggaacccttgaagttacacgcggtggtacaggggctgggtcccaccttcaaattgaccctgcatctccagaacacctccactacgaggccggttctaggactcctggtttgtttcctgtataacgaagccctgtactcgttacccagggcattttttaaggtgccgctgttggttcctggacttaactaccccctagaaacattcgtagagagcctcagcaacaaggggatctcggacattattaaagtgcttgttctaagagagggccaatctgctccgttgctcagtgctcacgttaacatgcctggctccgaaggcctggccgccgcttag

SEQ ID NO: 216144 - DNA, 498 bp, Artificial Sequence
  derived and/or modified sequence
atgagccccggtcctcagctatggcatcttctccaggcactggtgagcatgtgtataaggatatccgatcccacctctagttccgcgtgccctaactgtctgcagatcctgtggaataagacatttggaacgagacctaaaagggaaacagccgaggaacccttatccatccagtcactgaggttcttgcagttggagttgagcgaaatggaagccttcgtgaaccaacacaaatccaatagtattaaacgccagacagtgatcaccactatgactacccttaagaaaaacttagcagatgaggacgcggtcagttgtcttgttctcggtactgagaacaaggaattactggtgctagatcctgaggccttcacaatcctcgctaaaatgtctctaccgtctgttccggtctttctggaggtcagcggccagtttgatgtggagtttcggcttgccgctgcatgtagaaatggtaacatctacatcttgcgtagatag

SEQ ID NO: 216145 - DNA, 1782 bp, Artificial Sequence
  derived and/or modified sequence
atggctgctgccagcagcagtgacagtgatgcctgtggggctgagagcaatgaggccaacagcaagtggctggatgcccactatgaccccatggccaacatccacaccttcagcgcctgcctggccctggccgacctgcatggagatggagagtacaagctggtggtgggggacctgggccctgggggccagcagccccggctgaaggtgctgaagggccccctggtgatgacagagagccccctgcctgccctgcctgctgctgctgccaccttcctgatggagcagcacgagcccaggaccccagccctggccctggccagcggcccctgtgtgtatgtgtacaagaacctgcggccctacttcaagttcagcctgccccagctgccccccaaccccctggagcaggacctgtggaaccaggccaaggaggacagaattgaccccctgaccctgaaggagatgctggagagcatccgggagacagctgaggagcccctgagcatccagagcctgcgcttcctgcagctggagctgtctgagatggaggcctttgtgaaccagcacaagagcaacagcatcaagaggcagaccgtcatcaccaccatgaccaccctgaagaagaacctggctgatgaagatgctgtgtcctgcctggtgctgggcacagagaacaaggagctgctggtgctggaccctgaggccttcaccatcctggccaagatgagcctgcccagcgtgcctgtgttcctggaggtgtctggccagtttgatgtggagttccggctggccgccgcctgcagaaatggaaacatctacatcctgcggcgggacagcaagcaccccaagtactgcatcgagctgagcgcccagcctgtgggcctcatccgggtgcacaaggtgctggtggtgggcagcacccaggacagcctgcacggcttcacccacaagggcaagaagctgtggacagtgcagatgcctgctgccatcctgaccatgaacctgctggagcagcacagccggggcctgcaggccgtgatggccggcctggccaacggggaggtgcgcatctacagagacaaggccctgctgaatgtcatccacaccccagatgctgtgaccagcctgtgcttcggccgctatggccgggaggacaacaccctcatcatgaccacccggggcggcggcctcatcatcaagatcctgaagaggacagctgtgtttgtggagggcggcagcgaggtgggccccccaccagcccaggccatgaagctgaatgtgcccaggaagacccggctgtatgtggaccagaccctgcgggagcgggaggccggcacagccatgcaccgggccttccagacagacctgtacctgctgcggctgcgggccgcccgggcctacctgcaggccctggagagcagcctgagccccctgagcaccacagcccgggagcccctgaagctgcatgctgtggtgcagggcctgggccccaccttcaagctgaccctgcacctgcagaacaccagcaccaccaggcctgtgctgggcctgctggtgtgcttcctgtacaatgaggccctgtacagcctgccccgggccttcttcaaggtgcccctgctggtgcccggcctgaactaccccctggagacctttgtggagagcctgagcaacaagggcatcagtgacatcatcaaggtgctggtgctgcgggagggccagagcgcccccctgctgagcgcccacgtgaacatgcctggcagcgagggcctggccgccgcctag

SEQ ID NO: 216146 - DNA, 498 bp, Artificial Sequence
  derived and/or modified sequence
atgagccctggcccccagctgtggcacctgctgcaggccctggtgtccatgtgcatccgcatcagtgaccccaccagcagcagcgcctgccccaactgcctgcagatcctgtggaacaagaccttcggcacccggcccaagcgggagacagctgaggagcccctgagcatccagagcctgcgcttcctgcagctggagctgtctgagatggaggcctttgtgaaccagcacaagagcaacagcatcaagaggcagaccgtcatcaccaccatgaccaccctgaagaagaacctggctgatgaagatgctgtgtcctgcctggtgctgggcacagagaacaaggagctgctggtgctggaccctgaggccttcaccatcctggccaagatgagcctgcccagcgtgcctgtgttcctggaggtgtctggccagtttgatgtggagttccggctggccgccgcctgcagaaatggaaacatctacatcctgcggaggtag

SEQ ID NO: 216147 - DNA, 1782 bp, Artificial Sequence
  derived and/or modified sequence
atggccgccgccagcagcagcgacagcgacgcctgcggcgccgagagcaacgaggctaatagtaagtggctcgacgcacactacgatcctatggctaacattcatacttttagcgcctgtctggctctcgcagatctccacggcgacggcgagtacaagctggtggtaggagacctgggccccggaggccaacaaccccgcttgaaggtcctaaagggcccgcttgtgatgaccgagagtcccctcccagccttgccggctgctgctgcgacatttctcatggagcagcatgaaccaagaacgcccgcacttgccctggcgtccggaccgtgtgtctatgtgtacaaaaacctgcgcccctattttaaatttagcctgccgcagttacctcccaaccctttggagcaagatttatggaatcaggccaaggaagatcgaatagacccgctcaccttgaaggaaatgcttgaatctattcgtgagactgccgaggaaccattgtccattcagtctctacgctttctccagcttgaactgagtgaaatggaagccttcgtcaatcagcacaagtcaaactctattaaacgtcagacggtcattaccacaatgaccactttgaagaagaacctcgcagacgaggatgccgtgagttgcctggtgctgggaacagagaataaggaacttctcgtcttagacccagaagctttcactatcctggccaagatgtcactgcccagtgtcccagtttttctggaggtgtctggacagttcgatgttgagttccggctcgccgccgcttgtaggaatgggaatatttacatcctccgacgggacagtaagcaccccaaatattgcattgagctgtctgcccaacctgtggggcttatacgcgtgcataaggtccttgtggttgggtcaactcaggatagtcttcatggattcacccacaagggaaagaagctttggaccgttcagatgccagccgcaatattaactatgaatctcctggagcaacatagccgcgggctgcaggcagtgatggccgggctcgcaaacggagaggtgcgaatttaccgggataaagctctcctgaacgtcatacatacgcccgacgccgtgacatcgctctgctttgggagatatgggcgggaagacaacactctgatcatgacaacccgcggaggaggtttaataattaagattctcaagcggacagcagtcttcgtagaaggcggatcagaggtgggacccccgccggctcaagctatgaagctaaacgtgccccgcaaaactcggctgtacgtagaccagactcttagggaaagggaggccggaacagctatgcaccgcgccttccagactgatctgtatttgttgcgactccgcgccgcccgcgcctatttacaggcccttgaaagttcattatcacctctgtcaactaccgcccgcgaaccattgaagctccatgctgtggttcaggggctcggcccaaccttcaaactcaccctgcatctgcaaaacacctctacgaccaggcccgtgctcggattgctcgtttgtttcctgtataatgaggccctgtatagtctcccacgggcattctttaaggtgcctctgctggttcctgggttaaactatcccctcgagacatttgtggaaagcctttctaacaaaggaatttcagacataataaaggtccttgtgctccgtgaggggcaatcagctcccctgctctccgcacacgtgaacatgcccgggtcagagggtctggctgccgcgtag

SEQ ID NO: 216148 - DNA, 498 bp, Artificial Sequence
  derived and/or modified sequence
atgagccccggcccccagctgtggcacctgctgcaggccctggtgtctatgtgcattcggatttcagacccaacgagcagtagtgcttgccccaattgtctgcaaatattgtggaacaagacatttggcaccaggcctaaaagggaaaccgctgaagagccactgagtattcagagccttcgattcctgcaattggaactctccgagatggaagcatttgtgaaccagcataagtctaatagcatcaaacgacaaactgtgatcacgacgatgaccaccttgaagaagaacctggccgacgaggacgcagtgtcctgccttgtgttggggactgagaataaggagctcttagtgctggaccccgaggcgtttacaatcctcgcgaaaatgtccttaccttcggttccagtttttcttgaggtttccgggcagtttgacgtagagttcaggctggcagccgcctgcaggaatggcaatatctatatcctccgacggtag

SEQ ID NO: 216149 - DNA, 1782 bp, Artificial Sequence
  derived and/or modified sequence
atggcggctgcgtcctcgtccgacagtgacgcttgtggtgctgaaagcaacgaggccaatagtaagtggctcgacgcccactacgatccgatggctaacatccacacattcagcgcctgccttgcactggccgacctgcatggcgacggcgaatacaagctcgttgtcggggatctgggccctgggggacagcagcccagactgaaagtcctcaaaggacccctggtgatgaccgaatcgcctctgccagccctgcctgctgctgccgcaactttccttatggaacagcacgagcctagaactcctgctctcgctctggcatctggcccttgcgtctacgtgtataagaatctgcgtccgtatttcaagttctccctgcctcagcttccccctaatccactcgagcaagatctgtggaaccaggccaaagaggatcggatcgatcccttaacactgaaagaaatgctggaatccatccgtgaaacagcggaggaaccactaagcatccagtccctgagattccttcagttggagctgtcggagatggaggcattcgtaaatcagcacaagagcaactctattaagcggcagaccgtcatcaccactatgacaacgctaaagaagaatctcgccgacgaggacgcagtgagttgtctggtactgggaaccgaaaacaaggagcttctggtcttggaccctgaagccttcactattttggctaaaatgtcactgcccagtgtacctgtgttcctggaggtaagcggacagttcgatgtcgagtttcgactcgcggctgcatgtcggaacgggaatatctacatcctgcggagggacagcaagcacccgaaatattgtattgagctgagcgcccagcctgtcggattaatcagggtccataaagttctggtggttgggtcaactcaggactctttgcatgggttcacccataaggggaagaagctatggaccgtgcagatgcccgctgccattctgactatgaatcttctggagcaacacagcaggggtctccaggccgttatggcgggactcgccaacggcgaggtgcggatctaccgggacaaggcgctgctgaacgtaatacacaccccggatgcggttacaagtctgtgctttgggcgttatgggagagaggacaacactctgattatgacaacgcggggtgggggtttgatcatcaagattctgaaacgaaccgcagttttcgttgagggagggtctgaagtggggccaccaccagcccaggccatgaagctgaatgttcctcgcaaaacacggctgtacgtagatcagaccctccgggagcgcgaagctgggactgcgatgcatcgggcatttcaaacagacctatacctccttcggctgcgggctgccagggcctatttgcaggcactggagtctagtttgtctccgcttagcaccaccgcgcgtgagcctttgaagcttcatgccgtcgtccagggtttagggcctactttcaagcttaccctgcacttgcagaacacatccacaacccggcctgtgctgggtctgcttgtgtgttttctctacaacgaagctctttacagcctccccagggcttttttcaaagtgcctctgctggtgccaggcctcaactaccctctcgagacttttgtggagtctctcagtaacaagggcatttccgacattatcaaggtactcgtgctgagggaaggacagtcagctcctctgttgtcagcccacgtcaatatgcccggtagcgaggggctggccgcagcctag

SEQ ID NO: 216150 - DNA, 498 bp, Artificial Sequence
  derived and/or modified sequence
atgtccccaggcccacagctttggcacctgttgcaggccttagtgtctatgtgcataagaatttctgacccgacctcttcgagcgcttgtccgaattgcctccagatattgtggaataaaaccttcgggaccaggccaaaaagggaaaccgcagaagagccacttagtattcaatcgttgaggttcctgcagcttgaactgtcagagatggaggcatttgtgaaccagcataagtccaacagtatcaaaaggcagaccgtgattacaacaatgactacgttaaagaagaatctggcggatgaagatgccgtctcgtgcctcgtcctggggactgaaaataaagaactcttggtactagaccctgaagcgtttactattctggcgaagatgtctcttccctccgtccccgttttcctggaggtgtctggccagttcgacgtggagtttaggctggcagcagcgtgtagaaatggcaatatctacatcttgaggagatag

SEQ ID NO: 216151 - DNA, 3423 bp, Artificial Sequence
  derived and/or modified sequence
attgggcgttacgcgagggcggggccggttgccaggacgacgcctgcgaagatggccgctgcgtcctcatcggattccgacgcctgcggagctgagagcaatgaggccaattcgaagtggttggatgcgcactacgacccaatggccaatatccacaccttttctgcctgcctagcgctggcagatttacatggggatggggaatacaagctggtggtaggggaccttggccctggtgggcagcagccccgcctgaaggtgctcaaaggaccactggtgatgaccgaaagcccgctacctgctctgccagctgctgctgccaccttcctcatggagcaacatgagccccggaccccagctctggcacttgcttcaggcccttgtgtctatgtgtataagaatctcagaccctacttcaagttcagcctgccccaattgcctccaaatcctctggaacaagacctttggaaccaggccaaagaggaccgaatcgaccccttaaccctgaaggagatgctggagagcatccgggagacggcagaggagcctttgtccatccagtcactcaggtttctgcagctggagctaagtgaaatggaggcatttgtaaaccaacacaagtccaactccatcaagcggcagacagtcatcaccaccatgaccaccttgaagaagaacctggctgacgaggatgctgtgtcttgcctggtgctgggcaccgagaacaaggagctcctggtgcttgaccccgaggccttcaccattttagccaagatgagccttcccagcgtccccgtcttcctagaggtttctggccagtttgatgttgagttccggcttgccgcggcctgccgcaatggaaacatctatattctgagaagagactccaagcaccccaagtactgcatcgagctgagcgcccagcctgtgggacttatccgggtacacaaggtcctagtggtgggcagcacccaagacagcctgcatggcttcacccacaaggggaagaagctgtggacagtgcagatgcccgcagccatcctgaccatgaacctcctggagcagcattcccggggcctgcaggccgtcatggctgggctggccaatggagaggtccgcatttatcgtgacaaggccctgctcaatgtcatccacaccccggatgcagtgaccagcctttgctttggccggtacgggcgggaggacaacaccctcatcatgaccactcgaggtggtggcctgatcatcaagatcctgaagcgtacagcagtgtttgtagagggaggaagtgaggtgggtcccccaccagcccaggccatgaaactcaatgtgccccgaaagacccggctttacgtggatcagacactgcgagagcgggaggctggcaccgccatgcaccgggccttccagacagacctatacctgctgcgcctacgtgctgcccgcgcctacctgcaggccctcgagtccagcctgagccccctgtccacgacagcccgagagccactcaagctgcacgccgtggttcagggccttggccccacctttaagctcacacttcacctgcagaacacctcaacaacccgtcctgtcctggggctgctggtctgcttcctgtacaacgaggcgctctattccctgccccgggccttcttcaaggtacccttgctggtgccagggctcaactaccccctggagacctttgtggagagtctcagtaacaagggcatctcagacatcatcaaggtgctggtgcttcgagaaggccaaagtgcacccctgctgagtgcccacgtcaacatgcctgggagcgaggggctggcggccgcctgagacctgagctgctgtgaaagcccctgcacaatcagccagggagaactgggcgggtttagtggccccaggcccactcctcatgcagcagtgtgctggggcgacagctcgtctcccctctcttaagcacccgcttcctcaccacccccactgttgggcctatagtagcaggttagtgagtacctagggcggctcaactcctcccacagcaccaacccagcatggtcccactgaagtcctactacgccctcccctccccagccttttccagaaaccatactgggctcagatcagagctccgaagcggtcaaagtgagctgagcaggacaggcccagcctttctccactgccacgtccctcatgcacatcactcatctcctgctgcaggccaaggccaaaattgggctagtcctggccagggaaatcagaagctcttcttgggtgagattgagcctcctgttgctccctggagttccggaggctgggctgcagcccactcagcttgcgggcaaaatacgtgctctcctctctccttgtcagctgagcaaacccagggaatagccctcctctccccaggaaacttctctgaaatcttagacttagccagtcttaggcctacgatgccacacaaaggttgttcagggagaagggggtgcaggaggcagagggtgccccgcagggagctggtggctccagccccactagagctcctaaagatcacacagcagctgctcctgacagggatgctcatgcccagaaagcaagcccaggagaggaaggcagagtgtgacagagcagagccagggccaggcgcaccaggagaggcgtttctggggctccagagaagtgccacgggaggcagaagtccagaactgcccatatagatgcccttctacatcctggagcccaaatcagtcatgtgggtgggaagttcccagggcagtggtcacatcgtgagaattagcaggaaaggcggggcctttcttgtcatagctatttctgaggatgaaatgggagacatatgcccagcacctgatgtaagtttatataatgtaatattatgtacctaccactaagaaatacatgaaccgtgccatgaggacagtaagtgttcataaagcaacatgaagcaagaaacagtgcagggtgcccagtgcacacactagagagaaattgtgaacattaaggacaaggagaattggtgtctttctaaaacatacttatttaaaaacacatacccacttactaatgtggaattacacagtttgtaacaagaaaacagtctctcccattctctagtactgctcccctacccagcagtcacttccagttcattcagctatttttaaaatgtgcttatatgactcttgcttgatatatcaatcttagacattacctgttgactccctgttgtcatacatgaggctttagctctcttttgtcagcaaccctcccccatccctagttattaggttaaaaaatactcagattactatttctattactatgtgaaagttaactgcggagccaagagttggactataattaaattaccttccttgtactttctttttaatggagttaatgagttgc

SEQ ID NO: 216152 - DNA, 1002 bp, Artificial Sequence
  derived and/or modified sequence
ggttgccaggacgacgcctgcgaagatggccgctgcgtcctcatcggattccgacgcctgcggagctgagagcaatgaggccaattcgaagtggttggatgcgcactacgacccaatggccaatatccacaccttttctgcctgcctagctggtggtaggggaccttggccctggtgggcagcagccccgcctgaaggtgctcaaaggaccactggtgatgaccgaaagcccgctacctgctctgccagctgctgctgccaccttcctcatggagcaacatgagccccggaccccagctctggcacttgcttcaggcccttgtgtctatgtgtataagaatctcagaccctacttcaagttcagcctgccccaattgcctccaaatcctctggaacaagacctttggaaccaggccaaagagggagacggcagaggagcctttgtccatccagtcactcaggtttctgcagctggagctaagtgaaatggaggcatttgtaaaccaacacaagtccaactccatcaagcggcagacagtcatcaccaccatgaccaccttgaagaagaacctggctgacgaggatgctgtgtcttgcctggtgctgggcaccgagaacaaggagctcctggtgcttgaccccgaggccttcaccattttagccaagatgagccttcccagcgtccccgtcttcctagaggtttctggccagtttgatgttgagttccggcttgccgcggcctgccgcaatggaaacatctatattctgagaagatgatcatacaagccaccatagtgaaggtgggcggaagacaagacaccatagtgaaggtgggaggaagacaagacaccatagtgaaggtgggaggaagacacacttgatgttttccaaggccacacatttactaaggtggcagaagtggaaataatcccagggtcatctgctttggggccagtgttcctcccagagactccaagcaccccaagtactgcatcgagctga

SEQ ID NO: 216153 - DNA, 1782 bp, Artificial Sequence
  derived and/or modified sequence
atggccgccgccagcagcagcgacagcgacgcctgcggcgccgagagcaacgaggccaacagcaagtggctggacgcccactacgaccccatggccaacatccacaccttcagcgcctgcctggccctggccgacctgcacggcgacggcgagtacaagctggtggtgggcgacctgggccccggcggccagcagcccagactgaaggtgctgaagggccccctggtgatgaccgagagccccctgcccgccctgcccgccgccgccgccaccttcctgatggagcagcacgagcccagaacccccgccctggccctggccagcggcccctgcgtgtacgtgtacaagaacctgagaccctacttcaagttcagcctgccccagctgccccccaaccccctggagcaggacctgtggaaccaggccaaggaggacagaatcgaccccctgaccctgaaggagatgctggagagcatcagagagaccgccgaggagcccctgagcatccagagcctgagattcctgcagctggagctgagcgagatggaggccttcgtgaaccagcacaagagcaacagcatcaagagacagaccgtgatcaccaccatgaccaccctgaagaagaacctggccgacgaggacgccgtgagctgcctggtgctgggcaccgagaacaaggagctgctggtgctggaccccgaggccttcaccatcctggccaagatgagcctgcccagcgtgcccgtgttcctggaggtgagcggccagttcgacgtggagttcagactggccgccgcctgcagaaacggcaacatctacatcctgagaagagacagcaagcaccccaagtactgcatcgagctgagcgcccagcccgtgggcctgatcagagtgcacaaggtgctggtggtgggcagcacccaggacagcctgcacggcttcacccacaagggcaagaagctgtggaccgtgcagatgcccgccgccatcctgaccatgaacctgctggagcagcacagcagaggcctgcaggccgtgatggccggcctggccaacggcgaggtgagaatctacagagacaaggccctgctgaacgtgatccacacccccgacgccgtgaccagcctgtgcttcggcagatacggcagagaggacaacaccctgatcatgaccaccagaggcggcggcctgatcatcaagatcctgaagagaaccgccgtgttcgtggagggcggcagcgaggtgggccccccccccgcccaggccatgaagctgaacgtgcccagaaagaccagactgtacgtggaccagaccctgagagagagagaggccggcaccgccatgcacagagccttccagaccgacctgtacctgctgagactgagagccgccagagcctacctgcaggccctggagagcagcctgagccccctgagcaccaccgccagagagcccctgaagctgcacgccgtggtgcagggcctgggccccaccttcaagctgaccctgcacctgcagaacaccagcaccaccagacccgtgctgggcctgctggtgtgcttcctgtacaacgaggccctgtacagcctgcccagagccttcttcaaggtgcccctgctggtgcccggcctgaactaccccctggagaccttcgtggagagcctgagcaacaagggcatcagcgacatcatcaaggtgctggtgctgagagagggccagagcgcccccctgctgagcgcccacgtgaacatgcccggcagcgagggcctggccgccgcctag

SEQ ID NO: 216154 - DNA, 498 bp, Artificial Sequence
  derived and/or modified sequence
atgagccccggcccccagctgtggcacctgctgcaggccctggtgagcatgtgcatcagaatcagcgaccccaccagcagcagcgcctgccccaactgcctgcagatcctgtggaacaagaccttcggcaccagacccaagagagagaccgccgaggagcccctgagcatccagagcctgagattcctgcagctggagctgagcgagatggaggccttcgtgaaccagcacaagagcaacagcatcaagagacagaccgtgatcaccaccatgaccaccctgaagaagaacctggccgacgaggacgccgtgagctgcctggtgctgggcaccgagaacaaggagctgctggtgctggaccccgaggccttcaccatcctggccaagatgagcctgcccagcgtgcccgtgttcctggaggtgagcggccagttcgacgtggagttcagactggccgccgcctgcagaaacggcaacatctacatcctgagaagatag

SEQ ID NO: 216155 - protein, 486 aa, Artificial Sequence
  derived and/or modified sequence
MVASAGSLFGGMVLKKFLKEIQSILPGISAKLTWTSEEGSYSQDMTGVTPFQMIFEVDEKPRTLMTDCLVIKHFLRKIIMVHPKVRFHFSVKVNGILSTEIFGVENEPTLNLGNGIALLVDSQHYVSRPNFGTIESHCSRIHPVLGHPVMLFIPEDVAGMDLLGELILTPAAALCPSPKVSSNQLNRISSVSIFLYGPLGLPLILSTWEQPMTTFFKDTSSLVDWKKYHLCMIPNLDLNLDRDLVLPDVSYQVESSEEDQSQTMDPQGQTLLLFLFVDFHSAFPVQQMEIWGVYTLLTTHLNAILVESHSVVQGSIQFTVDKVLEQHHQAAKAADTQEFRTKLHKVFREITQHQFLHHCSCEVKQQLTLEKKDSAQGTEDAPDNSSLELLADTSGQAENKRLKRGSPRIEEMRALRSARAPSPSEAAPRRPEATAAPLTPRGREHREAHGRALAPGRASLGSRLEDVLWLQEVSNLSEWLSPSPGP

SEQ ID NO: 216156 - protein, 677 aa, Artificial Sequence
  derived and/or modified sequence
MGSRCRAWAWTRAWALAEFQARAEEGAAAAAAAAGGYPSTGRCRCSLRGMEGTAVAVFEILRFLIIHWKCDIDVSKGALLEGQLVISIEGLNSKHQANALHCVTTRWSLTLLPRPECSGAVSAHCNLHLPGSSDSHASVPRVAGITDAHHHAWLIMVASAGSLFGGMVLKKFLKEIQSILPGISAKLTWTSEEGSYSQDMTGVTPFQMIFEVDEKPRTLMTDCLVIKHFLRKIIMVHPKVRFHFSVKVNGILSTEIFGVENEPTLNLGNGIALLVDSQHYVRPNFGTIESHCSRIHPVLGHPVMLFIPEDVAGMDLLGELILTPAAALCPSPKVSSNQLNRISSVSIFLYGPLGLPLILSTWEQPMTTFFKDTSSLVDWKKYHLCMIPNLDLNLDRDLVLPDVSYQVESSEEDQSQTMDPQGQTLLLFLFVDFHSAFPVQQMEIWGVYTLLTTHLNAILVESHSVVQGSIQFTVDKVLEQHHQAAKAQQKLQASLSVAVNSIMSILTGSTRSSFRKMCLQTLQAADTQEFRTKLHKVFREITQHQFLHHCSCEVKQQLTLEKKDSAQGTEDAPDNSSLELLADTSGQAENKRLKRGSPRIEEMRALRSARAPSPSEAAPRRPEATAAPLTPRGREHREAHGRALAPGRASLGSRLEDVLWLQEVSNLSEWLSPSPGP

SEQ ID NO: 216157 - DNA, 2027 bp, Artificial Sequence
  derived and/or modified sequence
ggaagggatgggctcgcgctgccgggcgtgggcgtggactcgggcgtgggcactggcggagttccaagcccgggctgaggagggggcggcggcggcggcggcggcggcgggcgggtacccttcgactgggcgttgccgctgttccctgcgcggcatggaggggacggccgtggccgtgttcgagattttgagatttttaataattcactggaagtgtgacatagatgtatcaaagggagcattgctagaagggcagctagtgatttccatagaaggattaaattctaagcaccaggcaaatgctcttcattgtgtaacaactagatggagtctcactctgttacccaggccggagtgcagtggcgcagtctcggctcactgcaacctccacctcccaggttcaagtgattctcatgcctcagtcccccgagtagctgggattacagatgcccaccaccatgcctggctaattatggttgcttctgcaggaagcctttttggtggcatggtcctcaagaagttcctaaaagaaatacagtccatactgcccggaatctctgcaaagctgacttggacttcagaggaaggcagctattctcaggatatgacaggggtaacacccttccagatgatttttgaggttgatgaaaagcccagaaccttgatgacagattgtctggttataaagcattttttacgtaaaatcatcatggtgcaccctaaggtcagatttcatttcagtgtaaaggtaaatggaatcctctccacagagatctttggggtggagaatgaacccactttgaaccttgggaatggaattgctcttttggtcgactcccagcattatgtgagtagaccaaattttggtacaattgaatcacactgcagcagaattcaccctgtgctaggacatccagtaatgcttttcatccctgaagacgtggctggcatggacttgttgggagaactgatactgactccagcagctgcactgtgccccagcccaaaggtttcttccaaccagcttaacaggatttcttcagtttccatatttctatatggacctttgggtctgcctctgatattgtcaacttgggagcagccgatgactactttcttcaaagatacctcttctttagttgactggaaaaaataccatttgtgtatgatacccaatttggatctcaatttggatagagatttggtgcttccagatgtgagttatcaggtggaatccagtgaggaggatcagtctcagactatggatcctcaaggacaaactctgctgctttttctctttgtggatttccacagtgcatttccagtccagcaaatggaaatctggggagtctatactttgctcacaactcatctcaatgccatccttgtggagagccacagtgtagtgcaaggttccatccaattcactgtggacaaggtcttggagcaacatcaccaggctgccaaggcagctgacacacaagagttcaggaccaaactgcacaaagtatttcgtgagatcacccaacaccaatttcttcaccactgctcatgtgaggtgaagcagcagctaaccctagaaaaaaaggactcagcccagggcactgaggacgcacctgataacagcagcctggagctcctagcagataccagcgggcaagcagaaaacaagaggctcaagaggggcagcccccgcatagaggagatgcgagctctgcgctctgccagggccccgagcccgtcagaggccgccccgcgccgcccggaagccaccgcggcccccctcactcctagaggaagggagcaccgcgaggctcacggcagggccctggcgccgggcagggcgagcctcggaagccgcctggaggacgtgctgtggctgcaggaggtctccaacctgtcagagtggctgagtcccagccctgggccctgagccgggtccccttccgcaagcgcccaccgatccggaggctgcgggcagccgttatcccgtggtttaataaagctgccgcgcgctcaccaagtcc

SEQ ID NO: 216158 - DNA, 2323 bp, Artificial Sequence
  derived and/or modified sequence
ggaagggatgggctcgcgctgccgggcgtgggcgtggactcgggcgtgggcactggcggagttccaagcccgggctgaggagggggcggcggcggcggcggcggcggcgggcgggtacccttcgactgggcgttgccgctgttccctgcgcggcatggaggggacggccgtggccgtgttcgagattttgagatttttaataattcactggaagtgtgacatagatgtatcaaagggagcattgctagaagggcagctagtgatttccatagaaggattaaattctaagcaccaggcaaatgctcttcattgtgtaacaactagatggagtctcactctgttacccaggccggagtgcagtggcgcagtctcggctcactgcaacctccacctcccaggttcaagtgattctcatgcctcagtcccccgagtagctgggattacagatgcccaccaccatgcctggctaattatggttgcttctgcaggaagcctttttggtggcatggtcctcaagaagttcctaaaagaaatacagtccatactgcccggaatctctgcaaagctgacttggacttcagaggaaggcagctattctcaggatatgacaggggtaacacccttccagatgatttttgaggttgatgaaaagcccagaaccttgatgacagattgtctggttataaagcattttttacgtaaaatcatcatggtgcaccctaaggtcagatttcatttcagtgtaaaggtaaatggaatcctctccacagagatctttggggtggagaatgaacccactttgaaccttgggaatggaattgctcttttggtcgactcccagcattatgtgagaccaaattttggtacaattgaatcacactgcagcagaattcaccctgtgctaggacatccagtaatgcttttcatccctgaagacgtggctggcatggacttgttgggagaactgatactgactccagcagctgcactgtgccccagcccaaaggtttcttccaaccagcttaacaggatttcttcagtttccatatttctatatggacctttgggtctgcctctgatattgtcaacttgggagcagccgatgactactttcttcaaagatacctcttctttagttgactggaaaaaataccatttgtgtatgatacccaatttggatctcaatttggatagagatttggtgcttccagatgtgagttatcaggtggaatccagtgaggaggatcagtctcagactatggatcctcaaggacaaactctgctgctttttctctttgtggatttccacagtgcatttccagtccagcaaatggaaatctggggagtctatactttgctcacaactcatctcaatgccatccttgtggagagccacagtgtagtgcaaggttccatccaattcactgtggacaaggtcttggagcaacatcaccaggctgccaaggctcagcagaaactacaggcctcactctcagtggctgtgaactccatcatgagtattctgactggaagcactaggagcagcttccgaaagatgtgtctccagacccttcaagcagctgacacacaagagttcaggaccaaactgcacaaagtatttcgtgagatcacccaacaccaatttcttcaccactgctcatgtgaggtgaagcagcagctaaccctagaaaaaaaggactcagcccagggcactgaggacgcacctgataacagcagcctggagctcctagcagataccagcgggcaagcagaaaacaagaggctcaagaggggcagcccccgcatagaggagatgcgagctctgcgctctgccagggccccgagcccgtcagaggccgccccgcgccgcccggaagccaccgcggcccccctcactcctagaggaagggagcaccgcgaggctcacggcagggccctggcgccgggcagggcgagcctcggaagccgcctggaggacgtgctgtggctgcaggaggtctccaacctgtcagagtggctgagtcccagccctgggccctgagccgggtccccttccgcaagcgcccaccgatccggaggctgcgggcagccgttatcccgtggtttaataaagctgccgcgcgctcaccaagtcctcttccgcgtctgcttccgcgtcgggcccgggcggggcggggcggggcgtggagccgcgccgcggcctgacgtcacccacacctccctgggactgcgtcactggtgcgcgccgcgggtcagggcgcaatggcggcgctgggcggggatgggctgcgactgctgtcggtgtcgcggccggagcggccgc

SEQ ID NO: 216159 - DNA, 1461 bp, Artificial Sequence
  derived and/or modified sequence
atggtggccagcgccggcagcctgttcggcggcatggtgctgaagaagttcctgaaggagatccagagcatcctgcccggcatcagcgccaagctgacctggaccagcgaggagggcagctacagccaggacatgaccggcgtgacccccttccagatgatcttcgaggtggacgagaagcccagaaccctgatgaccgactgcctggtgatcaagcacttcctgagaaagatcatcatggtgcaccccaaggtgagattccacttcagcgtgaaggtgaacggcatcctgagcaccgagatcttcggcgtggagaacgagcccaccctgaacctgggcaacggcatcgccctgctggtggacagccagcactacgtgagcagacccaacttcggcaccatcgagagccactgcagcagaatccaccccgtgctgggccaccccgtgatgctgttcatccccgaggacgtggccggcatggacctgctgggcgagctgatcctgacccccgccgccgccctgtgccccagccccaaggtgagcagcaaccagctgaacagaatcagcagcgtgagcatcttcctgtacggccccctgggcctgcccctgatcctgagcacctgggagcagcccatgaccaccttcttcaaggacaccagcagcctggtggactggaagaagtaccacctgtgcatgatccccaacctggacctgaacctggacagagacctggtgctgcccgacgtgagctaccaggtggagagcagcgaggaggaccagagccagaccatggacccccagggccagaccctgctgctgttcctgttcgtggacttccacagcgccttccccgtgcagcagatggagatctggggcgtgtacaccctgctgaccacccacctgaacgccatcctggtggagagccacagcgtggtgcagggcagcatccagttcaccgtggacaaggtgctggagcagcaccaccaggccgccaaggccgccgacacccaggagttcagaaccaagctgcacaaggtgttcagagagatcacccagcaccagttcctgcaccactgcagctgcgaggtgaagcagcagctgaccctggagaagaaggacagcgcccagggcaccgaggacgcccccgacaacagcagcctggagctgctggccgacaccagcggccaggccgagaacaagagactgaagagaggcagccccagaatcgaggagatgagagccctgagaagcgccagagcccccagccccagcgaggccgcccccagaagacccgaggccaccgccgcccccctgacccccagaggcagagagcacagagaggcccacggcagagccctggcccccggcagagccagcctgggcagcagactggaggacgtgctgtggctgcaggaggtgagcaacctgagcgagtggctgagccccagccccggcccctag

SEQ ID NO: 216160 - DNA, 2034 bp, Artificial Sequence
  derived and/or modified sequence
atgggcagcagatgcagagcctgggcctggaccagagcctgggccctggccgagttccaggccagagccgaggagggcgccgccgccgccgccgccgccgccggcggctaccccagcaccggcagatgcagatgcagcctgagaggcatggagggcaccgccgtggccgtgttcgagatcctgagattcctgatcatccactggaagtgcgacatcgacgtgagcaagggcgccctgctggagggccagctggtgatcagcatcgagggcctgaacagcaagcaccaggccaacgccctgcactgcgtgaccaccagatggagcctgaccctgctgcccagacccgagtgcagcggcgccgtgagcgcccactgcaacctgcacctgcccggcagcagcgacagccacgccagcgtgcccagagtggccggcatcaccgacgcccaccaccacgcctggctgatcatggtggccagcgccggcagcctgttcggcggcatggtgctgaagaagttcctgaaggagatccagagcatcctgcccggcatcagcgccaagctgacctggaccagcgaggagggcagctacagccaggacatgaccggcgtgacccccttccagatgatcttcgaggtggacgagaagcccagaaccctgatgaccgactgcctggtgatcaagcacttcctgagaaagatcatcatggtgcaccccaaggtgagattccacttcagcgtgaaggtgaacggcatcctgagcaccgagatcttcggcgtggagaacgagcccaccctgaacctgggcaacggcatcgccctgctggtggacagccagcactacgtgagacccaacttcggcaccatcgagagccactgcagcagaatccaccccgtgctgggccaccccgtgatgctgttcatccccgaggacgtggccggcatggacctgctgggcgagctgatcctgacccccgccgccgccctgtgccccagccccaaggtgagcagcaaccagctgaacagaatcagcagcgtgagcatcttcctgtacggccccctgggcctgcccctgatcctgagcacctgggagcagcccatgaccaccttcttcaaggacaccagcagcctggtggactggaagaagtaccacctgtgcatgatccccaacctggacctgaacctggacagagacctggtgctgcccgacgtgagctaccaggtggagagcagcgaggaggaccagagccagaccatggacccccagggccagaccctgctgctgttcctgttcgtggacttccacagcgccttccccgtgcagcagatggagatctggggcgtgtacaccctgctgaccacccacctgaacgccatcctggtggagagccacagcgtggtgcagggcagcatccagttcaccgtggacaaggtgctggagcagcaccaccaggccgccaaggcccagcagaagctgcaggccagcctgagcgtggccgtgaacagcatcatgagcatcctgaccggcagcaccagaagcagcttcagaaagatgtgcctgcagaccctgcaggccgccgacacccaggagttcagaaccaagctgcacaaggtgttcagagagatcacccagcaccagttcctgcaccactgcagctgcgaggtgaagcagcagctgaccctggagaagaaggacagcgcccagggcaccgaggacgcccccgacaacagcagcctggagctgctggccgacaccagcggccaggccgagaacaagagactgaagagaggcagccccagaatcgaggagatgagagccctgagaagcgccagagcccccagccccagcgaggccgcccccagaagacccgaggccaccgccgcccccctgacccccagaggcagagagcacagagaggcccacggcagagccctggcccccggcagagccagcctgggcagcagactggaggacgtgctgtggctgcaggaggtgagcaacctgagcgagtggctgagccccagccccggcccctag

SEQ ID NO: 216161 - DNA, 1461 bp, Artificial Sequence
  derived and/or modified sequence
atggttgcctccgctggaagtttatttggaggtatggtgctcaaaaagtttctcaaggagatccaaagcatactgccagggatttcagcaaaactgacatggacctcggaggaaggcagctactcccaggacatgaccggagtcaccccttttcaaatgatttttgaagtcgatgagaaaccccgaacactgatgactgattgtctggtgatcaagcactttcttcgcaagatcatcatggttcacccaaaagtccggtttcacttctcagtgaaagtgaatggtattttgtccaccgagatttttggagtcgagaatgagccaaccctgaatctggggaacgggatcgctctcttagtcgattcgcaacactatgtctcaagacccaacttcggaacgattgagtcacactgctctcggatacacccggtgttagggcacccagtgatgctctttatccctgaggacgtggccgggatggatctcctaggggaacttatcctgaccccagctgctgctctctgtcctagtccaaaggtgtcaagtaaccagttgaacagaataagctccgtttctatctttctctacggccctctgggactgcctctgatcttgtccacgtgggagcagcctatgactacattttttaaggacactagctcgttggtagactggaagaagtaccacctgtgtatgattccgaatctggacctaaatttagacagggatctcgtattgccggacgtcagctatcaggtcgagtctagcgaagaggaccaaagtcaaaccatggaccctcaaggccaaaccctactccttttcctgttcgtggacttccatagcgcatttcctgtccagcaaatggaaatctggggcgtttacactctgctcactacacatttgaatgctatcctggtggagtcccactcagtcgtgcaggggtccatacagtttacggttgataaggtcctcgaacagcatcaccaggctgctaaggcagccgatacccaggagtttcggaccaaactccataaagtcttccgagagataacccaacaccaatttctacatcattgttcctgtgaggtcaaacagcagctgacgttagaaaaaaaagactcagcgcaagggacagaggatgcccctgataacagcagccttgaactgctggctgataccagcggtcaggctgaaaataagcggctaaagcgcggtagtcccaggattgaggagatgcgggcgctgcgatccgcgcgcgcaccgtccccgtctgaggctgcgccccgacgtccagaagccacagctgcacctctgacccccagaggccgggagcatcgtgaagcacatggcagggccctggcccctggacgtgcctccctggggtcccgcctagaagacgtcctgtggttacaagaggtcagcaacttaagcgagtggctgagtccgagtcctggcccttag

SEQ ID NO: 216162 - DNA, 2034 bp, Artificial Sequence
  derived and/or modified sequence
atggggagtagatgccgagcttgggcatggactcgcgcgtgggccctcgccgaattccaggcacgcgcagaggagggggcagccgctgcagctgctgcagctgggggctatcctagtacaggtcgttgccggtgctcccttcggggcatggaaggcacggccgtggccgttttcgagattttgcggttcctgattatccactggaagtgcgatattgatgtgagcaagggggcactcctcgagggccagctggtgattagtattgaaggcctgaatagcaaacatcaagccaatgccctgcactgcgtgaccacgcgctggtctctgactttgttgcctcgccctgaatgctctggagctgtgtcagcgcactgtaatcttcatctccctgggtcctcagatagtcatgcctcagtgccgagggtggcaggcattaccgacgcccaccaccacgcttggctgattatggtagcgtctgccgggtccctgtttgggggcatggtacttaagaagttcctgaaggagattcagagtatcttgccaggcatcagtgctaagttgacgtggacctctgaagagggaagctactcccaggacatgaccggggtcactccattccagatgatcttcgaggtcgacgagaagccccgaactttaatgacagactgcctggtgataaagcattttctgcgaaaaataatcatggttcatccaaaggtgagattccacttctctgtcaaggttaatggaattctctcaaccgagatatttggagtggaaaatgagccaaccctgaacctaggcaatggaattgcattgctggtcgatagccagcactacgtaagaccaaacttcgggacgatcgaaagtcactgttctaggatccatccagtcctgggccatccggtgatgttattcatccccgaggatgttgcaggaatggatctactcggcgaattgatcctcactcccgccgccgccctgtgcccatcccctaaagtttcgtcaaaccagctcaatcggatctctagcgtgtccattttcttgtacggccccctgggcctgcctcttattctcagcacttgggaacagcccatgaccacctttttcaaagacacgtcctccttggtagactggaaaaaataccacctatgtatgattcccaacttggacctgaacctggaccgggacctcgtattaccggacgtttcctaccaggtggagagctctgaagaagaccagagccagacaatggatcctcaaggccaaactctcctgctgttcttgtttgtggacttccacagtgctttccccgtgcaacagatggagatttggggagtctacacgcttctgaccactcatctcaacgccatactcgtggagtcccactcggtggtgcagggtagcatacagttcacggtggacaaagtcctcgaacagcatcaccaagcagcgaaggcacagcaaaaactgcaagcatccctctcagtggcggtgaatagcataatgtccatcctcactggttccaccagatcctcgttccgcaaaatgtgtttgcagacactccaggccgctgatacccaggagttccgtaccaagctgcacaaggttttcagagagataacacagcaccaatttctgcaccattgcagctgtgaagtgaaacaacagctgactctggaaaagaaggattccgcccagggtacagaagatgcgccagataatagttcgctagaattgttggcagacacatccggccaggccgagaataaaagactgaagcgcggttcgccccgaattgaagaaatgcgagctctgcgatccgcgcgcgctccatcacctagcgaggccgcacccaggcgcccagaggcgactgccgctccgttgacaccccgtggccgcgagcatcgggaagcacatggtagggccttagctcctggaagggcatccctgggctcacgactcgaggatgtcctctggctgcaggaggtgtctaacctgagtgagtggctgtcaccaagccctggcccgtag

SEQ ID NO: 216163 - DNA, 1461 bp, Artificial Sequence
  derived and/or modified sequence
atggtggccagcgctggcagcctgtttggaggcatggtgctgaagaagttcctgaaggagatccagagcatcctgcccggcatcagcgccaagctgacctggaccagcgaggagggcagctacagccaggacatgactggagtgacccccttccagatgatctttgaggtggatgagaagcccaggaccctgatgacagactgcctggtgatcaagcacttcctgaggaagatcatcatggtgcaccccaaggtgcgcttccacttctctgtgaaggtgaatggcatcctgagcacagagatcttcggcgtggagaatgagcccaccctgaacctgggcaatggcatcgccctgctggtggacagccagcactacgtgtcccggcccaactttggcaccatcgagagccactgcagccgcatccaccctgtgctgggccaccctgtgatgctgttcatcccagaagatgtggccggcatggacctgctgggggagctgatcctgaccccagctgctgccctgtgccccagccccaaggtgagcagcaaccagctgaaccgcatcagctctgtgtccatcttcctgtatggccccctgggcctgcccctcatcctgagcacctgggagcagcccatgaccaccttcttcaaggacaccagcagcctggtggactggaagaagtaccacctgtgcatgatccccaacctggacctgaacctggaccgggacctggtgctgcctgatgtgtcctaccaggtggagagcagcgaggaggaccagagccagaccatggacccccagggccagaccctgctgctcttcctgtttgtggacttccacagcgccttccctgtgcagcagatggagatctggggcgtgtacaccctgctgaccacccacctgaatgccatcctggtggagagccacagcgtggtgcagggcagcatccagttcaccgtggacaaggtgctggagcagcaccaccaggccgccaaggctgctgacacccaggagttccgcaccaagctgcacaaggtgttccgggagatcacccagcaccagttcctgcaccactgcagctgtgaggtgaagcagcagctgaccctggagaagaaggacagcgcccagggcacagaagatgccccagacaacagcagcctggagctgctggccgacaccagcggccaggccgagaacaagaggctgaagaggggcagccccagaattgaggagatgagggccctgcggagcgcccgggcccccagccccagcgaggccgcccccaggaggcctgaggccacagctgcccccctgaccccccggggccgggagcaccgggaggcccacggccgggccctggcccctggccgggccagcctgggcagccggctggaggatgtgctgtggctgcaggaggtgagcaacctgtctgagtggctgagccccagccctggcccctag

SEQ ID NO: 216164 - DNA, 2034 bp, Artificial Sequence
  derived and/or modified sequence
atgggcagccgctgccgggcctgggcctggacccgggcctgggccctggccgagttccaggcccgggcagaggagggcgctgctgctgctgctgctgctgctgggggctaccccagcacaggccgctgccgctgcagcctgcggggcatggagggcacagctgtggccgtgtttgagatcctgcgcttcctgatcatccactggaagtgtgacattgatgtgtccaagggggccctgctggagggccagctggtgatcagcattgagggcctgaacagcaagcaccaggccaatgccctgcactgtgtgaccacccgctggagcctgaccctgctgcccaggcctgagtgcagcggggctgtgtctgcccactgcaacctgcacctgcccggcagcagtgacagccacgcctctgtgccccgggtggccggcatcacagatgcccaccaccacgcctggctgatcatggtggccagcgctggcagcctgtttggaggcatggtgctgaagaagttcctgaaggagatccagagcatcctgcccggcatcagcgccaagctgacctggaccagcgaggagggcagctacagccaggacatgactggagtgacccccttccagatgatctttgaggtggatgagaagcccaggaccctgatgacagactgcctggtgatcaagcacttcctgaggaagatcatcatggtgcaccccaaggtgcgcttccacttctctgtgaaggtgaatggcatcctgagcacagagatctttggagtggagaatgagcccaccctgaacctgggcaatggaattgccctgctggtggacagccagcactacgtgcggcccaactttggcaccatcgagagccactgcagccgcatccaccctgtgctgggccaccctgtgatgctgttcatcccagaagatgtggccggcatggacctgctgggggagctgatcctgaccccagctgctgccctgtgccccagccccaaggtgagcagcaaccagctgaaccgcatcagctctgtgtccatcttcctgtatggccccctgggcctgcccctcatcctgagcacctgggagcagcccatgaccaccttcttcaaggacaccagcagcctggtggactggaagaagtaccacctgtgcatgatccccaacctggacctgaacctggaccgggacctggtgctgcctgatgtgtcctaccaggtggagagcagcgaggaggaccagagccagaccatggacccccagggccagaccctgctgctcttcctgtttgtggacttccacagcgccttccctgtgcagcagatggagatctggggcgtgtacaccctgctgaccacccacctgaatgccatcctggtggagagccacagcgtggtgcagggcagcatccagttcaccgtggacaaggtgctggagcagcaccaccaggccgccaaggcccagcagaagctgcaggccagcctgtctgtggccgtgaacagcatcatgagcatcctgaccggcagcaccaggagcagcttcaggaagatgtgcctgcagaccctgcaggccgctgacacccaggagttccgcaccaagctgcacaaggtgttccgggagatcacccagcaccagttcctgcaccactgcagctgtgaggtgaagcagcagctgaccctggagaagaaggacagcgcccagggcacagaagatgccccagacaacagcagcctggagctgctggccgacaccagcggccaggccgagaacaagaggctgaagaggggcagcccccgcatcgaggagatgagggccctgcggagcgcccgggcccccagccccagcgaggccgccccccggcggcctgaggccacagctgcccccctgaccccccggggccgggagcaccgggaggcccacggccgggccctggcccctggccgggccagcctgggcagccggctggaggatgtgctgtggctgcaggaggtgagcaacctgtctgagtggctgagccccagccctggcccctag

SEQ ID NO: 216165 - DNA, 1461 bp, Artificial Sequence
  derived and/or modified sequence
atggtggccagcgccggcagcctgttcggcggcatggtgctgaagaagttcctcaaggaaatccagagcatccttccagggatctccgctaagctcacctggactagcgaggagggctcatactcacaggacatgacaggcgttacgccctttcagatgatctttgaggtggatgaaaagccgcgtacactcatgactgattgtctggttattaagcactttctgcgcaagatcattatggtgcatcccaaggtgcggtttcatttcagcgtgaaggtgaatgggatcctgtctactgagatctttggggtcgaaaatgagcccaccctcaacttgggcaatggcatcgctctgctcgtcgatagccaacactatgtatcaagacccaattttggcactatcgagagccactgttcccggatacaccccgtccttgggcatcctgttatgctgttcatccccgaagacgtcgccggaatggacctgctgggggagcttatcctgacacccgccgctgcactgtgccccagccccaaagtgtcgagtaaccagctgaacaggatttccagtgtatccattttcctgtacggacccctcggtctcccccttatactgtcaacatgggagcagccgatgacgacgttcttcaaagacacctcctctctggtggactggaagaaataccacctgtgcatgattccgaacttagatctcaacctagacagggacttggtcctgcctgacgttagctaccaggtcgagagcagcgaggaagaccagagccagacgatggatccgcaaggccagactttgctgttgtttctgttcgttgacttccacagcgccttccccgttcagcagatggagatatggggcgtttatacattactgactacccacctgaatgccatcttagtcgagtctcatagcgttgttcagggttcaatccagttcactgtggacaaggtgttggagcagcatcaccaagctgctaaggctgctgacacacaggaattccgcacgaagctccacaaagtgtttagagagatcacacagcaccagtttctgcaccattgttcctgtgaggtcaaacagcagttgacactcgagaagaaagacagcgcccagggcactgaggatgcgcccgacaattcttccctggaattacttgccgatacatctggccaggcggagaacaagaggctgaaacgcggaagtccccgaatcgaggagatgcgtgcgctcaggtcagcccgggccccctcccctagtgaagcggcacctcggaggcctgaggctacggccgctccgttaactcctcgggggcgggagcatcgtgaggcccacgggagggcactggctccagggcgggctagcctggggtctcgcctggaggatgtgctgtggctgcaggaagtgagcaacctcagcgagtggctgagcccgtctccaggcccctag

SEQ ID NO: 216166 - DNA, 2034 bp, Artificial Sequence
  derived and/or modified sequence
atgggcagccggtgccgggcctgggcctggacccgggcctgggccctcgctgaattccaggctcgagctgaggagggtgctgcagccgccgcggcagcagccggcgggtacccgtctacaggccgctgcagatgttctctgcgcggaatggagggcacagccgtcgcagtctttgagatactcaggttcctcatcatccactggaaatgtgatattgatgtgtctaagggggctctattagaagggcagctggttatctccatagaaggactgaacagcaagcaccaggctaatgccctgcactgcgtcactactagatggtccttaacacttctccctcgcccagagtgttctggcgcggtaagtgcccattgcaacctgcaccttccaggctcatctgacagccacgcttctgttcctcgggtcgcagggattacagacgcccatcatcacgcatggttgattatggttgcttccgcagggtccctttttgggggaatggtccttaaaaaatttcttaaggagatccagtcaatcctgcccgggatcagcgctaagctgacgtggacttctgaggaaggctcctattcccaggatatgactggggtgactccctttcagatgatttttgaagttgacgaaaagcctcgaacattgatgacagactgtctagtgatcaagcattttcttcgcaaaatcataatggttcaccccaaagtcaggttccacttctcagttaaggtaaatgggattctgtcaacagagatttttggagtggaaaatgagccaacccttaacctcgggaatggtatcgctctattggtcgatagccaacattatgttagaccaaatttcgggaccatcgaatcccattgctcaaggatacaccccgttcttggccacccggtgatgctgttcatccctgaagacgtggccggaatggatctcctgggcgagttaattctgacccctgcggctgccttgtgcccctcccccaaggtctcctctaaccagctgaaccgaatctcatcagtcagcatatttctgtatggtcccctgggtctgcccctgatactttccacatgggagcagccaatgacgactttttttaaggatacttccagtctggtcgactggaaaaagtaccatctatgtatgatccctaacctggacctaaacctggaccgcgatctggtcctgccagatgtctcatatcaagtcgagtcctccgaggaagaccagtctcagacgatggatccccaggggcagacactgctgttgtttttgttcgtggactttcactctgcctttccggtgcagcagatggaaatttggggtgtttacacactgttaaccacccatcttaacgccatcctagtagaatctcattcagtggtgcaggggtccatccaattcacagtcgataaggtgctcgagcagcaccaccaggcagccaaggcacagcagaagttacaggcgagcctcagcgtcgccgtcaattcgatcatgtcaatcttgactggctctacacggtcttcatttcgaaagatgtgcctgcagactctgcaggccgctgacactcaggaattcaggactaagctgcacaaggtctttcgagagattacacaacaccagttcctgcatcactgctcatgtgaggtcaagcagcaattaaccctggagaaaaaagacagcgctcagggcaccgaggacgcgcctgataatagctcactggagcttctagccgatactagtggtcaggccgagaacaagcgactgaaaagaggatctccacgaatcgaggaaatgcgagccctgagaagtgcaagagcccctagcccttccgaggcagccccgcggcgtcccgaggctactgctgccccccttacaccccggggtcgggagcatcgggaagcccacggaagggcgctggcccccggtcgcgcgtccctcggttctcggctggaagatgtgctgtggctgcaggaagtaagcaatctaagcgaatggttgtctccttctcccgggccatag

SEQ ID NO: 216167 - DNA, 1461 bp, Artificial Sequence
  derived and/or modified sequence
atggtggcatcagctggcagcctctttggcggaatggtgcttaagaagtttctaaaggagatccagtccatcctgcccggaatttccgcaaagctaacctggacaagtgaggagggctcgtactctcaggatatgaccggggtgaccccttttcagatgattttcgaggtggatgagaaaccacgaaccctgatgaccgactgtctggtgataaaacattttttaagaaagattattatggtgcaccccaaggtccgtttccatttttcagtgaaagtcaacgggatccttagcacagagattttcggcgtcgaaaacgagcccaccctgaacctgggtaatggtattgccctgttggtggacagccagcattatgtgtccagaccaaatttcggaacgattgaaagccactgttcgaggatacacccagtgctcggacacccagttatgctgtttatcccggaagacgtcgctggaatggacctgctgggcgaactgattctgacacccgcagcagccctgtgtcccagcccgaaggtttcctccaaccaactgaataggatatcaagtgtttcaatcttcttgtacggacccctcgggctcccccttattctgagcacctgggaacagccaatgacaacgtttttcaaggatactagctcactcgtcgactggaaaaagtaccacctgtgcatgatccccaacctggatcttaacctggatcgggacctcgtccttccagacgtctcataccaggtggagagcagcgaagaagaccagagtcagaccatggatccccagggtcaaacgctccttctgtttctgtttgttgattttcacagcgcattccctgtacagcagatggagatctggggggtttacacccttttaactacacaccttaatgcaatactcgtggagtcgcacagcgtcgtacagggaagtatccagttcactgtggacaaagtcttggagcagcaccatcaggcagcaaaagccgctgacacacaggagtttcggaccaagctccacaaggtgttcagagagatcacacagcaccagtttcttcatcactgctcttgcgaggtgaaacagcagcttacactcgagaagaaggattcggcacaagggacggaagacgcgcctgataatagcagcctggagctattggccgacactagcggccaagcggagaacaaaagactgaaaaggggcagtcctaggatcgaagaaatgcgggctctgaggagtgccagggccccaagtcctagcgaggcggctccacggaggccggaggccacagcagccccacttactcccagggggcgagagcatcgcgaggcacatggtagagcattggcccctggtagagcttccctgggaagcaggctggaagatgttctctggctacaggaagtttcaaatctatcagagtggctcagccccagccctggcccttag

SEQ ID NO: 216168 - DNA, 2034 bp, Artificial Sequence
  derived and/or modified sequence
atggggtcccgatgtcgtgcttgggcatggactcgcgcttgggcactggccgagttccaagcacgagcggaggaaggcgctgcagctgccgctgccgcagccggtggctacccttccacgggtcgttgccgctgtagcctgcgtggaatggagggcacagccgtggcggtatttgagatcctgaggtttctgattatacactggaagtgcgacattgacgtgtccaagggcgctctgctcgaggggcagctggtaataagtattgaaggcctgaattctaaacatcaggcgaatgctttgcattgtgtgacgaccaggtggtccctcacactgctacctaggcccgagtgcagcggcgcagtcagtgcacactgcaacttacatttgcctggtagcagcgacagccacgcgtctgtgccacgagtcgccggaatcacagacgcacatcaccatgcctggttaatcatggtggctagtgcaggttcgctattcggcggtatggtgctcaaaaaattcctgaaggagatacagtcaatcttaccaggtatcagcgcaaagttgacttggacttcggaagaaggaagctacagccaggatatgacaggcgtaaccccatttcagatgattttcgaagtcgacgagaagcccaggaccctgatgactgattgtctagtgattaaacactttctccgtaagattatcatggtgcacccaaaagtgagattccacttctccgtgaaggttaatggaattctctcaactgaaattttcggcgtggaaaatgaacctaccctgaacctcggaaatggcatagctttgctggtggactcccagcactacgttcgtcccaacttcggaaccatcgagtctcactgctcgagaatccaccccgtgctcgggcatccagtaatgctcttcattcccgaggacgttgccggtatggaccttctgggtgagcttatcctcactcctgccgctgctttgtgtccgagccctaaggttagctcaaatcagttgaatagaatttcctccgtctctattttcctctatggacccctgggtctcccattgattctgagcacctgggagcaaccgatgaccactttcttcaaagataccagcagcctcgtagattggaaaaagtaccacctctgcatgattcccaatctggatctcaatcttgatcgcgacctggtactaccagatgtgagttaccaagttgagagctccgaggaggatcagtcccagacaatggatccccaggggcagaccctgctgctgttcctcttcgtggactttcactccgccttccctgtccagcagatggaaatctggggtgtgtacaccctgttgaccacccacctgaacgcgattcttgtcgagagtcattccgtggtgcaagggtcgatccaatttacagtggacaaggtactggaacaacatcatcaggcggcaaaagcgcaacaaaagctacaagcgtccctgtcagtggctgtaaactccatcatgtcaattttgactggctccaccaggtcctctttccgaaagatgtgtctccagacactacaggccgctgatacacaagagttcaggaccaagttgcacaaagtgttccgagaaatcacacagcaccaatttctacaccactgttcctgtgaagtcaaacagcaactcaccctcgaaaagaaagacagcgcgcaggggaccgaggatgctcccgataactcatcattggagctactcgccgacacctcagggcaagcggaaaacaagaggctcaaaagagggtcacctcgtatcgaggaaatgagggctttgcggagtgctagggcaccctcccccagcgaggctgcaccccgtcgccctgaggcaaccgccgctcctcttaccccacggggaagggagcatcgggaagcacatggcagggctctcgctccgggaagagcttcactggggtctaggctcgaggacgtcctgtggctacaggaggtctctaacctgagcgagtggctgagtccttccccaggtccctag

SEQ ID NO: 216169 - protein, 373 aa, Artificial Sequence
  derived and/or modified sequence
MSILIIEAFYGGSHKQLVDLLQEELGDCVVYTLPAKKWHWRARTSALYFSQTIPISEHYRTLFASSVLNLTELAALRPDLGKLKKILYFHENQLIYPVKKCQERDFQYGYNQILSCLVADVVVFNSVFNMESFLTSMGKFMKLIPDHRPKDLESIIRPKCQVIYFPIRFPDVSRFMPKHKTTHLKKMLGLKGNGGAVLSMALPFQPEQRDSEDLLKNFNSECDTHCGLDTARQEYLGNSLRQESDLKKSTSSDNSSSHHGENKQNLTVDPCDILGGVDNQQRLLHIVWPHRWLEAVYCGCYPLCPKDLVYPEIFPAEYLYSTPEQLSKRLQNFCKRPDIIRKHLYKGEIAPFSWAALHGKFRSLLTTEPREDL

SEQ ID NO: 216170 - DNA, 1122 bp, Artificial Sequence
  derived and/or modified sequence
atgagcattttgattatagaggcgttctacggcggcagccataagcagctggttgatcttctgcaggaggaactcggagattgcgtcgtgtatacacttcctgccaaaaagtggcactggcgggcccggacaagtgctctctatttttcacagactattccaatctccgagcactacagaacacttttcgccagctcagtcttgaatttgaccgagctggccgccctcaggccagacctcgggaaacttaaaaaaatactgtacttccatgaaaaccagctaatttatcccgtgaaaaaatgccaagagcgcgactttcagtacggctacaatcagatcttatcttgcctagtggcagatgtagtggtattcaacagtgtgttcaatatggagtcatttctcaccagtatggggaagtttatgaagctgattcctgatcaccgaccaaaagacctggagtcgataattcgaccaaaatgccaggttatttatttccctatccgctttccagatgtaagcaggtttatgccaaaacacaagacgactcacctgaagaaaatgctcggcctaaaggggaacggaggagccgtgctttccatggccttgcccttccagcctgagcagagagacagcgaagatctgctcaaaaatttcaactctgaatgcgatactcactgcggtttagatacagcgcggcaggagtatctggggaatagtctgcggcaggaatcagatctcaaaaaaagcacctcatccgacaactcaagttcccaccacggagagaacaaacaaaatctcacggtggacccttgcgatatcttgggtggggtggataaccagcagcgccttctgcacatcgtgtggccacatcgctggctggaggctgtgtattgtggctgctatccactgtgccccaaagacttagtctatcctgagatcttccccgctgaatatttgtacagtacccctgaacagctctcgaagcgcctgcagaacttctgtaagcgccccgacattatcaggaagcacctgtataagggggagatagcgcctttctcctgggctgcgctccatggcaaattcaggtccctgttgacaaccgaaccaagggaagacctctag

SEQ ID NO: 216171 - DNA, 1122 bp, Artificial Sequence
  derived and/or modified sequence
atgtcaatattgataatcgaagccttctatgggggctcccacaagcagctggtggatctactgcaggaagagctgggcgactgtgtggtgtacaccctgccggctaaaaagtggcactggcgcgcccgcacctccgcgctgtactttagtcagaccataccgatttccgaacactacagaaccctgttcgccagcagtgtgcttaacctgacagagttggctgcgctgaggcccgatctcggtaagctcaagaaaatcctgtactttcatgagaaccagcttatctacccagtgaagaagtgccaggagcgggattttcagtatggctataaccagatcttgtcttgtctggtggcggacgtagtagtgttcaacagtgtctttaatatggagagcttcctgacctccatgggcaaattcatgaagcttatacctgatcataggcccaaggacctcgagagcatcatccgtcccaagtgtcaggtgatttatttcccgataaggttcccagacgtaagccgattcatgccaaaacacaaaacaacccacctgaagaaaatgttgggcctaaagggcaatggcggcgccgtcctgtctatggcgctccctttccagcccgagcagcgtgatagtgaggacttactaaaaaacttcaacagcgagtgcgacacacattgtggactggacactgcccggcaagaatacctgggcaactctctcagacaggagtccgatcttaagaagagcacctcctctgataactcaagctcccaccacggtgagaataagcagaatttaacagttgatccatgtgatattctgggtggggttgataaccaacagaggttgctgcacattgtttggcctcatcgctggctggaggcggtgtattgcgggtgctatccattgtgccctaaggaccttgtttatcccgaaatcttcccggcagagtacctgtactctacaccagagcagctttcaaagagactccagaatttttgtaaacggccagacattatacgtaagcacctgtacaaaggggaaatcgctccattctcctgggctgccctccacgggaaatttcgatctctgctgactactgaaccccgcgaggacctgtag

SEQ ID NO: 216172 - DNA, 2404 bp, Artificial Sequence
  derived and/or modified sequence
gggcacggcgtcagcgcgtcgccggctgggccgcgccggtggccaggagggagagacaaggaggaggaggaggaggaggtatctctgcattagccagattggacatatgtaaagggacatcagtatatctggatcatcaggaatcatctttcttccagattgtgcttcaagaagaccatagggaagaacgcattttcatcttgctgcaaaagttgcaatagaagatctgaaggtttgaatgggccaatgagtatcctcatcattgaagcattctatggaggctcccataaacagctggtggatcttcttcaagaagagttaggagactgtgtcgtttatacccttcctgcaaagaaatggcattggagagcccggacatctgctttatatttctctcagaccattcccatcagtgagcattacaggaccctctttgcaagttcagtgcttaacctgaccgaactggctgcccttcggcctgaccttgggaaactgaaaaagattctgtattttcacgagaaccagttgatatatcctgtcaagaaatgtcaggagagggatttccaatatggatacaaccaaattctttcatgcctggtggctgatgtggttgtattcaactcagtttttaatatggaatcatttctcacttccatgggaaaatttatgaagctgattcctgatcacagacccaaggatctggaaagcatcatcagacccaagtgccaagttatttactttcccatcaggtttcctgatgtgagcagattcatgcccaagcacaaaacaacccatttaaagaagatgctcggccttaaaggaaatggcggtgcggttctgtccatggcccttccttttcagccagagcagagagattcagaggatttattgaagaattttaattcagagtgtgatacacactgtggccttgatactgcacgacaagaatatttgggtaactcattaagacaggaatcagacttgaaaaaatccacctcgtcagataattcaagctctcatcatggtgaaaataaacaaaatctgactgttgatccctgtgacattttgggtggagttgataatcagcaaagactgctacacattgtctggcctcacaggtggttggaagctgtgtactgtgggtgttacccactttgtcctaaagatttggtttatcccgaaatatttccagctgaatatctgtattctacacctgaacagctttcaaaaaggctccagaatttctgcaagagaccagatattataagaaaacatctctataagggtgaaatcgctccgttttcttgggcagccctacatggtaaattcaggtctctgcttacaacagaacctagggaagatttgtgacagatggggctaagtcacaaacttgcagcctaaggcagaatctgaagaactttccagagtgtgcccatatttacctgatcagagagaaaagaaaatctgcagaggaagctgagcctggctgcttgtcatagctgacacagagccatctgccacaaacctgtggcggcttcagatctccaatccctgccaccaccccaactcaaattaaatacagattcctagagacgttatgatggttacacatgtcctcggcatcacatgtaggagactgttcaaaaaaaatatgtggcctgttgtataaccgcactcatgtatcccatatgtggtgccacattgaatttccggttgaatccgtttttatcctttgtactggatgacatggtgcctgaattctttcttttcgccgacacgatggcagccaaactgcagcttcaaacgctcacacttggctgggtttctacctaggttgccaggttatcatcggagccttcttgtgtcctcaaagggccacgaggcctgaaaggaggatcagaatgctttgggattaattgggcagccatcgcagaattgtttgtgggcaaagggctgctttagcacttttcttttagcaaattaatgactctcaggcacagggggttttaagtgaaggtattaataagaggtctggcaggtattcccatgattcacagagttacatttgcatttaattaatcttaaagttgcaagataaacagctgtaattcggacaaacatgacaaacacagtgaagccaactatcccataaaatgaacactgacatacttgttttaatttttttcccagcgtaaaaatagaaaaatcaaaatactcctaacaaaaccagtgattttgatagaaatatttctccaatatacttgcatccacctacaaatataaccttttcaagataaatcgcttatgatttcaatagtcaaactgctgtgtttgttgatgtaaagatgttttgaatggctagatggtaaaataaattcttaataaagtacccactgcaattttt

SEQ ID NO: 216173 - DNA, 2408 bp, Artificial Sequence
  derived and/or modified sequence
aggtctggctagctgtccctaacgtcatttcctggtctcaactctttaagaccctgacatactctgagattggagtgaagatttctgtgacatgctgggtatctctgcattagccagattggacatatgtaaagggacatcagtatatctggatcatcagattgtgcttcaagaagaccatagggaagaacgcattttcatcttgctgcaaaagttgcaatagaagatctgaaggtttgaatgggccaatgagtatcctcatcattgaagcattctatggaggctcccataaacagctggtggatcttcttcaagaagagttaggagactgtgtcgtttatacccttcctgcaaagaaatggcattggagagcccggacatctgctttatatttctctcagaccattcccatcagtgagcattacaggaccctctttgcaagttcagtgcttaacctgaccgaactggctgcccttcggcctgaccttgggaaactgaaaaagattctgtattttcacgagaaccagttgatatatcctgtcaagaaatgtcaggagagggatttccaatatggatacaaccaaattctttcatgcctggtggctgatgtggttgtattcaactcagtttttaatatggaatcatttctcacttccatgggaaaatttatgaagctgattcctgatcacagacccaaggatctggaaagcatcatcagacccaagtgccaagttatttactttcccatcaggtttcctgatgtgagcagattcatgcccaagcacaaaacaacccatttaaagaagatgctcggccttaaaggaaatggcggtgcggttctgtccatggcccttccttttcagccagagcagagagattcagaggatttattgaagaattttaattcagagtgtgatacacactgtggccttgatactgcacgacaagaatatttgggtaactcattaagacaggaatcagacttgaaaaaatccacctcgtcagataattcaagctctcatcatggtgaaaataaacaaaatctgactgttgatccctgtgacattttgggtggagttgataatcagcaaagactgctacacattgtctggcctcacaggtggttggaagctgtgtactgtgggtgttacccactttgtcctaaagatttggtttatcccgaaatatttccagctgaatatctgtattctacacctgaacagctttcaaaaaggctccagaatttctgcaagagaccagatattataagaaaacatctctataagggtgaaatcgctccgttttcttgggcagccctacatggtaaattcaggtctctgcttacaacagaacctagggaagatttgtgacagatggggctaagtcacaaacttgcagcctaaggcagaatctgaagaactttccagagtgtgcccatatttacctgatcagagagaaaagaaaatctgcagaggaagctgagcctggctgcttgtcatagctgacacagagccatctgccacaaacctgtggcggcttcagatctccaatccctgccaccaccccaactcaaattaaatacagattcctagagacgttatgatggttacacatgtcctcggcatcacatgtaggagactgttcaaaaaaaatatgtggcctgttgtataaccgcactcatgtatcccatatgtggtgccacattgaatttccggttgaatccgtttttatcctttgtactggatgacatggtgcctgaattctttcttttcgccgacacgatggcagccaaactgcagcttcaaacgctcacacttggctgggtttctacctaggttgccaggttatcatcggagccttcttgtgtcctcaaagggccacgaggcctgaaaggaggatcagaatgctttgggattaattgggcagccatcgcagaattgtttgtgggcaaagggctgctttagcacttttcttttagcaaattaatgactctcaggcacagggggttttaagtgaaggtattaataagaggtctggcaggtattcccatgattcacagagttacatttgcatttaattaatcttaaagttgcaagataaacagctgtaattcggacaaacatgacaaacacagtgaagccaactatcccataaaatgaacactgacatacttgttttaatttttttcccagcgtaaaaatagaaaaatcaaaatactcctaacaaaaccagtgattttgatagaaatatttctccaatatacttgcatccacctacaaatataaccttttcaagataaatcgcttatgatttcaatagtcaaactgctgtgtttgttgatgtaaagatgttttgaatggctagatggtaaaataaattcttaataaagtacccactgcaatttttaa

SEQ ID NO: 216174 - DNA, 1122 bp, Artificial Sequence
  derived and/or modified sequence
atgagcatcctgatcatcgaggccttctacggcggcagccacaagcagctggtggacctgctgcaggaggagctgggggactgtgtggtgtacaccctgcctgccaagaagtggcactggagggcccggaccagcgccctgtacttcagccagaccatccccatcagcgagcactaccgcaccctgtttgccagctctgtgctgaacctgacagagctggccgccctgcggccagacctgggcaagctgaagaagatcctgtacttccacgagaaccagctgatctaccctgtgaagaagtgccaggagcgggacttccagtatggctacaaccagatcctgagctgcctggtggctgatgtggtggtgttcaacagcgtcttcaacatggagagcttcctgacctccatgggcaagttcatgaagctgatcccagaccaccggcccaaggacctggagagcatcatccggcccaagtgccaggtgatctacttccccatccgcttcccagatgtgagccgcttcatgcccaagcacaagaccacccacctgaagaagatgctgggcctgaagggaaatggaggagctgtgctgtccatggccctgcccttccagcctgagcagagggacagcgaggacctgctgaagaacttcaacagtgaatgtgacacccactgcggcctggacacagcccggcaggagtacctgggcaacagcctgcggcaggagagtgacctgaagaagagcaccagcagtgacaacagcagcagccaccacggggagaacaagcagaacctgactgtggacccctgtgacatcctgggcggcgtggacaaccagcagaggctgctgcacatcgtgtggccccaccgctggctggaggccgtgtactgcggctgctaccccctgtgccccaaggacctggtgtacccagagatcttccctgctgagtacctgtacagcaccccagagcagctgagcaagaggctgcagaacttctgcaagaggccagacatcatcaggaagcacctgtacaagggggagatcgcccccttctcctgggccgccctgcacggcaagttccgcagcctgctgaccacagagccccgggaggacctgtag

SEQ ID NO: 216175 - DNA, 1122 bp, Artificial Sequence
  derived and/or modified sequence
atgagcatcctgatcatcgaggccttctacggcggcagccacaagcaactggtggacctccttcaggaggaattgggagattgcgtggtgtataccttgccagccaagaaatggcactggagggcaagaaccagcgctctctacttcagtcaaactattccaatatccgagcactaccggaccttgttcgctagctctgtgctgaatttgacagaactggccgctctgaggcctgatcttgggaaattgaagaagattctatatttccacgagaaccagctgatctatcctgtgaagaagtgccaggagcgcgacttccagtatggatataaccagatcctatcctgcctcgtggctgatgtggttgttttcaattccgtgtttaatatggaatcttttctcacatctatgggtaaatttatgaagctgatccccgatcaccgtcctaaggacctggagtctatcattaggcctaagtgccaagtgatttatttccccatacggtttccagatgtttccagattcatgccaaagcacaaaacaacccacctgaaaaaaatgctgggactcaagggcaacggcggcgcggtgctgagcatggcgttgccctttcaacccgaacagcgagactcagaagacctgctcaaaaactttaacagtgaatgtgatacccactgcgggttagatacagcgcggcaggagtatctagggaactccttgcgccaagagagcgacctgaagaagtcaaccagtagcgacaacagctccagccaccacggggaaaacaaacagaatctgacagtggacccatgtgatatcctgggaggagtcgacaatcagcaaagactgcttcatattgtgtggccccacaggtggttagaggctgtatactgcggctgctatccgttgtgtcctaaggatctggtctaccccgaaatctttcccgcggaatacctctactcgactccagagcagctcagcaaacgtttgcagaatttttgcaagcgacccgacatcatcagaaagcatctctacaaaggcgaaatcgcccccttctcctgggcagccctgcacgggaagtttcgttcccttctgaccacagaaccacgcgaggacctctag

SEQ ID NO: 216176 - DNA, 1122 bp, Artificial Sequence
  derived and/or modified sequence
atgagcatcctgatcatcgaggccttctacggcggcagccacaagcagctggtggacctcttgcaggaagaattgggcgactgtgtggtatatacacttccagccaagaagtggcattggagggctcgcacgtctgccctgtatttcagtcagactatacctattagtgagcactaccggacactgtttgctagtagtgtgctcaatctgactgagctggccgcactgagaccagacttgggcaaattaaaaaaaatcctgtatttccatgagaaccagctgatatatccagttaagaagtgtcaggagagagatttccagtacggttacaaccaaattctttcttgcctggtggccgatgtcgtcgtcttcaattctgtatttaatatggaaagctttttaacgagtatgggcaaatttatgaaactcatacccgaccataggcctaaagatttggaatcgatcatcagaccgaaatgccaggtgatatatttccctatccggtttccagatgtttcccgattcatgcccaagcataagacaacacatctgaaaaagatgctcgggttgaaagggaacgggggtgcagtgttatcgatggctctacctttccagcccgaacagagagattctgaggatctgcttaagaatttcaacagcgagtgcgatacccactgcgggctggatactgcacgccaggaatacctcggaaactcactccgacaagaaagcgaccttaaaaaaagcaccagcagcgataattcatcctctcaccatggggaaaacaaacagaatctcacagttgacccctgcgacatcctgggcggggtggacaatcaacagcgcttgcttcatatcgtctggccgcacaggtggctggaagccgtctattgtggctgctacccactctgcccgaaggatctcgtttacccagaaattttccccgctgagtatctttattctactcctgaacagttaagtaagagattgcagaacttctgtaagcgcccagacatcattcggaaacacctttataagggcgagatagcaccgttttcctgggctgcactgcatgggaagtttagatcactgcttacaaccgagcctagggaggacttatag

SEQ ID NO: 216177 - DNA, 1122 bp, Artificial Sequence
  derived and/or modified sequence
atgtccatcctgatcatcgaggcattttacggtgggtctcacaagcagctggtggacctgttacaagaggagttaggagactgcgtagtgtacacactacctgcaaagaaatggcactggcgggctcggacaagcgccttatacttttctcagaccattcccatcagtgaacattatcgcaccctcttcgcttcttccgtgttgaatctgaccgagctggccgctctgagaccagacctggggaagctcaagaaaatactttacttccacgaaaaccagctgatttaccctgtcaaaaagtgccaggaacgggacttccagtacggatataaccaaatactgtcctgtttagtcgccgatgtggttgtgtttaactccgtgtttaacatggagtctttcctgactagcatgggtaaatttatgaagcttatccccgatcaccggcctaaagatctggagagcatcattaggccgaagtgtcaggtcatctacttcccaattcgttttcccgacgtatcccggttcatgcccaagcataagacaactcacttaaagaaaatgctcggactaaagggtaacggaggagctgtcctttccatggcactgccattccagcctgagcaaagggactccgaggatttgctcaaaaactttaattccgagtgtgacacccattgtggtctcgacaccgccagacaggagtacttggggaactctctccgacaagaatcagacctgaaaaagtctacttcttcagataactcctcatctcaccatggtgaaaacaagcagaatttgaccgtggacccttgtgacattctcggcggagtcgataaccagcaaagattgctgcacatagtgtggccacaccggtggctggaggccgtgtattgcgggtgttatcccctatgtccaaaagatttggtgtatccggagatttttccagctgagtacctctatagcactcccgagcaactctctaaacgcttgcaaaatttttgcaaacgcccagacataattcgcaagcacctctataaaggggagattgcccctttttcatgggccgcactgcatggaaagtttcgtagcctcctgacaactgagccccgtgaagatctgtag

SEQ ID NO: 216178 - DNA, 1122 bp, Artificial Sequence
  derived and/or modified sequence
atgagcattcttatcatagaggccttctacggcggtagccataagcaattggtcgatctacttcaggaggagctgggcgattgcgtcgtttatacacttcccgctaagaagtggcactggcgcgctaggactagcgcactttatttctcccagaccatacccatcagtgagcattaccgcacattatttgcatcatccgtgctgaatctcactgagctggctgctcttcgtcccgacctcggcaagctcaagaagatactgtattttcacgaaaatcagctgatctatcccgtgaaaaaatgtcaggaacgcgactttcagtatggctacaaccagattctgtcatgtctggtggccgatgttgtagtgtttaattcagtgtttaacatggaaagttttctcaccagtatgggaaaatttatgaagttaattcccgaccaccgcccaaaggacctggaaagcattattcgccctaaatgtcaggtcatctattttcctattagattccccgatgtctcccgatttatgcccaaacacaaaacgacgcatcttaaaaagatgttaggattgaaagggaacggcggtgctgtgctttctatggcactgccattccaacctgagcaacgcgattcggaggatctactgaagaactttaacagtgaatgtgatacacattgcgggctcgacactgccagacaggagtatttggggaattctcttaggcaggagagcgatctcaaaaaatccacatccagcgataactcgtccagccatcacggtgaaaataagcaaaatctcacagttgatccttgtgatatcctgggaggggtcgacaatcagcagcgcctgctgcatattgtctggcctcaccgctggctcgaagcagtgtactgcggctgctacccactctgcccaaaggatctggtgtatcccgaaatattcccagctgagtacttgtacagcacacctgaacagcttagtaagcgactgcaaaatttttgtaagcgtcccgacattattcggaagcacctgtacaaaggcgagatcgcacccttttcctgggctgcactgcacggcaaatttcgatctctgctgaccaccgagccccgtgaggacctgtag

SEQ ID NO: 216179 - DNA, 1122 bp, Artificial Sequence
  derived and/or modified sequence
atgagcatcctgatcatcgaggccttctacggcggcagccacaagcagctggtggacctgctgcaggaggagctgggcgactgcgtggtgtacaccctgcccgccaagaagtggcactggagagccagaaccagcgccctgtacttcagccagaccatccccatcagcgagcactacagaaccctgttcgccagcagcgtgctgaacctgaccgagctggccgccctgagacccgacctgggcaagctgaagaagatcctgtacttccacgagaaccagctgatctaccccgtgaagaagtgccaggagagagacttccagtacggctacaaccagatcctgagctgcctggtggccgacgtggtggtgttcaacagcgtgttcaacatggagagcttcctgaccagcatgggcaagttcatgaagctgatccccgaccacagacccaaggacctggagagcatcatcagacccaagtgccaggtgatctacttccccatcagattccccgacgtgagcagattcatgcccaagcacaagaccacccacctgaagaagatgctgggcctgaagggcaacggcggcgccgtgctgagcatggccctgcccttccagcccgagcagagagacagcgaggacctgctgaagaacttcaacagcgagtgcgacacccactgcggcctggacaccgccagacaggagtacctgggcaacagcctgagacaggagagcgacctgaagaagagcaccagcagcgacaacagcagcagccaccacggcgagaacaagcagaacctgaccgtggacccctgcgacatcctgggcggcgtggacaaccagcagagactgctgcacatcgtgtggccccacagatggctggaggccgtgtactgcggctgctaccccctgtgccccaaggacctggtgtaccccgagatcttccccgccgagtacctgtacagcacccccgagcagctgagcaagagactgcagaacttctgcaagagacccgacatcatcagaaagcacctgtacaagggcgagatcgcccccttcagctgggccgccctgcacggcaagttcagaagcctgctgaccaccgagcccagagaggacctgtag

SEQ ID NO: 216180 - protein, 355 aa, Artificial Sequence
  derived and/or modified sequence
MGPGRCLLTALLLLALAPPPEASQYCGRLEYWNPDNKCCSSCLQRFGPPPCPDYEFRENCGLNDHGDFVTPPFRKCSSGQCNPDGAELCSPCGGGAVTPTPAAGGGRTPWRCRERPVPAKGHCPLTPGNPGAPSSQERSSPASSIAWRTPEPVPQQAWPNFLPLVVLVLLLTLAVIAILLFILLWHLCWPKEKADPYPYPGLVCGVPNTHTPSSSHLSSPGALETGDTWKEASLLPLLSRELSSLASQPLSRLLDELEVLEELIVLLDPEPGPGGGMAHGTTRHLAARYGLPAAWSTFAYSLRPSRSPLRALIEMVVAREPSASLGQLGTHLAQLGRADALRVLSKLGSSGVCWA

SEQ ID NO: 216181 - protein, 167 aa, Artificial Sequence
  derived and/or modified sequence
MGPGRCLLTALLLLALAPPPEASQYCGRLEYWNPDNKCCSSCLQRFGPPPCPELSSLASQPLSRLLDELEVLEELIVLLDPEPGPGGGMAHGTTRHLAARYGLPAAWSTFAYSLRPSRSPLRALIEMVVAREPSASLGQLGTHLAQLGRADALRVLSKLGSSGVCWA

SEQ ID NO: 216182 - DNA, 1068 bp, Artificial Sequence
  derived and/or modified sequence
atgggccccggacgctgcctgctgaccgcgctcctactgctggcactggctccaccacctgaggcatcacaatattgtggcagattagagtactggaatcctgacaacaaatgctgcagtagttgtctgcagcggtttgggccccccccatgcccagattatgaatttagggaaaactgcggtctcaacgaccacggcgactttgttacaccacccttccggaagtgttcctcaggccagtgcaaccctgatggagctgaactctgttccccctgcggtggcggtgccgtgacacccactcctgctgccgggggcggaaggaccccttggaggtgccgcgaaaggcccgttcccgccaaaggccattgccccctgactcccggcaatcccggagccccgagcagccaggaacggagttctcctgcatcctccatcgcatggcgaaccccagaaccagtcccccaacaagcctggccaaacttcttgcccttggtggtgttggttctactgcttactttggcagtgatcgctattcttctctttattctgctgtggcatctgtgctggccaaaggagaaagctgacccctacccatatccaggactcgtttgtggagttcccaatacacacacaccatcttcttcccatctgagctcacccggcgcgctggaaacgggggatacatggaaggaagcatccctgctgcccctgctgtcacgggagcttagcagcctggcatcccagcctctgtctcgtttgttggacgaactcgaggtccttgaagaactgattgtgctgctcgatcctgagccaggacctggtggcggtatggctcatggcaccactagacaccttgccgcacgttacggcttaccggcagcctggagcactttcgcctactccctgcggccgtcacgttcccccttacgagcacttatcgagatggttgtcgccagagagccgtccgcttctctaggccaactgggaacccacctggcccagctgggtcgtgccgacgctttgcgggttttgagtaagcttgggtctagtggcgtgtgctgggcttag

SEQ ID NO: 216183 - DNA, 504 bp, Artificial Sequence
  derived and/or modified sequence
atggggccaggacgatgcttgcttacagccctgctgctgttagctctagccccacctccagaggcatctcagtactgcggaagattggagtattggaacccagataataagtgttgcagctcttgtttacaaagattcggccctccgccttgtcctgaactgagttccttggcttcacaaccactgtcgcggcttcttgacgaactcgaggtcctggaggagttgatcgttctgctcgacccggagcccgggccaggaggggggatggcccatggaacaaccaggcacctggccgctcgctacggcctgcccgcagcctggtcaaccttcgcttatagcttacggccctcgcggtcccccctcagggctctgattgagatggtggtggctcgtgaaccatctgcaagtctcgggcaactgggtacccatctggcccagttgggccgggcagacgctctcagagtactttcaaagctcggatcatcaggcgtgtgttgggcttag

SEQ ID NO: 216184 - DNA, 1194 bp, Artificial Sequence
  derived and/or modified sequence
cacaacttcagctgaggaacttggcacggccagcttgggacccaggaccctaacgcagaggcgctgtgtttggaagtcccgctatcacggccccccagatggggcctggacgatgcctcctgacggccttgttgcttctggccctggcgccaccgccggaagcctcccagtactgcggccgccttgaatactggaacccagacaacaagtgctgcagcagctgcctgcaacgcttcgggccgcccccctgcccggactatgagttccgggaaaactgcggactcaatgaccacggcgatttcgtaacgcccccgttccgaaagtgttcttctgggcagtgcaaccccgacggcgcggagctatgtagcccctgcggcggcggagccgtgacccctactcccgccgcgggcgggggcagaaccccgtggcgctgcagagagaggccggtccctgccaaggggcactgccccctcacacctggaaacccaggcgcccctagctcccaggagcgcagctcaccagcaagttccattgcctggaggacccctgagcctgtccctcagcaggcctggccgaatttccttccgctcgtggtgctggtcctgctcctgaccttggcggtgatagcgatcctcctgtttattctgctctggcatctctgctggcccaaggagaaagccgacccctatccctatcctggcttggtctgcggagtccccaacacccacaccccttcctcctcgcatctgtcctccccaggcgccctggagacaggggacacatggaaggaggcctcactacttccactcctgagcagggaactgtccagtctggcgtcacaacccctgtctcgcctcctggatgagctggaggtgctggaagagctgattgtactgctggaccctgagcctgggccaggtgggggtatggcccatggcactactcgacacctggccgcaagatatgggctgcctgctgcctggtccacctttgcctattcgctgaggccgagtcgctcgccgctgcgggctctgattgagatggtggtggcaagggagccctctgcctccctgggccagcttggcacacacctcgcccagctagggcgggcagatgcattgcgggtgctgtccaagcttggctcatctggggtttgctgggcttaacacccaataaagaactttgctgactact

SEQ ID NO: 216185 - DNA, 630 bp, Artificial Sequence
  derived and/or modified sequence
cacaacttcagctgaggaacttggcacggccagcttgggacccaggaccctaacgcagaggcgctgtgtttggaagtcccgctatcacggccccccagatggggcctggacgatgcctcctgacggccttgttgcttctggccctggcgccaccgccggaagcctcccagtactgcggccgccttgaatactggaacccagacaacaagtgctgcagcagctgcctgcaacgcttcgggccgcccccctgcccggaactgtccagtctggcgtcacaacccctgtctcgcctcctggatgagctggaggtgctggaagagctgattgtactgctggaccctgagcctgggccaggtgggggtatggcccatggcactactcgacacctggccgcaagatatgggctgcctgctgcctggtccacctttgcctattcgctgaggccgagtcgctcgccgctgcgggctctgattgagatggtggtggcaagggagccctctgcctccctgggccagcttggcacacacctcgcccagctagggcgggcagatgcattgcgggtgctgtccaagcttggctcatctggggtttgctgggcttaacacccaataaagaactttgctgactact

SEQ ID NO: 216186 - DNA, 1068 bp, Artificial Sequence
  derived and/or modified sequence
atgggccctggccgctgcctgctgacagccctgctgctgctggccctggcccctcctcctgaggccagccagtactgcggccgcctggagtactggaacccagacaacaagtgctgcagcagctgcctgcagcgcttcggccccccaccctgcccagactatgagttccgggagaactgtggcctgaatgaccatggagactttgtgaccccacccttcaggaagtgcagcagcggccagtgcaacccagatggagctgagctgtgcagcccctgtggcggcggcgctgtgacccccaccccagctgctgggggcggccgcaccccctggcgctgccgggagaggcctgtgcctgccaagggccactgccccctgaccccaggcaaccctggggcccccagcagccaggagaggagcagccctgccagcagcatcgcctggaggaccccagagcctgtgccccagcaggcctggcccaacttcctgcccctggtggtgctggtgctgctgctgaccctggccgtcatcgccatcctgctcttcatcctgctgtggcacctgtgctggcccaaggagaaggctgacccctacccctacccaggcctggtgtgtggggtgcccaacacccacacccccagcagcagccacctgagcagccctggggccctggagactggagacacctggaaggaggccagcctgctgcccctgctgagccgggagctgagcagcctggccagccagcccctgagccggctgctggatgagctggaggtgctggaggagctgattgtgctgctggaccctgagcccggccctgggggcggcatggcccacggcaccaccaggcacctggccgcccgctatggcctgcctgctgcctggagcacctttgcctacagcctgcggcccagccgcagccccctgcgggccctgattgagatggtggtggcccgggagcccagcgccagcctgggccagctgggcacccacctggcccagctgggccgggcagatgccctgcgggtgctgagcaagctgggcagcagcggcgtgtgctgggcctag

SEQ ID NO: 216187 - DNA, 504 bp, Artificial Sequence
  derived and/or modified sequence
atgggccctggccgctgcctgctgacagccctgctgctgctggccctggcccctcctcctgaggccagccagtactgcggccgcctggagtactggaacccagacaacaagtgctgcagcagctgcctgcagcgcttcggccccccaccctgcccagagctgagcagcctggccagccagcccctgagccggctgctggatgagctggaggtgctggaggagctgattgtgctgctggaccctgagcccggccctgggggcggcatggcccacggcaccaccaggcacctggccgcccgctatggcctgcctgctgcctggagcacctttgcctacagcctgcggcccagccgcagccccctgcgggccctgattgagatggtggtggcccgggagcccagcgccagcctgggccagctgggcacccacctggcccagctgggccgggcagatgccctgcgggtgctgagcaagctgggcagcagcggcgtgtgctgggcctag

SEQ ID NO: 216188 - DNA, 1068 bp, Artificial Sequence
  derived and/or modified sequence
atgggccccggccggtgcctgctgaccgccctgctgctgctggcccttgccccacctccagaagctagccaatactgtggacgcctagaatactggaacccggataacaaatgttgctcatcttgtctacagcgttttggcccccctccttgcccggactacgagttccgtgaaaactgcggactgaatgaccacggagatttcgtgacgccaccctttcgcaagtgctctagcggccaatgcaacccagatggcgccgagctgtgtagtccatgcggtggcggggcagttactccaactcctgctgctggcggaggccgcacaccctggcggtgccgcgaacggcccgtgccagccaagggtcactgccccctcaccccaggaaacccaggggccccttccagtcaggagaggagttccccagcctcaagcattgcttggaggaccccggagcctgtccctcagcaggcctggcccaattttctcccactggtggtgctggttctgctgctcacattagctgtcattgcgattcttctgtttatcctgctttggcatctatgttggccgaaagaaaaagcggatccctatccatatcccggcctagtgtgtggggtgcccaatacacacacacctagctccagccatctcagctctccgggggcgcttgagacaggcgatacttggaaagaggcaagcctgttgcctctcctttctcgagagctctcttccctggcaagtcagccgctgtcacgcctcctggacgagctggaggtattggaagaactcatcgtactgctcgaccctgaacctggcccaggcggaggtatggcacatggaaccacccgacacttagccgcaaggtacggactgcccgcagcttggagcacctttgcctactctctgcgcccctctcgttcaccccttagagccctcatcgaaatggttgtagcccgggagccatcagccagtcttggccagttggggacgcacttggctcagttagggagagccgatgcgctgagagtgctgagcaaacttggctcaagtggcgtgtgttgggcttag

SEQ ID NO: 216189 - DNA, 504 bp, Artificial Sequence
  derived and/or modified sequence
atgggccccggccggtgcctgctgaccgccctgctgctgctggccctggctcctcccccagaagcgagccaatattgtggccggctggaatattggaaccccgataacaagtgctgtagctcatgtctgcaaagatttggccccccgccatgcccagagctgagcagtctcgcatcccaacctctaagtaggctgctggacgagctggaggtgctcgaagagcttattgtgctactggaccccgagccaggaccaggaggagggatggcccatggcaccactaggcatctggccgctcgctatgggttgccagcagcctggagtacattcgcttattccctgagaccatctaggtccccgttgagggccttgatagagatggtggtggcacgcgagccctcagcaagtctgggccagctgggcactcacctggcgcagttaggcagagccgacgcactcagggtgctgtcaaaacttggaagtagcggcgtgtgctgggcgtag

SEQ ID NO: 216190 - DNA, 562 bp, Artificial Sequence
  derived and/or modified sequence
atgccccgccccctccccagccccagacacggaccccgcaggttcacacaagcctccctggctgctacccctcaccccacccttcaagaagactaaagctgctggatcacctgctttgcctcaccacccccatctcagtgccactggcaagcatcctatcctcaccctggaggttaactacctcattctgggcagtctctggcttcctcccctacccctaaaggaaacattgttcttttctggtcagcctttggggataaggggacagagggaagaagaccttggggcaggagtcctgaaccataggaggccaggggagtgagggcaggcggttatatctctcctctacctcatctttgccacagccaactggctccctgcccctgcccccgccccttgacatcccagactccctggctatttaaacagagatgggtgcccccatccgcacactgtcctttggccaccggacatcatgcctcccaagaaggatgttcccgtgaagaaaccagcagggccctccatctccaaacctgctgctaagccagcagcagcaggggct

SEQ ID NO: 216191 - DNA, 1068 bp, Artificial Sequence
  derived and/or modified sequence
atgggaccagggcgatgcctgctgacagcactgctgctactagcgctggcccctcccccagaagcctcccagtactgtgggaggctagaatattggaatcctgacaacaaatgttgctctagttgcctacagagatttggccctccaccctgtccagactacgaatttcgcgaaaattgcggcctcaatgatcatggggatttcgtgacaccgccttttaggaaatgttcatccggtcaatgtaacccagacggagcagaattgtgttccccctgtggcggaggcgctgtgacgcctacccccgctgccggagggggacgaaccccctggcggtgccgtgagcgacctgtgccggctaagggacactgtcccttgactcctggcaacccaggcgcaccctcgtctcaggagcggagcagccctgccagcagtatcgcatggaggacaccagagccggtcccccagcaagcctggccaaacttcctgcctttggtggttctcgttctgctccttactttggcagtaatagccattcttctgttcattctcttatggcatttgtgctggccgaaggaaaaggccgacccttatccgtatccaggtctggtgtgcggcgtccccaatacacacactcctagctcttctcacctctccagcccaggcgcacttgaaacaggggacacatggaaggaagctagcttgctcccccttctctcacgcgagctgagctcactcgcttctcaaccgttgagcagactgctggatgagctagaggtcctggaagagctaatagttttgctcgaccctgaaccagggcctggaggaggcatggcccatggaactacccggcacttggccgcacggtatggcctcccggctgcttggagcacctttgcctatagtctgcggccttcaaggtctccgcttagggcgcttatcgaaatggtcgttgctagagagccctccgcgtcactgggacagctgggaacacatttagctcagctgggaagagccgacgcactccgggtactctcaaagcttggcagctccggcgtgtgttgggcctag

SEQ ID NO: 216192 - DNA, 504 bp, Artificial Sequence
  derived and/or modified sequence
atgggcccaggtaggtgcctgctgacggcactgcttctgctggccttggctcccccacctgaggctagccagtattgcggacgcctggagtactggaacccggataacaagtgctgctcttcctgcctccagagatttggtccccctccatgtcccgagctcagctcccttgcctctcaacctttatcccgcctgctggatgagttagaggtgctggaggaactcatcgtcctgctcgaccctgagccaggcccaggtggcggaatggcacacggaacaactcggcacttagccgcacgctacggcctacccgctgcctggtcgaccttcgcctactcactgagaccctctcggtcccctctgcgcgcactcattgagatggtcgtggcacgagaacccagcgcttccttaggccaactgggaactcacctggctcaactgggcagggctgacgcactgcgggtgctgtctaagttgggatcatctggggtgtgttgggcgtag

SEQ ID NO: 216193 - DNA, 1068 bp, Artificial Sequence
  derived and/or modified sequence
atgggccccggcagatgcctgctgaccgccctgctgctgctggccctggcccccccccccgaggccagccagtactgcggcagactggagtactggaaccccgacaacaagtgctgcagcagctgcctgcagagattcggcccccccccctgccccgactacgagttcagagagaactgcggcctgaacgaccacggcgacttcgtgaccccccccttcagaaagtgcagcagcggccagtgcaaccccgacggcgccgagctgtgcagcccctgcggcggcggcgccgtgacccccacccccgccgccggcggcggcagaaccccctggagatgcagagagagacccgtgcccgccaagggccactgccccctgacccccggcaaccccggcgcccccagcagccaggagagaagcagccccgccagcagcatcgcctggagaacccccgagcccgtgccccagcaggcctggcccaacttcctgcccctggtggtgctggtgctgctgctgaccctggccgtgatcgccatcctgctgttcatcctgctgtggcacctgtgctggcccaaggagaaggccgacccctacccctaccccggcctggtgtgcggcgtgcccaacacccacacccccagcagcagccacctgagcagccccggcgccctggagaccggcgacacctggaaggaggccagcctgctgcccctgctgagcagagagctgagcagcctggccagccagcccctgagcagactgctggacgagctggaggtgctggaggagctgatcgtgctgctggaccccgagcccggccccggcggcggcatggcccacggcaccaccagacacctggccgccagatacggcctgcccgccgcctggagcaccttcgcctacagcctgagacccagcagaagccccctgagagccctgatcgagatggtggtggccagagagcccagcgccagcctgggccagctgggcacccacctggcccagctgggcagagccgacgccctgagagtgctgagcaagctgggcagcagcggcgtgtgctgggcctag

SEQ ID NO: 216194 - DNA, 504 bp, Artificial Sequence
  derived and/or modified sequence
atgggccccggcagatgcctgctgaccgccctgctgctgctggccctggcccccccccccgaggccagccagtactgcggcagactggagtactggaaccccgacaacaagtgctgcagcagctgcctgcagagattcggcccccccccctgccccgagctgagcagcctggccagccagcccctgagcagactgctggacgagctggaggtgctggaggagctgatcgtgctgctggaccccgagcccggccccggcggcggcatggcccacggcaccaccagacacctggccgccagatacggcctgcccgccgcctggagcaccttcgcctacagcctgagacccagcagaagccccctgagagccctgatcgagatggtggtggccagagagcccagcgccagcctgggccagctgggcacccacctggcccagctgggcagagccgacgccctgagagtgctgagcaagctgggcagcagcggcgtgtgctgggcctag

SEQ ID NO: 216195 - protein, 523 aa, Artificial Sequence
  derived and/or modified sequence
MANVGLQFQASAGDSDPQSRPLLLLGQLHHLHRVPWSHVRGKLQPRVTEELWQAALSTLNPNPTDSCPLYLNYATVAALPCRVSRHNSPSAAHFITRLVRTCLPPGAHRCIVMVCEQPEVFASACALARAFPLFTHRSGASRRLEKKTVTVEFFLVGQDNGPVEVSTLQCLANATDGVRLAARIVDTPCNEMNTDTFLEEINKVGKELGIIPTIIRDEELKTRGFGGIYGVGKAALHPPALAVLSHTPDGATQTIAWVGKGIVYDTGGLSIKGKTTMPGMKRDCGGAAAVLGAFRAAIKQGFKDNLHAVFCLAENSVGPNATRPDDIHLLYSGKTVEINNTDAEGRLVLADGVSYACKDLGADIILDMATLTGAQGIATGKYHAAVLTNSAEWEAACVKAGRKCGDLVHPLVYCPELHFSEFTSAVADMKNSVADRDNSPSSCAGLFIASHIGFDWPGVWVHLDIAAPVHAGERATGFGVALLLALFGRASEDPLLNLVSPLGCEVDVEEGDLGRDSKRRRLV

SEQ ID NO: 216196 - DNA, 1572 bp, Artificial Sequence
  derived and/or modified sequence
atggccaacgtgggcctgcagttccaggccagcgccggcgacagcgacccccagagcagacccctgctgctgctgggccagctgcaccacctgcacagagtgccctggagccacgtgagaggcaagctgcagcccagagtgaccgaggagctgtggcaggccgccctgagcaccctgaaccccaaccccaccgacagctgccccctgtacctgaactacgccaccgtggccgccctgccctgcagagtgagcagacacaacagccccagcgccgcccacttcatcaccagactggtgagaacctgcctgccccccggcgcccacagatgcatcgtgatggtgtgcgagcagcccgaggtgttcgccagcgcctgcgccctggccagagccttccccctgttcacccacagaagcggcgccagcagaagactggagaagaagaccgtgaccgtggagttcttcctggtgggccaggacaacggccccgtggaggtgagcaccctgcagtgcctggccaacgccaccgacggcgtgagactggccgccagaatcgtggacaccccctgcaacgagatgaacaccgacaccttcctggaggagatcaacaaggtgggcaaggagctgggcatcatccccaccatcatcagagacgaggagctgaagaccagaggcttcggcggcatctacggcgtgggcaaggccgccctgcacccccccgccctggccgtgctgagccacacccccgacggcgccacccagaccatcgcctgggtgggcaagggcatcgtgtacgacaccggcggcctgagcatcaagggcaagaccaccatgcccggcatgaagagagactgcggcggcgccgccgccgtgctgggcgccttcagagccgccatcaagcagggcttcaaggacaacctgcacgccgtgttctgcctggccgagaacagcgtgggccccaacgccaccagacccgacgacatccacctgctgtacagcggcaagaccgtggagatcaacaacaccgacgccgagggcagactggtgctggccgacggcgtgagctacgcctgcaaggacctgggcgccgacatcatcctggacatggccaccctgaccggcgcccagggcatcgccaccggcaagtaccacgccgccgtgctgaccaacagcgccgagtgggaggccgcctgcgtgaaggccggcagaaagtgcggcgacctggtgcaccccctggtgtactgccccgagctgcacttcagcgagttcaccagcgccgtggccgacatgaagaacagcgtggccgacagagacaacagccccagcagctgcgccggcctgttcatcgccagccacatcggcttcgactggcccggcgtgtgggtgcacctggacatcgccgcccccgtgcacgccggcgagagagccaccggcttcggcgtggccctgctgctggccctgttcggcagagccagcgaggaccccctgctgaacctggtgagccccctgggctgcgaggtggacgtggaggagggcgacctgggcagagacagcaagagaagaagactggtgtag

SEQ ID NO: 216197 - DNA, 2378 bp, Artificial Sequence
  derived and/or modified sequence
tggaggccgggcgcgcgggccctactcggcagggcctgctcggggccggcttcgggcctgcccggccgggcctgcccgcacccttccgcccggcctggccggcgccccctcgcgccccgggcgggccctgcacgtctcgcgagcagcccggagcggcgggggaggcggggcccgcgggctgccgggcagggccggggcggtgccgaggccgggccggagcggggcgaagggggccgagcggcgggccgggccgggccgggcagggccggggcgtgggccggcaggaagatggcgaacgtggggctgcagttccaggcgagcgcgggggactcggacccacagagccggcccctgctgctgctcgggcagctgcaccacctgcaccgcgtgccctggagccacgtccgcgggaagctgcagccccgggtcaccgaggagctctggcaggctgccctgagcacgctcaaccccaaccccacggacagctgtcccctctacctgaactacgccaccgtggctgccctgccctgcagggtgagccggcacaacagcccctcggccgcccacttcatcacgcggctggtgcggacctgcctgccgcccggagcgcatcgctgcattgtgatggtctgcgagcagccggaggtctttgcttccgcctgtgccctggcccgggccttcccgctgttcacccaccgctcaggtgcctctcggcgcttggagaagaagacggtcaccgtggagtttttcctggtgggacaagacaacgggccggtggaggtgtccacattgcagtgcttagcgaatgccacagacggcgtgcggctagcagcccgcatcgtggacacaccctgcaatgagatgaacaccgacaccttcctcgaggagattaacaaagttggaaaggagctggggatcatcccaaccatcatccgggatgaggaactgaagacgagaggatttggaggaatctatggggttggcaaagccgccctgcatcccccagccctggccgtcctcagccacaccccagatggagccacgcagaccatcgcctgggtgggcaaaggcatcgtctatgacactggaggcctcagcatcaaagggaagactaccatgccggggatgaagcgagactgcgggggtgctgcggccgtcctgggggccttcagagccgcaatcaagcagggtttcaaagacaacctccacgctgtgttctgcttggctgagaactcggtggggcccaatgcgacaaggccagatgacatccacctgctgtactcagggaagacggtggaaatcaacaacacggatgccgagggcaggctggtgctggcagatggcgtgtcctatgcttgcaaggacctgggggccgacatcatcctggacatggccaccctgaccggggctcagggcattgccacagggaagtaccacgccgcggtgctcaccaacagcgctgagtgggaggccgcctgtgtgaaggcgggcaggaagtgtggggacctggtgcacccgctggtctactgccccgagctgcacttcagcgagttcacctcagctgtggcggacatgaagaactcagtggcggaccgagacaacagccccagctcctgtgctggcctcttcatcgcctcacacatcggcttcgactggcccggagtctgggtccacctggacattgctgcaccggtgcatgctggtgagcgagccacaggcttcggtgtggccctcctgctggcgctcttcggccgtgcctctgaggaccctctgctgaacctggtgtccccactgggctgtgaggtggatgtcgaggagggggacctggggagggactccaagagacgcaggcttgtgtgagcctcctgcctcggccctgacaaacggggatcttttacctcactttgcactgattaattttaagcaattgaaagattgcccttcatatgggttttggtttgtctttctggtcgtcagcgtggtggtggaaacagctgaagttttaggagacagcttagggtttggtgcgggccacggggaggggaccgggaagcgctggggcttgtttctgtttgttacttacaggactgagacatcttctgtaaactgctacccctggggccttctgcaccccggggtgaggcctcctgcctgcctggtgccctgtcccagccccaggtcctgtgcagggcacctgcgtggctgacagccaggctcttactccagccggggctgccagcgcatccagccagcccagccctgtgaaagatggagctgacttgctgcaggggacctgatttatagggcaagagaagtcacactccggcctctcagaattcacttgaggttcaattaaatacagtcacaccgccccctca

SEQ ID NO: 216198 - DNA, 1572 bp, Artificial Sequence
  derived and/or modified sequence
atggctaacgtggggcttcaattccaagcctcggcaggggactccgaccctcaaagtaggcctctactcctcctcgggcaactgcatcatctccacagagtgccctggagtcatgtgcgcggtaagctgcagccacgcgtgactgaggagttgtggcaggccgccctgtccacgctgaatcctaaccctaccgactcctgtccgctgtatttgaactacgccactgtggccgcacttccttgcagggtgagtaggcacaacagtccttccgcggcacatttcatcacacggttagtcagaacatgtctgccacccggagctcaccggtgtattgtgatggtttgcgaacagcctgaagttttcgctagcgcatgtgcactcgcccgggcctttcctctgttcacacaccgtagcggcgccagcaggaggctggaaaaaaaaactgtgacggtggagttctttttagttggacaggacaacgggcccgttgaggtgtccacactgcaatgcctggccaacgccactgacggcgtccgcctggccgccagaatagtggacaccccctgcaatgaaatgaacactgacaccttccttgaggagataaataaagtgggaaaggagctcggcatcattcctaccattataagggatgaagagttgaaaacacgtggattcggggggatctatggcgtgggcaaagcagccctgcacccccctgccctggcggtgctgtctcacacaccagacggggccacccagaccatcgcctgggttggaaagggcatcgtgtacgatactggagggctcagtattaaaggaaaaacgactatgcctggtatgaaacgagattgcggcggcgccgctgcagtactcggagcatttcgggccgctattaagcaaggattcaaggataacctgcacgccgtcttttgtctggcagaaaacagcgtgggaccgaacgctacaagacccgacgacatccacctgctgtattccggaaaaacggtcgagatcaataatactgatgctgaaggcaggctcgtacttgccgacggggtgtcgtatgcttgtaaagaccttggggcagatatcattcttgacatggctacactgacaggcgcacaaggaatagctacagggaaatatcacgccgccgtcttaactaatagcgctgagtgggaggcagcctgcgtcaaggcgggccggaagtgtggcgatctcgttcatcccctcgtctactgtccagaactgcactttagcgaatttacgagcgccgtggcagacatgaaaaattccgtcgccgacagggacaattcccctagtagttgcgccgggctgtttatagcaagccacataggtttcgattggcccggggtgtgggtgcacctggacatcgcggcaccagtgcacgccggagagcgggccactggtttcggtgttgccctccttctggccctcttcggacgggcatcagaagaccctttgctgaacctcgtcagtcctctcgggtgcgaagttgacgtggaggagggtgacctgggaagggactcaaagaggcgccgtcttgtctag

SEQ ID NO: 216199 - DNA, 1572 bp, Artificial Sequence
  derived and/or modified sequence
atggccaacgtgggcctgcagttccaggccagcgctggggacagcgacccccagagccggcccctgctgctgctgggccagctgcaccacctgcaccgggtgccctggagccacgtgcggggcaagctgcagccccgggtgacagaggagctgtggcaggccgccctgagcaccctgaaccccaaccccacagacagctgccccctgtacctgaactatgccaccgtggccgccctgccctgccgggtgagccgccacaacagccccagcgctgcccacttcatcacccggctggtgaggacctgcctgcccccaggggcccaccgctgcatcgtgatggtgtgtgagcagcctgaggtgtttgccagcgcctgtgccctggcccgggccttccccctcttcacccacaggtctggggccagccggcggctggagaagaagacagtgacagtggagttcttcctggtgggccaggacaatggacctgtggaggtgtccaccctgcagtgcctggccaatgccacagatggagtgcggctggccgcccgcatcgtggacaccccctgcaatgagatgaacacagacaccttcctggaggagatcaacaaggtgggcaaggagctgggcatcatccccaccatcatcagagatgaggagctgaagacccggggctttggaggcatctatggagtgggcaaggccgccctgcaccccccagccctggccgtgctgagccacaccccagatggagccacccagaccatcgcctgggtgggcaagggcatcgtgtatgacaccggcggcctgagcatcaagggcaagaccaccatgcctggcatgaagagggactgtggcggcgctgctgctgtgctgggcgccttccgggccgccatcaagcagggcttcaaggacaacctgcatgctgtgttctgcctggccgagaacagcgtgggccccaatgccaccaggccagatgacatccacctgctgtacagcggcaagacagtggagatcaacaacacagatgctgagggccgcctggtgctggctgatggagtgtcctatgcctgcaaggacctgggcgctgacatcatcctggacatggccaccctgaccggggcccagggcatcgccaccgggaagtaccacgccgctgtgctgaccaacagcgctgagtgggaggccgcctgtgtgaaggccggcaggaaatgtggggacctggtgcaccccctggtgtactgcccagagctgcacttcagcgagttcaccagcgctgtggccgacatgaagaacagcgtggccgaccgggacaacagccccagcagctgtgccggcctcttcatcgccagccacatcggctttgactggccaggagtgtgggtgcacctggacattgctgcccctgtgcatgctggggagcgggccaccggcttcggcgtggccctgctgctggccctgtttggccgggccagcgaggaccccctgctgaacctggtgagccccctgggctgtgaggtggatgtggaggagggggacctgggccgggacagcaagagaagaaggctggtgtag

SEQ ID NO: 216200 - DNA, 1572 bp, Artificial Sequence
  derived and/or modified sequence
atggccaacgtgggcctgcagttccaggccagcgccggcgacagcgatccccagtctcggcccctgctgctgctcggtcagttacaccacctacatcgtgtgccttggtctcatgtccgcggtaagctccagccacgagtcacagaagagctgtggcaggctgctttgagcactttgaaccctaaccccaccgacagctgccctctctacctcaattacgcgaccgtggccgccctgccctgtagggtctctagacataacagccctagtgccgcacactttattacccgcctcgtcagaacctgcctaccaccaggcgcacatcgctgtatagtaatggtgtgtgagcagcccgaggtgttcgcaagtgcctgcgctctggcccgggcctttccattattcacacacaggtctggggccagtaggcgactggagaaaaagactgtgactgtggagttctttctggttgggcaagataatggaccagtggaagtgtcgacgcttcagtgcctggctaacgctaccgacggagtcagattagccgccaggatcgtcgatacgccctgcaacgaaatgaacactgacaccttcctggaagagataaataaagtgggcaaggaacttgggattattcctactatcattcgcgatgaggagctgaagactcgcggattcggcggaatctatggagtcgggaaggctgctctccatccccccgctctggctgtgctgtcacacacacccgatggcgccacacagactatcgcctgggtgggaaagggaatcgtctacgatacaggcggtctatcaatcaaaggtaaaaccaccatgcccggaatgaaacgggactgcggaggcgccgccgcagtgctgggcgcttttcgtgccgcgataaaacaggggtttaaggacaatttgcatgctgtcttctgcctagcagaaaactccgtcggaccgaacgcaacgcgtccggatgacattcacctgctctattcaggaaaaaccgtggagattaataacacagacgctgaggggcggttggttctcgcagacggtgtgtcatatgcgtgcaaggacctgggcgcggatatcattctcgacatggcaactctgacaggtgcgcagggaatcgccaccggaaagtatcacgctgcagtgttaaccaacagcgccgagtgggaagcagcctgcgtcaaggcggggagaaagtgcggggatcttgttcaccccctggtttattgcccagagctacatttctccgagtttacttcggcagtcgccgatatgaaaaattccgtggccgaccgcgacaatagtccctcctcatgcgccggcctttttatcgccagccacatcggctttgactggccaggggtatgggttcacctggatatcgccgcgcctgtacatgctggagagcgggcaacgggttttggagtagctctgttgctcgctctgtttggtagggccagcgaggacccgttgctgaacctcgtgtctccccttgggtgtgaagtggatgttgaagagggggatctaggaagagattctaagcggcggaggttagtgtag

SEQ ID NO: 216201 - DNA, 1572 bp, Artificial Sequence
  derived and/or modified sequence
atggcaaatgttggcctgcagttccaagcctccgccggagactcagaccctcagtctcgccctttgctcctgcttggccagttgcatcacctgcaccgagtgccttggtcgcatgtgagaggcaagctgcagcccagagtaaccgaagaactgtggcaagccgctttgagcacactaaacccaaaccccaccgacagttgtcctctgtatctaaactacgcgaccgtggccgcattaccctgccgggtctcccgccataacagtcctagtgctgcacatttcatcacacgattggtgcgaacctgtctgccccctggggctcaccggtgcatagtgatggtgtgtgagcagccggaagtgttcgcttctgcgtgtgctctggcacgcgcttttcctctgtttacccataggtcaggggcaagtcgccgactggagaagaagactgtcacagttgaattcttcttggtcgggcaggacaatggtccagtcgaggtttctaccctgcaatgcctcgcaaatgccacagatggcgtgaggctggccgctcgcattgtggacaccccttgtaacgagatgaacactgatacctttctggaagagatcaataaagtaggtaaagaactcggcatcattccgaccattattcgagatgaggaattaaaaacccgcggtttcgggggtatatacggtgtgggaaaagctgccttacatccccctgcgctggccgttctctctcatacccccgatggcgctacacagacaattgcctgggtgggtaaaggcatcgtttatgacacaggcggactgagtatcaaggggaagacaacgatgcctggaatgaaaagggattgtggtggagcagctgctgttttgggcgctttccgggcagcgattaagcagggcttcaaggataacctccacgcagttttttgcctagccgagaactcagtgggacccaatgccactagacccgacgacatacatttgctgtatagcgggaagacagtcgaaataaacaacacagatgccgagggcaggctcgtgttggctgacggcgtatcatatgcttgtaaagacctgggggctgatatcatcctggatatggcaaccctgacaggcgcacagggaatcgccaccggtaaatatcacgccgctgtacttaccaatagtgccgagtgggaggccgcatgtgtgaaggccggacgaaaatgtggcgacttagtccacccactagtgtattgcccagaactgcacttcagcgagtttacctccgcagtagccgatatgaaaaatagcgtggcagatcgggacaactcgccgtcgagctgcgctggactctttatcgcctctcatataggattcgactggccaggcgtgtgggttcatcttgatatcgccgctccagtgcacgccggagaaagggccaccggatttggtgttgccctgcttttggcactcttcgggcgtgcttcagaagatccactccttaatttggtaagccctctggggtgcgaggtcgacgtggaggaaggggacctgggacgcgactccaagagaaggcggcttgtgtag

SEQ ID NO: 216202 - protein, 315 aa, Artificial Sequence
  derived and/or modified sequence
MAAGVPCALVTSCSSVFSGDQLVQHILGTEDLIVEVTSNDAVRFYPWTIDNKYYSADINLCVVPNKFLVTAEIAESVQAFVVYFDSTQKSGLDSVSSWLPLAKAWLPEVMILVCDRVSEDGINRQKAQEWCIKHGFELVELSPEELPEEDDDFPESTGVKRIVQALNANVWSNVVMKNDRNQGFSLLNSLTGTNHSIGSADPCHPEQPHLPAADSTESLSDHRGGASNTTDAQVDSIVDPMLDLDIQELASLTTGGGDVENFERLFSKLKEMKDKAATLPHEQRKVHAEKVAKAFWMAIGGDRDEIEGLSSDEEH

SEQ ID NO: 216203 - DNA, 948 bp, Artificial Sequence
  derived and/or modified sequence
atggcagccggcgtgccttgcgctctcgtgacctcatgctcctctgtcttttcaggcgaccaattggtgcagcacatattgggtaccgaggacctcattgtcgaagtgacctctaatgatgcagtcaggttctacccttggacaatcgacaacaagtactacagcgccgatatcaatctttgtgtggtaccgaataaattcctggtaacagctgagatagctgagtccgtgcaggccttcgtcgtctactttgactccacacagaaatctggactcgatagcgtcagctcttggctgcccctcgcgaaagcctggctgcccgaggtgatgatccttgtgtgcgatagggtctcggaagatggaataaatcgccaaaaggctcaggaatggtgtattaagcatggattcgagttggttgagctgtcgccagaagagttgcccgaagaagacgacgatttcccagaatccaccggagtgaagagaattgtacaggccctaaatgcaaatgtttggagcaatgttgtgatgaagaatgacaggaatcagggcttctctctcctgaatagcctcactggtactaaccacagcatcggtagcgccgatccatgccatccagagcagccccacctgcctgccgctgattcgactgagtcactcagtgaccacagaggaggggcgtcaaacacaacagacgcccaagtcgatagcatcgtggaccctatgctcgacctagacatccaggaattggcttctttgacaacaggggggggcgacgtagagaatttcgagcgtctgttctcaaagctgaaggaaatgaaagacaaggctgccacgttgccacatgaacagcggaaagtccacgcagagaaagtggctaaagctttctggatggccatagggggagatcgggacgaaatagagggcttaagctctgatgaggagcattag

SEQ ID NO: 216204 - DNA, 948 bp, Artificial Sequence
  derived and/or modified sequence
atggctgctggggtgccctgtgccctggtgaccagctgcagctctgtgttcagcggggaccagctggtgcagcacatcctgggcacagaggacctgattgtggaggtgaccagcaatgatgctgtgcgcttctacccctggaccatcgacaacaagtactacagcgctgacatcaacctgtgtgtggtgcccaacaagttcctggtgacagctgagattgctgagagcgtgcaggcctttgtggtgtactttgacagcacccagaagagcggcctggacagcgtgtcctcctggctgcccctggccaaggcctggctgcctgaggtgatgatcctggtgtgtgacagagtgtctgaagatggcatcaaccggcagaaggcccaggagtggtgcatcaagcacggctttgagctggtggagctgagccctgaggagctgcctgaagaagatgatgacttccctgagagcactggagtgaagagaattgtgcaggccctgaatgccaacgtgtggagcaatgtggtgatgaagaatgacaggaaccagggcttcagcctgctgaacagcctgaccggcaccaaccacagcatcggcagcgctgacccctgccaccctgagcagccccacctgcctgctgctgacagcacagagagcctgagtgaccaccggggcggggccagcaacaccacagatgcccaggtggacagcatcgtggaccccatgctggacctggacatccaggagctggccagcctgaccaccggcggcggagatgtggagaactttgagcggctcttcagcaagctgaaggagatgaaggacaaggccgccaccctgccccatgagcagaggaaggtgcacgccgagaaggtggccaaggccttctggatggccatcggcggggacagagatgaaattgagggcctgagcagtgatgaggagcactag

SEQ ID NO: 216205 - DNA, 948 bp, Artificial Sequence
  derived and/or modified sequence
atggccgccggcgtgccctgcgccctggtgaccagctgcagcagcgtgttttctggagaccaattggtccagcatattcttggtactgaggacttgatagtcgaagttacctccaatgatgcagtcaggttttatccgtggacaatcgacaacaagtattacagcgctgatataaacctgtgcgtggtgccaaacaaatttctggtaactgcggagatcgcggagagtgtgcaggcatttgtggtgtattttgactccacacagaagtctggtcttgatagcgtgtcctcatggctgcctctggccaaagcctggctgcccgaggtgatgatcctggtctgcgaccgcgtaagcgaggacggaattaatagacagaaagcccaggagtggtgcattaagcacgggttcgagcttgtcgaactgtcccccgaggagctgcccgaggaagacgatgactttcccgagtcaaccggggttaagcgtattgtccaggcgttgaacgcaaacgtgtggagcaacgtcgtgatgaagaacgacagaaatcagggcttcagcctgctgaactccctgaccggaacaaaccatagtatcggcagcgccgatccctgccaccctgaacagccccacctacctgctgccgactccactgagtcactgagtgatcaccgggggggggcctccaacacaactgatgcccaggtggacagcattgtggatccgatgctcgacttagacattcaagagctggcttccctcaccactggtgggggggacgtggagaactttgagaggctgttttcaaagctgaaagaaatgaaagacaaagctgccacattgccccacgaacagcgcaaagtgcacgccgagaaagtcgctaaagccttttggatggctattgggggggatcgggacgagatcgagggactgtccagcgacgaggaacattag

SEQ ID NO: 216206 - DNA, 948 bp, Artificial Sequence
  derived and/or modified sequence
atggccgctggcgtgccatgtgcgctcgtaacgagttgctcttccgtatttagcggggaccagctcgtgcagcacattctggggacagaagaccttattgtggaggtcacgtctaacgatgccgttaggttttacccctggaccattgacaacaagtattactccgccgatattaacctgtgcgtcgtgcccaataaattcctcgtaacagctgaaatagctgagagcgtccaggcattcgttgtgtacttcgacagcacacaaaagagcgggttagactcagtgagctcatggctgccactagctaaggcctggctgccagaagttatgatcctggtttgcgatcgcgtctctgaggatggcataaatcggcagaaagctcaggagtggtgtatcaagcatggattcgaactggtcgaactgtcccccgaggagcttcccgaggaagacgatgattttcccgagtccacgggagtgaagcggatcgttcaggccctcaacgccaacgtgtggtccaacgtcgtgatgaagaatgataggaaccaaggtttctctctcctgaactccctcacgggcacgaatcattccatcggcagcgccgatccgtgccaccctgaacagccgcacttgccagccgcagacagtactgagagtctgtctgatcaccggggtggggcaagcaacacaaccgatgctcaggtggattcgatcgtcgaccccatgttggatctcgatatccaggagttagctagtctgacaacaggcggaggggacgtcgagaatttcgagagattgttttctaagctgaaagagatgaaggataaggccgctactctgccccatgaacagcgtaaggttcatgcggaaaaagttgccaaggctttttggatggccattgggggagatagggacgaaattgagggactgagctctgatgaggagcattag

SEQ ID NO: 216207 - DNA, 2841 bp, Artificial Sequence
  derived and/or modified sequence
attccgagaacgccctctccggcctgtctccccctcgcgccggcggccgtggtgcagcccaaggcggaagcggctgcctgacggaaccggctcgcgagcgcagctatggctgctggcgtaccctgtgcgttagtcaccagctgctcctccgtcttctcaggagaccagctggtccaacatatccttggaacagaagatcttattgtggaagtgacttccaatgatgctgtgagattttatccctggaccattgataataaatactattcagcagacatcaatctatgtgtggtgccaaacaaatttcttgttactgcagagattgcagaatctgtccaagcatttgtggtttactttgacagcacacaaaaatcgggccttgatagtgtctcctcatggcttccactggcaaaagcatggttacctgaggtgatgatcttggtctgcgatagagtgtctgaagatggtataaaccgacaaaaagctcaagaatggtgcatcaaacatggctttgaattggtagaacttagtccagaggagttgcctgaggaggatgatgacttcccagaatctacaggagtaaagcgaattgtccaagccctgaatgccaatgtgtggtccaatgtagtgatgaagaatgataggaaccaaggctttagccttctcaactcattgactggaacaaaccatagcattgggtcagcagatccctgtcacccagagcaaccccatttgccagcagcagatagtactgaatccctctctgatcatcggggtggtgcatctaacacaacagatgcccaggttgatagcattgtggatcccatgttagatctggatattcaagaattagccagtcttaccactggaggaggagatgtggagaattttgaaagactcttttcaaagttaaaggaaatgaaagacaaggctgcgacgcttcctcatgagcaaagaaaagtgcatgcagaaaaggtggccaaagcattctggatggcaatcgggggagacagagatgaaattgaaggcctttcatctgatgaagagcactgaattattcatactagggtttgaccaacaaagatgctagctgtctctgagatacctctctactcagcccagtcatattttgccaaaattgcccttatcatgttggctgcctgacttgtttatagggtccccttaattttagtttttagtaggaggttaaggagaaatcttttttttcctcagtatattgtaagagagtgaggaatacagtgatagtaatgagtgaggatttcttaaatatactttttttttgttctaggaatgagggtaggataaatctcagaggtctgtgtgatttactcaagttgaagacaacctccaggccattcctggtcaaccttttaagtagcatttccagcattcacacttgatactgcacatcaggagttgtgtcacctttcctgggtgatttgggttttctccattcaaggagcttgtagctctgagctatgatgcttttattgggaggaaaggaggcagctgcagaattgatgtgagctatgtggggccgaagtctcagcccgcagctaagtctctacctaagaaaatgcctctgggcattcttttgaagtatagtgtctgagctcatgctagaaagaatcaaaaagccagtgtggatttttagactgtaataaatgaggcaaaggatttctattccagtgggaagaaaacctctctactgagttgtgggggatatgttgtatgttagagagaaccttaaggagtccttgtatgggccatggagacagtatgtgataacataccgtgattttcatgaagaaattcttctgtcttagagttctcccctgctgcttgagatgccagagctgtgttgttgcacacctgcaaaacaaggcacatttccccctttctctttaaagccaaagagagatcactgccaaagtgggagcactaaggggtgggtggggaagtgaaatgttaggcgatgaattcctgagcaccttgtttttcttccaaggttcgtagctcctctctgcccttccaagcctgtaacctcggaggactatcttttgttctttatcctttgtcttgtttgagtgggtcagccccagaggaactgataagcaaatggcaagtttttaaaggaagagtggaaagtactgcaaataaaaatccttatttgtttttgtagactttgtaatgcatatcattagccctcactgtgatcattactgctgtggctctgaactggcacatagtacagtggatggaaggtgcccgcacaccagctgagaactggttctggcctaggtgggctctagaaccatttacacagcatgaaagaaacaggttgggttaggagcagaaagaaataaggctcacacccctccagacactaccttataagcactgcagaacctgaaacagatggcagaaggaatggaatgctacaggggccagcaggagtgaccacagggaggggacagctcagtgactggagcattcaggaagaggctttccagggaacactggacattgcttagtgaccttttgttcctttttttttttttttcttttactgttctgaaagactttgagtctgtggttcaccaccagcccatcagtgtttctttgaggtgattgcattagggaagttggctctgggattgcaaaaaaaaaaaaaaggtggaacatgttttccttaaaagatggaaggttttagaaaatatactaggccatctggttagaaaaaacagaccagactagaaaaagctgtgaatttgattttgtagattaaacaaagccagatgattaaaatgtgatttattt

SEQ ID NO: 216208 - DNA, 948 bp, Artificial Sequence
  derived and/or modified sequence
atggccgccggcgtgccctgcgccctggtgaccagctgcagcagcgtgttcagcggcgaccagctggtgcagcacatcctgggcaccgaggacctgatcgtggaggtgaccagcaacgacgccgtgagattctacccctggaccatcgacaacaagtactacagcgccgacatcaacctgtgcgtggtgcccaacaagttcctggtgaccgccgagatcgccgagagcgtgcaggccttcgtggtgtacttcgacagcacccagaagagcggcctggacagcgtgagcagctggctgcccctggccaaggcctggctgcccgaggtgatgatcctggtgtgcgacagagtgagcgaggacggcatcaacagacagaaggcccaggagtggtgcatcaagcacggcttcgagctggtggagctgagccccgaggagctgcccgaggaggacgacgacttccccgagagcaccggcgtgaagagaatcgtgcaggccctgaacgccaacgtgtggagcaacgtggtgatgaagaacgacagaaaccagggcttcagcctgctgaacagcctgaccggcaccaaccacagcatcggcagcgccgacccctgccaccccgagcagccccacctgcccgccgccgacagcaccgagagcctgagcgaccacagaggcggcgccagcaacaccaccgacgcccaggtggacagcatcgtggaccccatgctggacctggacatccaggagctggccagcctgaccaccggcggcggcgacgtggagaacttcgagagactgttcagcaagctgaaggagatgaaggacaaggccgccaccctgccccacgagcagagaaaggtgcacgccgagaaggtggccaaggccttctggatggccatcggcggcgacagagacgagatcgagggcctgagcagcgacgaggagcactag

SEQ ID NO: 216209 - protein, 285 aa, Artificial Sequence
  derived and/or modified sequence
MAGAGSEARFAGLSLVQLNELLEDEGQLTEMVQKMEETQNVQLNKEMTLASNRSLAEGNLLYQPQLDTLKARLTQKYQELQVLFEAYQIKKTKLDRQSSSASLETLLALLQAEGAKIEEDTENMAEKFLDGELPLDSFIDVYQSKRKLAHMRRVKIEKLQEMVLKGQRLPQALAPLPPRLPELAPTAPLPYPAPEASGPPAVAPRRIPPPPPPVPAGRLATPFTAAMSSGQAVPYPGLQCPPLPPRVGLPTQQGFSSQFVSPYPPPLPQRPPPRLPPHQPGFILQ

SEQ ID NO: 216210 - DNA, 858 bp, Artificial Sequence
  derived and/or modified sequence
atggccggcgccggcagcgaggccagattcgccggcctgagcctggtgcagctgaacgagctgctggaggacgagggccagctgaccgagatggtgcagaagatggaggagacccagaacgtgcagctgaacaaggagatgaccctggccagcaacagaagcctggccgagggcaacctgctgtaccagccccagctggacaccctgaaggccagactgacccagaagtaccaggagctgcaggtgctgttcgaggcctaccagatcaagaagaccaagctggacagacagagcagcagcgccagcctggagaccctgctggccctgctgcaggccgagggcgccaagatcgaggaggacaccgagaacatggccgagaagttcctggacggcgagctgcccctggacagcttcatcgacgtgtaccagagcaagagaaagctggcccacatgagaagagtgaagatcgagaagctgcaggagatggtgctgaagggccagagactgccccaggccctggcccccctgccccccagactgcccgagctggcccccaccgcccccctgccctaccccgcccccgaggccagcggcccccccgccgtggcccccagaagaatcccccccccccccccccccgtgcccgccggcagactggccacccccttcaccgccgccatgagcagcggccaggccgtgccctaccccggcctgcagtgcccccccctgccccccagagtgggcctgcccacccagcagggcttcagcagccagttcgtgagcccctaccccccccccctgccccagagacccccccccagactgcccccccaccagcccggcttcatcctgcagtag

SEQ ID NO: 216211 - DNA, 858 bp, Artificial Sequence
  derived and/or modified sequence
atggctggcgcggggagtgaagcacgcttcgccggtctgtccttggtgcaattgaatgaactgttagaggacgagggtcagctgacagagatggttcaaaagatggaagagactcagaacgttcagctcaacaaggagatgacactggcttcaaacagaagcctggcagaggggaacttactctaccagccccagctcgacactctgaaagcacgactgacacaaaaataccaggagctccaagttctattcgaggcctaccaaataaagaaaaccaagctcgaccggcagtcatccagtgcaagtttggaaacacttctcgcgctcctgcaggcagagggcgccaagatcgaggaggacacggaaaatatggccgagaagttcctggacggtgagctgccattggattcttttatcgacgtctaccaaagcaagcgcaagttggcacacatgcgccgagttaaaatagaaaagttgcaggaaatggtgctgaaagggcagcggttaccacaagccctggctcctctccccccacgactgcctgagctcgcccctacagccccgttgccataccccgcccctgaggcttccgggccaccagcggtggccccacgtcggattcctcccccccctcctccggtacccgctgggagactagccaccccatttaccgctgccatgagttccggccaggcagtgccctatcccggattgcaatgcccacccctccctcctagggtaggtctacctacccagcaaggcttctctagtcaattcgtgagtccatacccccctcctttaccccaaaggcctcccccaagactccccccccatcaaccaggcttcatactgcagtag

SEQ ID NO: 216212 - DNA, 858 bp, Artificial Sequence
  derived and/or modified sequence
atggccggggccggcagcgaggccaggtttgctggcctgagcctggtgcagctgaatgagctgctggaggatgagggccagctgacagagatggtgcagaagatggaggagacccagaatgtgcagctgaacaaggagatgaccctggccagcaacagaagcctggccgagggcaacctgctgtaccagccccagctggacaccctgaaggcccggctgacccagaagtaccaggagctgcaggtgctgtttgaggcctaccagatcaagaagaccaagctggaccggcagagcagcagcgccagcctggagaccctgctggccctgctgcaggccgagggcgccaagattgaggaggacacagagaacatggccgagaagttcctggatggagagctgcccctggacagcttcattgatgtgtaccagagcaagaggaagctggcccacatgagaagagtgaagattgagaagctgcaggagatggtgctgaagggccagaggctgccccaggccctggcccccctgcccccccggctgcctgagctggcccccacagcccccctgccctacccagcccctgaggccagcggccccccagctgtggccccccggcgcatccccccacctcctcctcctgtgcctgctggccgcctggccacccccttcaccgctgccatgagcagcggccaggccgtgccctacccaggcctgcagtgcccccccctgcccccccgggtgggcctgcccacccagcagggcttcagcagccagtttgtgagcccctaccccccacccctgccccagaggcccccaccccggctgcccccccaccagcccggcttcatcctgcagtag

SEQ ID NO: 216213 - DNA, 858 bp, Artificial Sequence
  derived and/or modified sequence
atggccggcgccggcagcgaggcccggttcgccggcctgagcctggttcagttaaacgagctcttagaggatgagggtcagctgacagaaatggtacagaaaatggaagaaacccagaacgtgcagctgaacaaagaaatgacactcgccagcaacaggagcctggccgagggcaatctgttgtaccagcctcaactcgacacactgaaggcgagacttactcagaaatatcaggaactgcaggtgctgttcgaggcctatcagattaaaaaaacaaagctagatcgccagtcaagtagcgcgtcactggagactcttctcgcactcctccaggcagaaggtgccaagattgaagaggatacagaaaacatggctgagaaattccttgatggcgagctgccattggactccttcatagacgtttaccagagcaagcgtaaactggcacatatgcgtcgagttaaaatagagaagctgcaggaaatggttctcaagggacaacgcctgccacaggccctggctcctcttcccccccgtctgcctgagcttgcaccaacagctccgctcccttatcctgcaccagaggcctctggaccccctgcagtggcaccccggagaataccccctccccctcctccggttccggccggacggctagctaccccatttactgccgcgatgagctctgggcaagctgtaccgtacccaggcctgcaatgccctcccctgccacccagggtagggttgcctacgcaacaggggtttagtagccagtttgtgtcaccttaccccccccctcttcctcaacgccccccgccgagactgccaccccatcagccaggatttattctccagtag

SEQ ID NO: 216214 - DNA, 858 bp, Artificial Sequence
  derived and/or modified sequence
atggccggagcgggttctgaggccagattcgccggactttctctagtgcagctgaacgagctattggaggacgagggtcagctgaccgagatggtacaaaagatggaggaaacacaaaatgtgcaactgaacaaagagatgacactggcaagcaaccgctccctagctgagggaaatcttctctatcaacctcaactagatacgctaaaagcaaggctgacccagaaataccaagagctgcaggtcctgttcgaagcgtaccagatcaaaaaaaccaaactggatagacagtcatcctcggcttccctcgaaacactgttggccctgctgcaggcagaaggggctaaaatcgaagaggacacagagaacatggccgagaaatttctggatggcgagttgccactcgactccttcatcgacgtgtaccagagcaaaaggaaactcgcccatatgaggagagtcaagattgaaaaactacaggagatggttctcaaggggcagcgactgcctcaggccctcgcacccctgcctccaaggctgcccgagctggcaccgaccgccccattgccctatccggcacctgaggcttcagggcctcccgctgtggcaccacgcaggatacctcctcctcccccaccagttcccgctggcagactggctactccctttacggccgctatgtcatctggacaggccgtgccttaccccggactccagtgtccccctttacccccaagagttgggttgccaacccagcaaggatttagcagccagttcgtcagtccataccctccacctctacctcagcgaccgccacccaggcttcctcctcatcagcccggattcatactccagtag

SEQ ID NO: 216215 - DNA, 3021 bp, Artificial Sequence
  derived and/or modified sequence
gggctcacaggctgcgggaacttccttcccactgcctgttttccttggatcgcggtatctctcttcctggaggaaaaaggctcttatgacctcatggcgcgctctcccgagccgcagtgacgtcattaatgcgctcacgcgtcacagcccaatcatagggcccttcccctccctttagaagtcccgactgtccctgacacattccactccaagcgagccgcgacacttacgtcacgtccgcccgcccgcgcggtgatgacgtcacgacccagggctggcgtcacgtgtcccccccgcggggggcggcccttgagggcggcgcttccggtcggcggagcctggtggccgcagcggcggtggcgacgacggccgagacgtggggatggcgggcgccgggagcgaagcccggttcgccgggctgtcgctggtgcagctcaacgagctgctggaggacgagggccagctgacggagatggtgcagaagatggaggagacacagaatgttcagcttaacaaagaaatgacacttgccagcaaccggagcctggcagaaggaaaccttttgtaccagccccagctggacacgttgaaagcacgcttgacccagaaataccaggaactccaggttctctttgaagcctatcagataaagaagaccaaattagacagacagtctagcagtgcttccttggagaccctgttagcacttcttcaggcagaaggggccaagattgaggaagacactgagaacatggcagagaagtttctggatggagaacttcctctggattccttcattgatgtctatcagagcaaacggaaactggcccacatgcgacgggtgaaaatcgagaagctccaggagatggtcctaaaggggcagagactcccacaggccctggccccgctgccccccaggctgcccgaactggcacctaccgccccccttccctaccctgccccagaggccagtgggcctcctgccgttgcacctcggcgcatcccccccccaccacccccggtgcctgcgggacgcttagccaccccgtttactgcggccatgagttcgggacaggccgtgccgtacccaggattacagtgcccgcccctgcccccccgcgtgggcctccccactcagcaaggattctcttcgcagttcgtgtccccatatccgccacctctccctcagagacccccgccccggctccctccacaccagccgggtttcatcctccagtgagcgccggcgcggtccttcccgggagacttcttccacctggcgtgttgtgctctgctcacgggaaggaggctggaggtccgctctgtgccaagggctctggggccctgggccagcgtgtctgtctgattttagaactgtaggtcagtggtgagtagtaggagcccaggctttgggcatcaaggcagttgtgtgtgccgggttacagcctgacacctgtgcgttgcatcggtttgcattatccgtgtgatttctaagtatcttagcgttgatgaactcatgtttgggaagaaataggcctctcccccagtcccatttagaatcgtggtccttctgttgcagctttatttaatgagcatggttcatgatacttattttattttcgaaagacagtcctatgtgtctcacccaccggccactgcagccctggtgagggcgggtgggcgccggccggcctggaagagcgccgtggctgggccaccacctgtggctgcgttgttgctcactgaatctgttggggagaggtcaccatagtcaccgcctgacctggctgctgctcttgcttcagagccacaagcaaagtttgcactgggcccactgccgagtccagaggccggagaacggccactggtgtgggaggggagcgcacgagtgggactttgcacagcaaattgtgtccccagctcctcctctcccgcctgcctggagccggccctgaaggtttctatgaagaaataatcccccaatatttttactacgtgtgtgattttcctgttttatattgaaaaaacttttttgacactcccaagaccattcagggaaattttataaaaaatgcagatactgtcttgagcagatcgaaatgccgatgaagtggatgcaatttccttttgtgcaagcagtgcacggtgcccccccctcgggtgtccgtgctgtgccttagcttccccaggtgccgggactcacacctgctaggggctgggcaaggccccggctctgctttctctgaagggcttgtccaagttcattgccctgttacaggtggtcaagacgtccggccgccttgacccaggctacccttagccaatatcctctgcccctgggtggctggtggctgggcctcagggtgggcaacgttaggggtttggcgaaagcccgccccatgggattgagggacggggctgcactccaaccgtctgcacctgctcttcccccacccctgtgggacctcatcttcacgtgccatgtgtgctgaaggcccagggcccagcagggggcagtggcacctgttgacggaaaaggccgaggtgcttaccagtggaccttctggcccgcccctcccctgtcacttgtcgggcatccagggccccgacctgtgcctagccgccagggtgacagaaggcagaactgaagcggggtctgggccacgggccaggccactgccttttgtcctcagtgaccgtacattcctgctctcggacttgaactctactgtaactgttttcttaaaggaaatgaagctgtacaggacgattcactgccatgccagtcaggcgggcttgccatgttctgtgaatctcgagtgagcggtgccacccgcccccatacctccgccaccggccgctgtcggggatgccacagcctgccacggtcgcagccagacgtgagcttggcattgaagttgcaaagcggcccctggccgggctcgccgtcgctgtccagggccgtgtccggtgctgtggctgtaaagctgtaggaccctttttaataaatagagaattatt

SEQ ID NO: 216216 - protein, 627 aa, Artificial Sequence
  derived and/or modified sequence
MLTDSGGGGTSFEEDLDSVAPRSAPAGASEPPPPGGVGLGIRTVRLFGEAGPASGVGSSGGGGSGSGTGGGDAALDFKLAAAVLRTGGGGGASGSDEDEVSEVESFILDQEDLDNPVLKTTSEIFLSSTAEGADLRTVDPETQARLEALLEAAGIGKLSTADGKAFADPEVLRRLTSSVSCALDEAAAALTRMKAENSHNAGQVDTRSLAEACSDGDVNAVRKLLDEGRSVNEHTEEGESLLCLACSAGYYELAQVLLAMHANVEDRGNKGDITPLMAASSGGYLDIVKLLLLHDADVNSQSATGNTALTYACAGGFVDIVKVLLNEGANIEDHNENGHTPLMEAASAGHVEVARVLLDHGAGINTHSNEFKESALTLACYKGHLDMVRFLLEAGADQEHKTDEMHTALMEACMDGHVEVARLLLDSGAQVNMPADSFESPLTLAACGGHVELAALLIERGANLEEVNDEGYTPLMEAAREGHEEMVALLLAQGANINAQTEETQETALTLACCGGFSEVADFLIKAGADIELGCSTPLMEASQEGHLELVKYLLASGANVHATTATGDTALTYACENGHTDVADVLLQAGADLDKQEDMKTILEGIDPAKHQVRVAFDACKLLRKE

SEQ ID NO: 216217 - DNA, 1884 bp, Artificial Sequence
  derived and/or modified sequence
atgctcactgactcagggggcggggggacctcctttgaagaagaccttgatagtgttgctccgaggagcgccccagctggagcctccgagccacctcctcccggcggcgttggtctgggcatacggaccgtgcgcctgttcggagaagcaggccctgcctcaggtgtcggttcttcaggaggcggaggatccggttctgggaccggcggaggggacgctgcgctggatttcaaactcgcggccgcagtcctgagaacagggggcggtggcggcgcctccggctcagatgaggatgaggtgtccgaggtcgagtcatttattttggaccaggaggatttggacaaccccgtgctgaaaacaaccagcgaaatttttcttagtagcaccgccgagggagccgatctccgtaccgttgacccagagacccaggcacgtttagaagctctcctggaagccgcgggaatcgggaaactatccaccgctgacggcaaagcctttgccgacccggaggtgttgcggagactcacctcctccgtgagttgtgccctagatgaggctgcagcagccctcactcgtatgaaagccgagaattcccacaacgccgggcaggtggatacacgttccctcgctgaggcttgctccgacggcgatgttaacgcagtcagaaagcttctagatgagggccgatcagtgaatgagcacactgaggagggtgaaagcttactctgcttagcatgcagtgccggttactatgagcttgcacaggtacttctcgccatgcatgccaatgtcgaagataggggcaacaaaggcgacataactccactgatggcagcctctagcggcggctatctggacattgtaaaattgctgctgttacacgatgctgatgtcaactcccagtccgccactgggaacacagccctgacttatgcctgcgccggtggcttcgtggatatcgtcaaggtgctgctgaatgagggggcaaacatcgaggatcacaacgaaaatggccatacacctctaatggaggcagcatccgctggacatgtcgaagttgcaagagttctgctggatcacggtgccggaattaacactcattctaatgaattcaaggagtctgcactaaccctggcctgctacaaagggcatctggacatggtgcgatttctcctagaagctggggcagaccaagagcataaaaccgatgagatgcatacggcacttatggaggcatgcatggacggtcacgttgaagtggccaggcttctcctggactctggcgcccaagtcaacatgcctgctgattccttcgagagccctctgacactggctgcctgtgggggccacgtggagttggcagccctcttgattgaaagaggcgcgaacctagaggaggtcaatgatgaaggctacactcccctaatggaggccgcacgggagggccatgaggaaatggtggcactgctcctggcgcagggcgcaaacattaatgctcagacggaggaaacccaagagaccgccttgacactggcctgttgcggtggattttcagaggtggctgatttcttaataaaggccggagccgatattgagttgggctgcagcacccctttgatggaagcaagccaggaaggccacttagagttggtgaaatatttacttgcctctggggctaatgtgcacgcaacgactgccaccggggataccgcccttacttatgcttgcgagaatggtcatacggatgtggctgatgtcctgcttcaggccggtgcggatctcgataaacaagaggacatgaagacaatactggaagggatcgatccggctaagcaccaggtccgtgtcgcctttgacgcctgcaaactgcttcggaaggagtag

SEQ ID NO: 216218 - DNA, 1884 bp, Artificial Sequence
  derived and/or modified sequence
atgctgacagattctgggggcggcggcaccagctttgaggaggacctggacagcgtggcccccaggtctgccccagctggggccagcgagcccccacctcctgggggcgtgggcctgggcatcagaacagtgcggctgtttggagaggccggccctgccagcggcgtgggcagcagcggcggcggcggcagcggcagcggcaccggcggcggagatgctgccctggacttcaagctggccgctgctgtgctgaggactggaggcggcggcggggccagcggcagtgatgaagatgaggtgtctgaggtggagagcttcatcctggaccaggaggacctggacaaccctgtgctgaagaccaccagcgagatcttcctgagcagcacagctgagggcgctgacctgaggacagtggaccctgagacccaggcccggctggaggccctgctggaggccgccggcatcggcaagctgagcacagcagatggcaaggcctttgctgaccctgaggtgctgcggcggctgaccagctctgtgtcctgtgccctggatgaggccgccgccgccctgaccaggatgaaggccgagaacagccacaatgccggccaggtggacaccaggagcctggccgaggcctgcagtgatggagatgtgaatgctgtgaggaagctgctggatgagggccgctctgtgaatgagcacacagaggagggggagagcctgctgtgcctggcctgcagcgctggctactatgagctggcccaggtgctgctggccatgcacgccaacgtggaggaccggggcaacaagggggacatcacccccctgatggccgccagcagcggcggctacctggacatcgtgaagctgctgctgctgcatgatgctgatgtgaacagccagagcgccaccggcaacacagccctgacctacgcctgtgccggcggctttgtggacatcgtgaaggtgctgctgaatgaaggagccaacatcgaggaccacaatgaaaatggccacacccccctgatggaggccgccagcgctggccacgtggaggtggcccgggtgctgctggaccacggggccggcatcaacacccacagcaatgagttcaaggagagcgccctgaccctggcctgctacaagggccacctggacatggtgcgcttcctgctggaggccggggctgaccaggagcacaagacagatgagatgcacacagccctgatggaggcctgcatggatggccacgtggaggtggcccggctgctgctggacagcggggcccaggtgaacatgcctgctgacagctttgagagccccctgaccctggccgcctgtggcggccacgtggagctggccgccctgctgattgaaagaggagccaacctggaggaggtgaatgatgagggctacacccccctgatggaggccgcccgggagggccacgaggagatggtggccctgctgctggcccagggcgccaacatcaatgcccagacagaggagacccaggagacagccctgaccctggcctgctgcggcggcttcagcgaggtggccgacttcctgatcaaggccggggctgacatcgagctgggctgcagcacccccctgatggaggccagccaggagggccacctggagctggtgaagtacctgctggccagcggggccaacgtgcacgccaccacagccactggagacacagccctgacctacgcctgtgaaaatggccacacagatgtggctgatgtgctgctgcaggccggggctgacctggacaagcaggaggacatgaagaccatcctggagggcattgatcctgccaagcaccaggtgcgggtggcctttgatgcctgcaagctgctgaggaaggagtag

SEQ ID NO: 216219 - DNA, 1884 bp, Artificial Sequence
  derived and/or modified sequence
atgctgaccgacagcggcggcggcggcaccagcttcgaggaggacctggattcagtcgctcctagatctgcaccagcaggtgctagtgagcccccaccaccgggaggcgtgggcctgggtatcaggaccgtgcgtctgttcggtgaggctggtcccgcctccggcgtcggttcctctggggggggaggttctggaagtggcaccggaggaggcgatgctgccctggatttcaagttggcagccgcggtacttcgaaccggtggggggggaggagcctccggatctgacgaagatgaggtgagcgaagtggaatcgttcatactggaccaggaggacctggacaatcctgttctgaaaaccacatcagagatcttcctgtctagcaccgccgagggcgccgacctcaggactgtggaccccgagacccaggcgagactcgaggcccttctggaagcagcaggaattggaaaactgagcacagccgatggaaaggcttttgccgacccggaggtcctgagacggctgaccagctccgtgtcctgcgcgctggacgaggccgctgcagccctgacaaggatgaaggccgaaaattctcacaacgctggacaggtggacaccagatctctggccgaagcatgcagtgatggcgacgtaaatgctgtgcggaagctcctggacgaggggaggagtgtcaacgagcacacagaagagggcgagtccctcctgtgccttgcctgttccgccgggtattatgaattagcgcaggtgctgttggcaatgcacgcaaacgtggaagaccggggtaacaagggcgatatcacaccccttatggcggcttcgtccgggggttacctcgacatcgtcaaactgcttctgctgcacgatgcggacgtaaacagccaatcagctactgggaacacagcgctcacgtatgcttgtgcgggcggctttgttgatattgtcaaggtcctgctcaacgagggagcgaatatcgaggaccataacgaaaacgggcacactccactcatggaggcagcgtccgctggtcatgttgaagtggcaagggtgctactagaccatggggcgggtatcaatacgcatagcaatgagtttaaagagtcagcgctgacgctggcgtgctacaaaggtcatctggatatggtccggttcctgcttgaagcaggggcagaccaggagcataagacagacgagatgcacactgccctgatggaggcatgcatggacggacacgtggaggtggctcgactcctgttggacagcggcgcccaagttaatatgccggctgattctttcgaatcccccctgactctggccgcctgtgggggacacgtggaactggctgctctgttgattgagcggggcgctaatttagaagaagtgaatgacgaaggctatacccccctgatggaggccgcccgggaaggccacgaagaaatggtggccctcctgttggctcagggagcaaatataaatgcccagacggaggaaacacaagaaactgcactaaccctggcctgttgtggcggctttagtgaagtcgcagactttctgattaaagctggggctgatatcgaactggggtgcagcacccctttgatggaagcctcgcaagaggggcacttggagctggttaagtatttgctcgcctctggcgcaaacgtccacgctaccacggccacaggcgatacagccttaacgtacgcatgcgagaatggccacacagacgtggcagacgttcttctgcaggccggggcagacctggacaaacaggaggacatgaaaacgatcctggagggaattgatccagccaaacatcaggttagagtggcattcgacgcctgtaagctgcttaggaaagaatag

SEQ ID NO: 216220 - DNA, 2135 bp, Artificial Sequence
  derived and/or modified sequence
ctgggacgggggaaaggagacgcttcttcctcttgctgctcttctcgttcccgagatcagcggcggcggtgaccgcgagtgggtcggcaccgtctccggctccgggtgcgaacaatgctgactgatagcggaggcggcggcacctcctttgaggaggacctggactctgtggctccgcgatccgccccagctggggcctcggagccgcctccgccgggaggggtcggtctggggatccgcaccgtgaggctctttggggaggccgggccagcgtcgggagtcggcagcagcggcggcggcggcagcggcagcggtacgggcggaggggacgcggcgctggatttcaagttggcggctgccgtgctgaggaccgggggtggaggtggtgcctctggcagtgacgaggacgaagtgtccgaggttgaatcatttattttggaccaagaagatctggataacccagtgcttaaaacaacatcagagatattcttatcaagtactgcagaaggagcagacttacgcactgtggatccagagacacaggcacgactagaagcattgctagaagcagcaggaattggcaaattgtcaactgctgatggtaaagcttttgcagatcctgaggtactccggagactgacatcctcagttagttgtgcactggatgaagctgctgctgcactgacacggatgaaagcagaaaacagccacaatgcaggacaagtggacactcgcagtctagcagaagcttgttcagatggggatgttaatgctgttcgtaaattgctagatgaaggcagaagtgtaaatgaacatacagaagaaggagaaagcctgctgtgtttggcttgttcagcagggtattatgaattagcacaagtattgcttgctatgcatgctaatgttgaagatcgagggaataaaggagacataactcccctgatggcagcttccagtggaggttacttagatattgtgaaattattacttcttcatgatgctgatgtcaactcccagtctgcaacaggaaacactgcgctaacttatgcatgtgctggaggatttgttgacattgttaaagtgctccttaatgaaggtgcaaatatagaagatcataatgaaaatggacatactcccttaatggaagcagccagtgcaggtcatgtggaagttgcaagagttcttttagatcatggtgcaggcatcaacactcattctaatgaattcaaagaaagtgctctaacacttgcttgctacaaaggccatttggatatggttcgctttctacttgaagctggtgcagatcaagagcacaaaacagatgagatgcacactgccttaatggaggcctgcatggatggacatgtagaggtggcacgtttgcttttggatagtggtgctcaagtgaacatgcctgcagattcatttgaatctccattgacgctagctgcctgtggaggacatgttgaattggcagctctacttattgaaaggggagcaaatcttgaagaagttaatgatgaaggatacactcccttgatggaagctgcccgggaaggacatgaagaaatggtggcactactcttagcacaaggagcaaatataaatgcccagacagaagaaactcaagaaactgctcttactttggcttgctgtggaggattttctgaagttgcagactttcttattaaggcaggggctgatatagaacttggctgctccacacctctgatggaggcatctcaggagggacacctggaattggttaaatatttgctggcttctggcgctaatgtgcatgctacaacagcaacaggagacacagccttaacctatgcttgtgaaaatggacatacggatgttgcagatgttttacttcaagcaggggctgatttagacaagcaggaggacatgaagactattttggagggcatagatccggccaagcatcaggtgagggtggcctttgatgcttgtaagctactacgtaaagaatagatgttgtaggtaaccagaactctggatatctgaattccagccaagaagttccaggaccctgctgggtgacaaaggaaatcctcttcaattgaaaaagattatgaagtcccaataaaaagagatttgtattgctggta

SEQ ID NO: 216221 - DNA, 1884 bp, Artificial Sequence
  derived and/or modified sequence
atgctcaccgactctggtggcggagggacaagctttgaagaggacctggacagcgtggcaccacggtccgcgccagccggagcctctgagcccccacctccaggtggtgtgggcctaggaattcgcacagtgcgactgttcggggaagcgggtccagccagcggggtgggctcctcgggagggggaggttccggttccggaacaggtggcggtgatgcagctctggattttaaactggccgctgcagtactgagaaccggtgggggagggggagcctctggcagtgatgaggatgaagtgagtgaggtggagagttttatcctggatcaggaagacctcgataatcctgttctcaagaccactagcgaaattttcctgtcttccactgccgaaggcgcagacctgagaaccgtcgaccctgagacccaagcccgactggaagcgctgctcgaagcggctggcataggcaaactgtctacagctgacggcaaagccttcgctgatccggaagtgctgagaaggctcacctcatctgtttcctgtgcattagatgaagccgctgccgctcttaccagaatgaaagccgagaatagccataatgctggtcaggtcgacacccggtctcttgccgaggcctgtagtgacggcgacgttaacgcagttcgcaagctgttagacgagggccgatccgtgaacgagcacaccgaggagggcgagtctctcctttgtctcgcttgttccgccggatattatgagcttgctcaggtgctcctggctatgcacgccaacgtggaagatcgagggaataaaggcgacattacgcctctgatggccgcttcatctgggggttatttggatatcgtcaaattacttctgctacacgacgcagatgtcaacagtcagagcgccaccgggaataccgcacttacgtatgcctgtgccggtggattcgtcgacattgtgaaggtgcttctgaatgagggagctaatatcgaagatcacaatgagaacggccacaccccactcatggaagcagcgtctgcaggtcatgtggaggtggctagggttctgttagaccatggcgctggcatcaacacccactctaatgagttcaaggagtctgctttgacccttgcctgctataagggacaccttgatatggtgcgcttccttttggaggctggcgcagatcaagaacacaagaccgacgaaatgcacaccgcgctaatggaagcatgtatggatgggcatgtggaggttgccagacttctgctggattctggcgctcaagttaatatgccggcagacagcttcgaatcccccctaacactagcagcttgtggtggccacgtggagttggctgccctgctgatcgagagaggcgctaacttggaggaggtgaacgacgaagggtacacaccactgatggaagcagccagagaagggcacgaagagatggtggccttgctgctagcccagggagccaatatcaatgcgcagaccgaggagacgcaggaaacggcactaacccttgcttgttgtgggggattcagtgaagtcgccgatttcctgattaaagccggagctgatatcgagctcggctgctccacccctctgatggaagccagtcaggaaggacatctggagttggtcaagtacctcctggcgtccggcgctaatgtgcacgccacaactgctactggagacacagctctgacttacgcatgcgaaaatggccacacggacgttgctgacgtcctactgcaggcaggggctgatctggacaagcaagaggacatgaagaccattttggaaggaatagacccagcgaaacatcaggttagggtcgcgtttgatgcatgtaagctgttgcgcaaagaatag

SEQ ID NO: 216222 - DNA, 1884 bp, Artificial Sequence
  derived and/or modified sequence
atgctgaccgacagcggcggcggcggcaccagcttcgaggaggacctggacagcgtggcccccagaagcgcccccgccggcgccagcgagccccccccccccggcggcgtgggcctgggcatcagaaccgtgagactgttcggcgaggccggccccgccagcggcgtgggcagcagcggcggcggcggcagcggcagcggcaccggcggcggcgacgccgccctggacttcaagctggccgccgccgtgctgagaaccggcggcggcggcggcgccagcggcagcgacgaggacgaggtgagcgaggtggagagcttcatcctggaccaggaggacctggacaaccccgtgctgaagaccaccagcgagatcttcctgagcagcaccgccgagggcgccgacctgagaaccgtggaccccgagacccaggccagactggaggccctgctggaggccgccggcatcggcaagctgagcaccgccgacggcaaggccttcgccgaccccgaggtgctgagaagactgaccagcagcgtgagctgcgccctggacgaggccgccgccgccctgaccagaatgaaggccgagaacagccacaacgccggccaggtggacaccagaagcctggccgaggcctgcagcgacggcgacgtgaacgccgtgagaaagctgctggacgagggcagaagcgtgaacgagcacaccgaggagggcgagagcctgctgtgcctggcctgcagcgccggctactacgagctggcccaggtgctgctggccatgcacgccaacgtggaggacagaggcaacaagggcgacatcacccccctgatggccgccagcagcggcggctacctggacatcgtgaagctgctgctgctgcacgacgccgacgtgaacagccagagcgccaccggcaacaccgccctgacctacgcctgcgccggcggcttcgtggacatcgtgaaggtgctgctgaacgagggcgccaacatcgaggaccacaacgagaacggccacacccccctgatggaggccgccagcgccggccacgtggaggtggccagagtgctgctggaccacggcgccggcatcaacacccacagcaacgagttcaaggagagcgccctgaccctggcctgctacaagggccacctggacatggtgagattcctgctggaggccggcgccgaccaggagcacaagaccgacgagatgcacaccgccctgatggaggcctgcatggacggccacgtggaggtggccagactgctgctggacagcggcgcccaggtgaacatgcccgccgacagcttcgagagccccctgaccctggccgcctgcggcggccacgtggagctggccgccctgctgatcgagagaggcgccaacctggaggaggtgaacgacgagggctacacccccctgatggaggccgccagagagggccacgaggagatggtggccctgctgctggcccagggcgccaacatcaacgcccagaccgaggagacccaggagaccgccctgaccctggcctgctgcggcggcttcagcgaggtggccgacttcctgatcaaggccggcgccgacatcgagctgggctgcagcacccccctgatggaggccagccaggagggccacctggagctggtgaagtacctgctggccagcggcgccaacgtgcacgccaccaccgccaccggcgacaccgccctgacctacgcctgcgagaacggccacaccgacgtggccgacgtgctgctgcaggccggcgccgacctggacaagcaggaggacatgaagaccatcctggagggcatcgaccccgccaagcaccaggtgagagtggccttcgacgcctgcaagctgctgagaaaggagtag

SEQ ID NO: 216223 - protein, 614 aa, Artificial Sequence
  derived and/or modified sequence
MMRQATMDFSTPSVFDQQRGDSSEEVDLTMVYQAASNGDVNALTAVIREDPSILECCDSEGCTPLMHAVSGRQADTVKLLLKMGANINMQDAYGRTSLCLATYLGWLEGCVSLLRNGAKHNIPDKNGRLPLHAATAEPDMRLLTVLLQQSNISEINHQDNEGMTPLHWAAFHNQPQHTQMLLKKGADPTLVDKDFKTALHWAVQSGNRILCSIILSHHQGPSIINYDDESGKTCVHIAAAAGFSDIIHELARVPECNLQALDVDDRTPLHWAAAAGKAECVQSLLELGMDSNLRDINESTPLAYALYCGHTACVKLLSQESRTEPTRPPPSQSSRPQKKERRFNVLNQIFCKNKKEEQRAHQKDPSRDRYREEDTSEVNDIITTFDSIVGTNCQEQPGDQVAMVEFKKKTSDNSKYLLPEKKPLARKGLPPIRTQSLPPITLGNNFLTASHRATSHAGLSSAPHHMAQRSQKSRSEQDLLNNRTGCQMLLDNPWKSDSNQVFSYKVWTVSSSDKLLDRLLSVRPGHQEVSVPPHLRHLHNPSSGQNFQHLSPNRHKIRDLPFTRNNLAPLPDQKFLSGEPLRTNRVLPAIPSQRRHSTAAEESEHSANPTSDEN

SEQ ID NO: 216224 - protein, 326 aa, Artificial Sequence
  derived and/or modified sequence
MDSNLRDINESTPLAYALYCGHTACVKLLSQESRTEPTRPPPSQSSRPQKKERRFNVLNQIFCKNKKEEQRAHQKDPSRDRYREEDTSEVNDIITTFDSIVGTNCQEQPGDQVAMVEFKKKTSDNSKYLLPEKKPLARKGLPPIRTQSLPPITLGNNFLTASHRATSHAGLSSAPHHMAQRSQKSRSEQDLLNNRTGCQMLLDNPWKSDSNQVFSYKVWTVSSSDKLLDRLLSVRPGHQEVSVPPHLRHLHNPSSGQNFQHLSPNRHKIRDLPFTRNNLAPLPDQKFLSGEPLRTNRVLPAIPSQRRHSTAAEESEHSANPTSDEN

SEQ ID NO: 216225 - DNA, 1845 bp, Artificial Sequence
  derived and/or modified sequence
atgatgagacaggccaccatggacttcagcacccccagcgtgttcgaccagcagagaggcgacagcagcgaggaggtggacctgaccatggtgtaccaggccgccagcaacggcgacgtgaacgccctgaccgccgtgatcagagaggaccccagcatcctggagtgctgcgacagcgagggctgcacccccctgatgcacgccgtgagcggcagacaggccgacaccgtgaagctgctgctgaagatgggcgccaacatcaacatgcaggacgcctacggcagaaccagcctgtgcctggccacctacctgggctggctggagggctgcgtgagcctgctgagaaacggcgccaagcacaacatccccgacaagaacggcagactgcccctgcacgccgccaccgccgagcccgacatgagactgctgaccgtgctgctgcagcagagcaacatcagcgagatcaaccaccaggacaacgagggcatgacccccctgcactgggccgccttccacaaccagccccagcacacccagatgctgctgaagaagggcgccgaccccaccctggtggacaaggacttcaagaccgccctgcactgggccgtgcagagcggcaacagaatcctgtgcagcatcatcctgagccaccaccagggccccagcatcatcaactacgacgacgagagcggcaagacctgcgtgcacatcgccgccgccgccggcttcagcgacatcatccacgagctggccagagtgcccgagtgcaacctgcaggccctggacgtggacgacagaacccccctgcactgggccgccgccgccggcaaggccgagtgcgtgcagagcctgctggagctgggcatggacagcaacctgagagacatcaacgagagcacccccctggcctacgccctgtactgcggccacaccgcctgcgtgaagctgctgagccaggagagcagaaccgagcccaccagacccccccccagccagagcagcagaccccagaagaaggagagaagattcaacgtgctgaaccagatcttctgcaagaacaagaaggaggagcagagagcccaccagaaggaccccagcagagacagatacagagaggaggacaccagcgaggtgaacgacatcatcaccaccttcgacagcatcgtgggcaccaactgccaggagcagcccggcgaccaggtggccatggtggagttcaagaagaagaccagcgacaacagcaagtacctgctgcccgagaagaagcccctggccagaaagggcctgccccccatcagaacccagagcctgccccccatcaccctgggcaacaacttcctgaccgccagccacagagccaccagccacgccggcctgagcagcgccccccaccacatggcccagagaagccagaagagcagaagcgagcaggacctgctgaacaacagaaccggctgccagatgctgctggacaacccctggaagagcgacagcaaccaggtgttcagctacaaggtgtggaccgtgagcagcagcgacaagctgctggacagactgctgagcgtgagacccggccaccaggaggtgagcgtgcccccccacctgagacacctgcacaaccccagcagcggccagaacttccagcacctgagccccaacagacacaagatcagagacctgcccttcaccagaaacaacctggcccccctgcccgaccagaagttcctgagcggcgagcccctgagaaccaacagagtgctgcccgccatccccagccagagaagacacagcaccgccgccgaggagagcgagcacagcgccaaccccaccagcgacgagaactag

SEQ ID NO: 216226 - DNA, 1845 bp, Artificial Sequence
  derived and/or modified sequence
atgatgagacaggcaactatggactttagcaccccttcggtcttcgaccagcagaggggagatagtagcgaggaagtggatctcacgatggtgtatcaggcggccagcaatggggatgtgaatgctcttactgcagtgattcgagaagatcctagcatcctagagtgctgtgactcagagggttgtacccccctcatgcacgcagtttctggtaggcaagccgataccgtcaaactccttttgaaaatgggagcaaacatcaatatgcaggatgcttacgggcgaacttcactgtgtctcgcaacctatctggggtggctggaggggtgtgttagtcttttacggaacggggccaaacataacatcccagacaagaacgggaggttgccacttcatgccgcaactgccgagcctgatatgagactgttgacagtgctgctgcagcaatctaatattagcgaaatcaaccaccaggataacgaaggcatgacacccctgcactgggcagcctttcataaccagcctcagcacacacaaatgctgttgaaaaagggggctgatcctacacttgttgacaaggacttcaaaacggcattgcattgggctgtacagagcggcaaccggatattgtgttctatcatcctatctcaccatcagggacctagtatcattaactatgacgacgagagtgggaaaacgtgcgtacacatcgccgccgcagccggattcagcgatataatacatgaacttgccagagtgcccgaatgtaatctgcaagcactcgacgtcgacgataggacgcctctgcattgggcagcagccgcaggcaaggccgagtgtgtgcagagccttctagagctcggtatggatagcaatcttagggatataaacgaatcaaccccactcgcttatgccttgtactgtggtcatactgcttgcgtaaagctgctttcccaagaaagtagaaccgagcctacacgcccgcccccgagccagtcctctcggccgcagaagaaagagagaagatttaacgttctcaaccagattttctgtaagaataaaaaagaagaacagagagcccatcagaaagatccatcaagggaccgctacagagaggaagacaccagcgaggtcaatgacatcataactactttcgattccatcgtgggcacgaattgccaggagcaaccaggcgaccaggtagctatggtggaatttaaaaagaagacaagcgacaactcgaagtatttgctgccagaaaagaaacccttggcaagaaaagggctcccgcccattcgaactcagtccctgcctccaataacactggggaataattttctgacggcatctcacagggccacctctcatgccggactttcctctgctccccaccacatggcacagcgaagtcagaaatcaaggagcgaacaggacctgctgaacaatcgtaccggctgccagatgctgctggataatccctggaagtctgacagcaaccaggtcttttcttacaaggtttggacagtaagctcctccgacaagctgctggaccgtctgctcagcgtaagaccaggtcatcaggaagtttccgttcccccacaccttagacatctgcacaacccttcatccggccagaatttccaacatctgagtcctaaccggcacaagattcgagatttgccgttcactcgaaataacttagcgccactccccgaccagaagtttctgagtggagagccactaagaactaatcgagtgctccctgctatacctagccagcgacgccacagtactgccgccgaggagtcggagcacagcgccaaccccaccagtgacgagaactag

SEQ ID NO: 216227 - DNA, 1845 bp, Artificial Sequence
  derived and/or modified sequence
atgatgaggcaggccacgatggacttcagtacgccatccgtgtttgaccagcagcggggcgacagttccgaagaagtggatctcactatggtataccaggcggctagtaacggggacgttaacgcactgactgcggtcatcagggaagatccctctattctggagtgctgcgacagtgaaggatgtacacccctgatgcatgcggtaagtgggcgtcaggcagatactgtgaaactgctgctgaaaatgggggctaacatcaatatgcaggacgcctacgggagaacctcgctttgtttagccacctacttgggctggctggaagggtgcgtgtctctgctcaggaatggggctaaacacaatatccccgataagaacggccgccttcctttgcatgctgccaccgccgaacccgatatgcgcctgctgacggttctgctgcagcagtccaacatttccgaaattaaccatcaggataacgaaggaatgactcccttgcactgggctgcgttccataaccagccccaacacactcaaatgcttctgaaaaagggcgccgaccccaccctggtggataaggattttaagacagctctgcactgggccgtacagtccggaaacaggattttgtgcagcatcatcctgtcccaccaccagggaccatctattatcaattacgacgacgagtcaggcaagacctgtgttcacatcgctgcagccgctgggttctccgacattatccacgagctggccagagtgcccgagtgcaacctacaggccctagacgtggatgatcgcactccactccattgggctgctgctgccgggaaggccgagtgtgtgcagagtttactggaactgggcatggattcgaatttgagagacattaacgagagtacaccacttgcctacgccctgtattgtggccatacagcctgcgtgaagctccttagtcaggagtcccgaacagaaccaactcgccccccacccagtcaatctagcaggccccagaaaaaagaaagaaggttcaacgtgctgaaccagatattctgcaaaaacaaaaaggaggaacagcgcgctcaccagaaggacccgagccgcgacagatatagagaagaggatacctccgaagtgaacgacattataaccacctttgatagcatagtcggtaccaactgccaggaacagcctggggatcaggtagcaatggtggaatttaagaagaaaaccagcgacaactctaagtacctcctacctgagaaaaagccgttagctagaaaaggcctgccccccatcagaacacagagtttgccgcctatcacgctgggaaataacttccttactgcatcccatcgggcgaccagccacgctggccttagctccgcacctcatcatatggctcagcgatcacagaagtcaagaagtgaacaggatctcctgaacaaccgcacagggtgccagatgctcctggataatccctggaagtctgactcaaaccaggtgttcagttataaagtatggactgtgagcagctcagataaactcctcgaccggctcctctccgtgcggcctggacaccaagaggtgtctgtgcccccacatctgcgccacctgcacaacccttccagtgggcagaatttccagcacctttcacctaatcgccacaaaattcgggacctgccctttacgcgaaacaacttagccccccttcctgaccagaaattcttatctggtgagcctctgcgaaccaatcgagtgctgccggccattccatcacagagacggcactcaaccgctgcggaggaatctgagcattccgctaatccaacctctgatgaaaactag

SEQ ID NO: 216228 - DNA, 1845 bp, Artificial Sequence
  derived and/or modified sequence
atgatgaggcaggccaccatggacttcagcaccccatctgtgtttgaccagcagagaggagacagcagcgaggaggtggacctgaccatggtgtaccaggccgccagcaatggagatgtgaatgccctgacagctgtgatccgggaggaccccagcatcctggagtgctgtgacagcgagggctgcacccccctgatgcatgctgtgtctggccggcaggccgacacagtgaagctgctgctgaagatgggcgccaacatcaacatgcaggatgcctacggccgcaccagcctgtgcctggccacctacctgggctggctggagggctgtgtgtccctgctgagaaatggagccaagcacaacatcccagacaagaatggccgcctgcccctgcatgctgccacagctgagccagacatgaggctgctgactgtgctgctgcagcagagcaacatcagcgagatcaaccaccaggacaatgaaggcatgacccccctgcactgggccgccttccacaaccagccccagcacacccagatgctgctgaagaagggagctgaccccaccctggtggacaaggacttcaagacagccctgcactgggccgtgcagagcggcaaccgcatcctgtgcagcatcatcctgagccaccaccagggccccagcatcatcaactatgatgatgagagcggcaagacctgtgtgcacatcgctgctgctgctggcttcagtgacatcatccacgagctggcccgggtgcctgagtgcaacctgcaggccctggatgtggatgacaggacccccctgcactgggccgctgctgctgggaaggcagaatgtgtgcagagcctgctggagctgggcatggacagcaacctgcgggacatcaatgaaagcacccccctggcctatgccctgtactgcggccacacagcctgtgtgaagctgctgagccaggagagcaggacagagcccacccggcccccacccagccagagcagccggccccagaagaaggagcggcgcttcaacgtgctgaaccagatcttctgcaagaacaagaaggaggagcagagggcccaccagaaggaccccagccgggaccgctaccgggaggaggacaccagcgaggtgaatgacatcatcaccacctttgacagcatcgtgggcaccaactgccaggagcagcccggggaccaggtggccatggtggagttcaagaagaagaccagtgacaacagcaagtacctgctgcctgagaagaagcccctggccaggaagggcctgccccccatccgcacccagagcctgccccccatcaccctgggcaacaacttcctgacagccagccaccgggccaccagccatgctggcctgagcagcgccccccaccacatggcccagaggagccagaagagccgctctgagcaggacctgctgaacaacagaacaggctgccagatgctgctggacaacccctggaagagtgacagcaaccaggtgttctcctacaaggtgtggacagtgagcagcagtgacaagctgctggaccggctgctgtctgtgcggcccggccaccaggaggtgtctgtgcccccccacctgcggcacctgcacaaccccagcagcggccagaacttccagcacctgagccccaacagacacaagatccgggacctgcccttcaccaggaacaacctggcccccctgcctgaccagaagttcctgtctggagagcccctgcggaccaacagagtgctgcctgccatccccagccagaggaggcacagcacagctgctgaggagagcgagcacagcgccaaccccaccagtgatgaaaattag

SEQ ID NO: 216229 - DNA, 1845 bp, Artificial Sequence
  derived and/or modified sequence
atgatgcggcaggccaccatggacttcagcacccccagcgtgttcgaccagcagaggggagactcctccgaagaagttgatttgactatggtataccaggctgcctccaacggcgacgtgaatgcactgaccgccgtaatccgcgaagatccatctatcctcgaatgttgcgacagtgagggctgcaccccgctcatgcacgcagtctcgggccggcaggccgataccgtcaaactcctgctgaaaatgggagcaaatataaatatgcaagatgcctatggcagaacgagcctttgcctggctacctatcttggctggctggaagggtgcgtaagcctccttcgaaacggcgcaaaacacaatatccctgataagaatggccgcctgcccctgcatgctgcaaccgccgaacctgacatgaggttgctcaccgtgcttttgcagcagtccaatattagcgagatcaatcatcaagacaacgagggcatgaccccacttcattgggccgctttccataaccagccacagcacacccagatgttgcttaaaaaaggggccgatccgaccctggtcgataaggatttcaagaccgcgctccactgggctgtccaatctggtaataggatactgtgttcaattatccttagccatcatcaggggccttctataatcaactacgacgacgagtccgggaaaacatgcgtccacattgccgcggctgcagggttcagcgatatcatccatgagctggcccgcgtacccgaatgtaatttgcaggccttggacgtggacgaccgtacccccctgcactgggcggctgctgcaggtaaggccgaatgcgtacagtctctgctcgagttagggatggattccaacttgcgggatatcaacgagtcgactcctctggcatacgcattatattgcgggcacacagcgtgtgtcaagctgctgtctcaagagtcccgcacagaaccaaccagaccccctcccagccagtcctctagacctcagaagaaggagcgccgattcaatgtcttaaaccagatcttttgcaaaaataaaaaggaggagcaaagggcccaccagaaggacccttcaagggatcggtacagggaggaagatacttctgaagttaatgatataattacaacgtttgacagcattgttggaacaaattgtcaggaacaacctggcgatcaggtcgcaatggtggagttcaaaaaaaagacctctgataatagcaagtacttactgcccgaaaagaagcccttggcacgcaaggggctgcctcctatccgcacccagagcctacctcccatcaccctggggaacaatttcctgacagcatcccaccgtgccacctcacacgcggggctgtcaagcgcaccccatcacatggcacaacggtcacagaaaagcaggagtgagcaggatctgctgaacaacaggaccgggtgccagatgctgctcgacaatccttggaagagtgacagcaatcaggttttttcgtacaaggtgtggactgtaagctcctctgataaactactcgacagactgctatccgtaaggcccggacaccaggaggtctcagttcctccgcatctcaggcatctgcacaacccctcctccgggcagaacttccaacacctgagtcccaaccgtcacaagatacgggacctcccatttactaggaataatctggcaccactccctgatcagaagtttctcagcggcgagccccttcggacaaaccgcgtacttcctgctattccttcacaacggcgacactctacggcagcagaggagagtgagcacagtgctaaccccactagtgatgagaactag

SEQ ID NO: 216230 - DNA, 1845 bp, Artificial Sequence
  derived and/or modified sequence
atgatgcggcaggccaccatggacttcagcacccccagcgtgttcgaccaacaacgaggggactcgtccgaggaggtggatctgactatggtttaccaggctgcctcgaacggtgacgtcaacgccctaacagccgtaattcgcgaagaccctagcatcctggagtgctgtgattccgaaggctgtacgcccctcatgcatgctgtcagcggtagacaagcagatacagtgaagttgcttctaaaaatgggcgctaatatcaatatgcaggatgcttacggccgaacctcgctgtgcctggccacttaccttgggtggcttgaggggtgtgtgtctctgctgagaaatggggccaaacataacatcccagacaagaacggtcggctgccactgcacgcggctactgcggaacccgatatgcgtctcctgaccgtgttgctgcagcagtctaacatatctgagataaaccatcaagacaatgaaggaatgactccccttcattgggccgcctttcataatcagcctcagcatacgcagatgctgctgaaaaaaggagctgatccaactctggtggacaaagatttcaaaactgcactgcattgggcggtgcagtccggaaaccgcattctttgctcaatcatcctgtctcaccaccaggggccgagtattattaactacgatgacgagtctggtaaaacctgtgtgcatatcgctgccgcagctggattctctgatatcatacatgaacttgcaagggtgcccgaatgtaatttgcaggcgctggacgtggacgatagaacccctcttcattgggccgctgccgcagggaaagcggagtgcgtgcagtccctgcttgagctgggtatggattccaaccttcgcgacattaacgagagtacacccctggcatacgccctgtactgtggacacactgcatgtgtgaagttgctcagtcaggaaagcaggactgaaccaacgcgcccacccccctcccagtcgtcccgacctcagaagaaagaaaggcgatttaacgttctgaaccagatcttttgtaagaacaagaaagaggagcagcgagctcaccaaaaggatccatccagagacaggtaccgggaagaggataccagcgaagtgaacgatatcatcaccacattcgattctattgtggggacaaattgtcaggaacagcccggagaccaggtggcgatggtcgagtttaaaaagaagacctcggacaatagtaagtacctgctgcccgagaagaagcctttggcacgaaaaggcctcccgccgattagaacacagagcttgccccctatcacactggggaataacttcctgaccgccagccacagggcgacttctcacgccgggctgagttcagctccacaccacatggcccagcgtagtcaaaagtcccgctccgagcaggacctcttaaataatcgaaccggctgtcagatgcttcttgacaacccgtggaaatctgatagcaatcaggtgttcagctataaggtctggacggtctcctcaagtgacaagctcctcgacagactcttgagcgtgcgccccggccatcaggaagtatctgttccccctcatctgaggcacctccataatcccagcagcgggcagaattttcagcacctgtcccctaaccgacacaaaatcagagacttgccgttcaccaggaacaatttggccccgctacctgatcaaaagtttctgtcaggagagcctttgcgcacgaatagagttctgccagcaatacctagtcagcggcgtcactcaacagcagccgaagagtccgagcacagtgccaatcccacatctgatgagaactag

SEQ ID NO: 216231 - DNA, 2500 bp, Artificial Sequence
  derived and/or modified sequence
acatgctctgtctggccctgtgaatcctcactcacccattcagatttctgttggtgtaaagcgacattccagctgctgaagctccgtgatctgctgtgtttttccagcccagatccaagagacctggatgctttttgccattctgatggtaaatgatgagacaggctaccatggatttcagcaccccttctgtgtttgatcagcaaagaggtgactcatctgaggaagttgacctgaccatggtttatcaagcagcctctaatggagatgtcaatgctctgactgcagtgattcgggaagacccttctatcctagaatgctgtgacagtgaaggatgcacgcccttgatgcatgcggtttctggacgtcaagcggacacagtgaagctgctgttgaagatgggagccaatattaacatgcaggatgcttatggccgcacaagtttatgcctggccacctacctgggctggcttgaaggctgtgtgagtctactcagaaacggtgccaagcacaatatcccagataaaaatggccgcctgccactgcatgctgccactgctgagcccgatatgaggctcctcacggtcctgttgcaacagtcgaacatcagcgagattaatcaccaggacaatgagggaatgacaccactccactgggcggctttccacaaccagcctcaacacacacaaatgctgctgaagaagggggcagaccccacccttgtggataaagactttaaaaccgctctccactgggcagtccagagtggaaataggattctgtgctccatcattctgagccatcaccaggggccgtccataatcaactatgatgatgagagtgggaagacatgtgtacatatcgcagcggcagcgggcttcagcgatattattcatgagctggcaagagtccctgagtgtaacctgcaggctctggatgtggatgacaggacacctctgcactgggctgcagctgcagggaaggccgaatgtgtccagtcactgctggagttgggaatggacagcaacctgcgggacatcaatgagagcacgcccttggcctatgccctgtactgcggtcacacggcgtgtgtcaaactcctctcccaagagagcagaacagagcctactcgaccccctccctcccagagcagtcggccccagaagaaggagagacggttcaacgtgctcaaccaaatattctgcaaaaacaagaaagaagagcagagagcccatcagaaggatcccagcagggaccgatacagagaggaggacacctcagaagtcaatgacatcatcaccacctttgatagcatcgtgggtaccaactgccaagaacagcctggtgatcaggtggctatggttgaatttaagaagaaaacctcagacaattcaaaatatctcttaccagaaaagaaaccgctggcccgtaaggggcttccaccaatcagaacgcagagtctcccacccatcaccctgggcaataacttcctaacagcctcccatagggccacttcccatgcaggcctgagctctgctcctcatcatatggcccagcgatctcagaaaagtcgaagtgagcaggatttattaaataacagaactggctgccagatgttactagataacccctggaagagtgattctaatcaggtattttcctacaaagtttggactgtgtcttcttctgataagctgctggacagattgctcagtgtccggcctggtcaccaagaggtctccgtgccaccacaccttcgccatctacataatccatcatcaggacaaaattttcagcatctttccccaaacagacacaaaatcagggatcttcctttcactcggaacaacctagctcccctaccagatcaaaaatttctatctggagaacctctgcggacaaaccgagtgcttcctgcaattccaagtcaacgaagacacagcacagcagcagaagagagtgaacattctgccaaccccaccagtgatgaaaattaactgtgggccactcgctgcagaaatgtagatgaatatgtattttcaactctcaaaggacaagattactccagtttgtaagaacgaagaccaatttagtaagctgcattctataagccatcagttttataactcgaaattctttattccaaataaagatactccctaaataagcacttagaatatttgggtgtgcatattaagtctgtgaatttctgtgacttccacatgccaaaattaaaagacaaaatatgttatcagtaggaaaactgagctatgtttggtttgctttgtggcatgtgcactgtttttttgttattgttctttggttgtttttttgctgaatgattttatgttttgggaaaaaaagtacgctttgctgaataaaagcaaaaaacaaaacaaaaaaaaaaccacatcccagacaaacatgtcttcacatttattgtcattctaacttgaactaatgaaacctatttaaaaataaattcctatgatcagtcaca

SEQ ID NO: 216232 - DNA, 2400 bp, Artificial Sequence
  derived and/or modified sequence
acatgctctgtctggccctagacctggatgctttttgccattctgatggtaaatgatgagacaggctaccatggatttcagcaccccttctgtgtttgatcagcaaagaggtgactcatctgaggaagttgacctgaccatggtttatcaagcagcctctaatggagatgtcaatgctctgactgcagtgattcgggaagacccttctatcctagaatgctgtgacagtgaaggatgcacgcccttgatgcatgcggtttctggacgtcaagcggacacagtgaagctgctgttgaagatgggagccaatattaacatgcaggatgcttatggccgcacaagtttatgcctggccacctacctgggctggcttgaaggctgtgtgagtctactcagaaacggtgccaagcacaatatcccagataaaaatggccgcctgccactgcatgctgccactgctgagcccgatatgaggctcctcacggtcctgttgcaacagtcgaacatcagcgagattaatcaccaggacaatgagggaatgacaccactccactgggcggctttccacaaccagcctcaacacacacaaatgctgctgaagaagggggcagaccccacccttgtggataaagactttaaaaccgctctccactgggcagtccagagtggaaataggattctgtgctccatcattctgagccatcaccaggggccgtccataatcaactatgatgatgagagtgggaagacatgtgtacatatcgcagcggcagcgggcttcagcgatattattcatgagctggcaagagtccctgagtgtaacctgcaggctctggatgtggatgacaggacacctctgcactgggctgcagctgcagggaaggccgaatgtgtccagtcactgctggagttgggaatggacagcaacctgcgggacatcaatgagagcacgcccttggcctatgccctgtactgcggtcacacggcgtgtgtcaaactcctctcccaagagagcagaacagagcctactcgaccccctccctcccagagcagtcggccccagaagaaggagagacggttcaacgtgctcaaccaaatattctgcaaaaacaagaaagaagagcagagagcccatcagaaggatcccagcagggaccgatacagagaggaggacacctcagaagtcaatgacatcatcaccacctttgatagcatcgtgggtaccaactgccaagaacagcctggtgatcaggtggctatggttgaatttaagaagaaaacctcagacaattcaaaatatctcttaccagaaaagaaaccgctggcccgtaaggggcttccaccaatcagaacgcagagtctcccacccatcaccctgggcaataacttcctaacagcctcccatagggccacttcccatgcaggcctgagctctgctcctcatcatatggcccagcgatctcagaaaagtcgaagtgagcaggatttattaaataacagaactggctgccagatgttactagataacccctggaagagtgattctaatcaggtattttcctacaaagtttggactgtgtcttcttctgataagctgctggacagattgctcagtgtccggcctggtcaccaagaggtctccgtgccaccacaccttcgccatctacataatccatcatcaggacaaaattttcagcatctttccccaaacagacacaaaatcagggatcttcctttcactcggaacaacctagctcccctaccagatcaaaaatttctatctggagaacctctgcggacaaaccgagtgcttcctgcaattccaagtcaacgaagacacagcacagcagcagaagagagtgaacattctgccaaccccaccagtgatgaaaattaactgtgggccactcgctgcagaaatgtagatgaatatgtattttcaactctcaaaggacaagattactccagtttgtaagaacgaagaccaatttagtaagctgcattctataagccatcagttttataactcgaaattctttattccaaataaagatactccctaaataagcacttagaatatttgggtgtgcatattaagtctgtgaatttctgtgacttccacatgccaaaattaaaagacaaaatatgttatcagtaggaaaactgagctatgtttggtttgctttgtggcatgtgcactgtttttttgttattgttctttggttgtttttttgctgaatgattttatgttttgggaaaaaaagtacgctttgctgaataaaagcaaaaaacaaaacaaaaaaaaaaccacatcccagacaaacatgtcttcacatttattgtcattctaacttgaactaatgaaacctatttaaaaataaattcctatgatcagtcaca

SEQ ID NO: 216233 - DNA, 1845 bp, Artificial Sequence
  derived and/or modified sequence
atgatgaggcaggctactatggatttttcgactccctctgtcttcgatcagcagcggggagactcctcagaggaagtggaccttaccatggtgtatcaagctgcctccaacggtgacgtgaacgctctcaccgctgtaattagggaggatccatctatcctggagtgttgtgactcagaaggttgcacgccactaatgcatgcagtgagcggtcgacaggcggatactgttaagctgctgctgaagatgggtgctaatatcaacatgcaggatgcctatggaaggacaagcctgtgcctggccacatacctgggctggctggaaggctgcgtaagtctgctcagaaatggcgcaaaacataatattccggataagaatggcagactgcctctccatgccgcaacagcagaacccgacatgaggctgcttaccgttctgcttcagcagagcaacatttcagaaataaaccaccaagacaatgaaggcatgacacctctgcactgggctgcgttccataaccagccacagcatacgcaaatgttgctgaaaaagggggcagacccgaccctcgtggacaaagactttaagaccgctttgcactgggctgtccagtctggaaatcgaattctctgcagcatcatcctgtcccatcatcaaggcccttccataatcaactacgacgatgaatcgggaaagacctgcgttcatatcgcggctgctgcaggttttagcgatatcatccacgagcttgcgagggtgccagagtgtaacctccaagcactggacgtggacgaccggacacctttacattgggcagccgcagccggaaaggcagagtgcgtgcagagtctcctagaactgggcatggatagcaatttgcgggacatcaatgagagtaccccgctggcctatgccctgtactgcggtcatactgcgtgcgtaaagctgcttagccaggaatcacgcacggaaccaactaggcctcctcctagccaaagcagcagacctcagaagaaagaacgccgttttaatgtcctcaaccaaattttttgtaaaaataaaaaggaggagcagcgcgcacaccaaaaggacccgagtcgtgatcgctaccgggaagaagacacgtccgaagtcaatgatataatcaccactttcgattctatcgtaggcacaaactgtcaggaacagcctggagaccaggtggccatggtggaatttaaaaaaaaaaccagcgataactccaagtatctgttacctgagaagaagcctctggccagaaaaggcctaccaccaatccgcactcagagtctcccccctatcacgctgggcaacaacttcctcacagctagtcatagggcgacgtcacatgccggtctttcgtccgcacctcaccacatggcccaaaggagtcaaaagtccaggagcgagcaggacctgctaaacaacagaactggttgtcagatgctgctggacaatccctggaaatccgactcaaatcaagtttttagttacaaggtctggaccgtgagcagcagtgacaaactgttagataggctgcttagtgtgagacctggacatcaggaagtgtccgtgccgcctcatcttcgacacctgcataatccctcgagcggacaaaatttccagcatctgtctcctaatcgtcacaagatcagggacctccccttcaccagaaataatcttgcacccctgcccgatcagaagttccttagcggcgaaccgttgcggactaaccgagtactgcccgctatcccaagtcagagacggcattccactgcagcagaagaaagcgaacacagtgctaacccaacttctgacgagaattag

SEQ ID NO: 216234 - DNA, 1845 bp, Artificial Sequence
  derived and/or modified sequence
atgatgaggcaggcgaccatggacttttctaccccatccgtgttcgaccaacagcgtggagattcttcggaagaagtagatcttacaatggtgtaccaagccgcttctaacggggacgtgaacgccctgaccgccgtaatcagagaggatccttccatactagaatgctgcgatagcgagggttgtacccctctgatgcatgcagtcagtggcagacaggccgacactgttaagctgctcctgaaaatgggagccaacatcaatatgcaggacgcatacgggcgaacatccctgtgtctggctacataccttggctggctggagggctgcgtcagtctccttcggaacggtgccaagcacaatatccccgataagaatggtcgactccctctccacgcagcaactgcggaaccggatatgcggctgctgacagtccttcttcagcagagcaacattagcgagatcaaccatcaagataatgagggcatgacccccttgcattgggcagccttccacaaccagccacagcatacacagatgctcctgaagaagggcgcagaccctacacttgttgataaagactttaaaactgcactgcactgggccgtccagagcggtaacagaattctttgctcaatcattctctctcatcaccaggggccatcaattattaattacgacgacgagagtggaaagacatgcgttcatatcgcggctgccgctggtttctctgacatcatccatgagttggcacgggtgcccgaatgtaacctgcaggcccttgacgtagatgatcgcaccccccttcactgggccgctgcggctgggaaagctgagtgtgttcagagcctgttggaactaggcatggatagcaacctgagggacatcaatgagtcgacccctttggcttatgccctatactgcggtcacactgcctgtgtgaagcttctttcacaggaaagccgtaccgagcccactcgaccgccaccaagtcagagttcacgaccgcagaagaaggagaggcgattcaacgtgctgaaccagatcttttgcaaaaataagaaagaagagcagcgcgcacatcaaaaagatccttcaagagatagatatagggaagaagacaccagcgaggtgaatgatatcatcaccacatttgatagcatcgttggaacaaattgccaagaacagcccggagatcaggtggccatggtcgagttcaaaaagaaaacatccgacaacagcaagtacctgctgcccgagaagaagccgctcgctcgaaaaggactgccacccattcggacccaatcacttccaccaattacactaggaaacaattttctgacggctagccatcgggctacctcgcacgccggactcagctcagctcctcatcacatggcacagagaagccaaaaatctcgctccgagcaagacctgcttaacaaccgcaccggatgccaaatgctgctggacaacccctggaagtcggattccaaccaggtcttctcctataaggtttggaccgtgtctagctccgataaactcctggacagactcctcagcgttcgacccggacaccaggaggtcagtgtcccaccccacttgcggcatctccataacccgtctagcgggcagaactttcagcatttaagtcctaacagacataaaatacgggaccttccatttacgcggaacaatctggcccctctacctgaccaaaaatttctaagcggtgagcccctgcgtacaaaccgcgtgctgcccgctataccaagtcagcgtcgccactccacagcagcagaagagtctgagcactccgccaatcccacttccgatgaaaattag

SEQ ID NO: 216235 - protein, 1186 aa, Artificial Sequence [sequence omitted]

SEQ ID NO: 216236 - DNA, 3561 bp, Artificial Sequence
  derived and/or modified sequence
atggacgagccccccggcaagcccctgagctgcgaggagaaggagaagctgaaggagaagctggccttcctgaagagagagtacagcaagaccctggccagactgcagagagcccagagagccgagaagatcaagcacagcatcaagaagaccgtggaggagcaggactgcctgagccagcaggacctgagcccccagctgaagcacagcgagcccaagaacaagatctgcgtgtacgacaagctgcacatcaagacccacctggacgaggagaccggcgagaagaccagcatcaccctggacgtgggccccgagagcttcaaccccggcgacggccccggcggcctgcccatccagagaaccgacgacacccaggagcacttcccccacagagtgagcgaccccagcggcgagcagaagcagaagctgcccagcagaagaaagaagcagcagaagagaaccttcatcagccaggagagagactgcgtgttcggcaccgacagcctgagactgagcggcaagagactgaaggagcaggaggagatcagcagcaagaaccccgccagaagccccgtgaccgagatcagaacccacctgctgagcctgaagagcgagctgcccgacagccccgagcccgtgaccgagatcaacgaggacagcgtgctgatcccccccaccgcccagcccgagaagggcgtggacaccttcctgagaagacccaacttcaccagagccaccaccgtgcccctgcagaccctgagcgacagcggcagcagccagcacctggagcacatcccccccaagggcagcagcgagctgaccacccacgacctgaagaacatcagattcaccagccccgtgagcctggaggcccagggcaagaagatgaccgtgagcaccgacaacctgctggtgaacaaggccatcagcaagagcggccagctgcccaccagcagcaacctggaggccaacatcagctgcagcctgaacgagctgacctacaacaacctgcccgccaacgagaaccagaacctgaaggagcagaaccagaccgagaagagcctgaagagccccagcgacaccctggacggcagaaacgagaacctgcaggagagcgagatcctgagccagcccaagagcctgagcctggaggccaccagccccctgagcgccgagaagcacagctgcaccgtgcccgagggcctgctgttccccgccgagtactacgtgagaaccaccagaagcatgagcaactgccagagaaaggtggccgtggaggccgtgatccagagccacctggacgtgaagaagaagggcttcaagaacaagaacaaggacgccagcaagaacctgaacctgagcaacgaggagaccgaccagagcgagatcagaatgagcggcacctgcaccggccagcccagcagcagaaccagccagaagctgctgagcctgaccaaggtgagcagccccgccggccccaccgaggacaacgacctgagcagaaaggccgtggcccaggcccccggcagaagatacaccggcaagagaaagagcgcctgcacccccgccagcgaccactgcgagcccctgctgcccaccagcagcctgagcatcgtgaacagaagcaaggaggaggtgaccagccacaagtaccagcacgagaagctgttcatccaggtgaagggcaagaagagcagacaccagaaggaggacagcctgagctggagcaacagcgcctacctgagcctggacgacgacgccttcaccgcccccttccacagagacggcatgctgagcctgaagcagctgctgagcttcctgagcatcaccgacttccagctgcccgacgaggacttcggccccctgaagctggagaaggtgaagagctgcagcgagaagcccgtggagcccttcgagagcaagatgttcggcgagagacacctgaaggagggcagctgcatcttccccgaggagctgagccccaagagaatggacaccgagatggaggacctggaggaggacctgatcgtgctgcccggcaagagccaccccaagagacccaacagccagagccagcacaccaagaccggcctgagcagcagcatcctgctgtacacccccctgaacaccgtggcccccgacgacaacgacagacccaccaccgacatgtgcagccccgccttccccatcctgggcaccacccccgccttcggcccccagggcagctacgagaaggccagcaccgaggtggccggcagaacctgctgcaccccccagctggcccacctgaaggacagcgtgtgcctggccagcgacaccaagcagttcgacagcagcggcagccccgccaagccccacaccaccctgcaggtgagcggcagacagggccagcccacctgcgactgcgacagcgtgccccccggcacccccccccccatcgagagcttcaccttcaaggagaaccagctgtgcagaaacacctgccaggagctgcacaagcacagcgtggagcagaccgagaccgccgagctgcccgccagcgacagcatcaaccccggcaacctgcagctggtgagcgagctgaagaaccccagcggcagctgcagcgtggacgtgagcgccatgttctgggagagagccggctgcaaggagccctgcatcatcaccgcctgcgaggacgtggtgagcctgtggaaggccctggacgcctggcagtgggagaagctgtacacctggcacttcgccgaggtgcccgtgctgcagatcgtgcccgtgcccgacgtgtacaacctggtgtgcgtggccctgggcaacctggagatcagagagatcagagccctgttctgcagcagcgacgacgagagcgagaagcaggtgctgctgaagagcggcaacatcaaggccgtgctgggcctgaccaagagaagactggtgagcagcagcggcaccctgagcgaccagcaggtggaggtgatgaccttcgccgaggacggcggcggcaaggagaaccagttcctgatgccccccgaggagaccatcctgaccttcgccgaggtgcagggcatgcaggaggccctgctgggcaccaccatcatgaacaacatcgtgatctggaacctgaagaccggccagctgctgaagaagatgcacatcgacgacagctaccaggccagcgtgtgccacaaggcctacagcgagatgggcctgctgttcatcgtgctgagccacccctgcgccaaggagagcgagagcctgagaagccccgtgttccagctgatcgtgatcaaccccaagaccaccctgagcgtgggcgtgatgctgtactgcctgccccccggccaggccggcagattcctggagggcgacgtgaaggaccactgcgccgccgccatcctgaccagcggcaccatcgccatctgggacctgctgctgggccagtgcaccgccctgctgccccccgtgagcgaccagcactggagcttcgtgaagtggagcggcaccgacagccacctgctggccggccagaaggacggcaacatcttcgtgtaccactacagctag

SEQ ID NO: 216237 - DNA, 3561 bp, Artificial Sequence
  derived and/or modified sequence
atggatgagcccccaggaaaacccctgtcctgtgaggagaaggagaaactcaaagagaaactggcgtttctcaaaagggagtactctaagacacttgccaggctgcagagggcccaacgtgcagaaaaaattaaacacagcattaagaaaaccgttgaagagcaggactgtctgtctcagcaggacctgagtccccaactgaaacattcggagccgaagaacaagatttgtgtatacgataagctccacattaaaacccatctggatgaagagaccggcgagaaaactagtattaccctggatgtgggccccgagagcttcaacccaggcgacggtcccggtgggttgcctattcagcgaactgatgatactcaggagcatttcccgcatcgggtcagcgaccccagtggggagcagaaacagaagctccctagccgtcgcaaaaagcagcagaagcgcacttttataagtcaggagagagattgtgtctttggcacggatagcctgcgcctgtcaggcaagagactgaaagagcaggaggagatctcttctaagaacccggcccgctcgcccgttactgaaattcgtactcacttactatcactgaagtccgaactgccagatagcccagaaccagttactgagatcaatgaggattcagtactaatacccccgacggctcagcctgagaaaggggttgacacatttctccgccgccccaattttactcgtgcaactaccgtgccattacagaccctttctgacagtggctccagtcaacacctggaacatatccctcccaagggttctagcgagctcacaacgcacgacctgaaaaatatcagatttacttcacctgtgagtttggaagctcagggtaagaaaatgacagtgtctaccgacaacctgctcgttaataaagcgatctccaagtcaggtcagcttcctacctcatctaacctagaagccaacatttcctgctctctgaatgagctcacctataataacctcccagccaacgaaaaccagaacctaaaagaacaaaaccagacggagaaaagccttaaaagtccctcagatacactcgacggaagaaacgaaaatctgcaggaatcagagatattgagccagcccaagagcctgagcctcgaagccacaagccccttatctgcagaaaagcactcatgtaccgttccagaaggactgctttttccagccgaatactacgtcagaaccacccgctcaatgtccaattgtcaaagaaaagtggccgtggaagcagtgatacagtctcacctcgacgttaagaaaaagggattcaaaaataaaaacaaagacgccagtaagaacttgaatctttcgaacgaagaaactgatcagtctgaaatacgaatgagcggaacctgtacaggacagccctcctccaggacctctcagaagctcctgagcctaactaaggtgtcatcccccgccggaccaactgaggataatgatctctcaaggaaggctgtcgcacaagctcccggccggagatatacaggaaaaagaaaatctgcttgtactccagcctccgaccactgcgagcctttgctaccaacttccagtctgtctatcgtgaataggagtaaggaggaagttacaagccataaatatcagcacgaaaagttattcatccaggtcaaggggaaaaaatcacggcaccaaaaagaagatagcttgtcatggtccaactcagcatatctgtctctagacgatgacgctttcaccgcgccatttcatcgcgacggcatgcttagtctgaaacagctgctttctttcttgagcatcaccgacttccagttgcccgatgaagattttgggcccctgaaattagagaaagtcaagtcttgtagtgaaaagcccgtcgagcctttcgaaagcaagatgttcggcgagcgccatctgaaggaagggagctgcatctttccagaagagctgtcccctaagcgaatggacaccgagatggaggacctggaggaggacctaattgtcctgcccggcaaatcccaccctaaaaggccgaacagccagagccagcacaccaagaccggtttgtcaagctccattctcttgtatacacccctgaataccgtagcaccggacgataacgacagacccactactgacatgtgcagccccgcatttcccattctcggaacgaccccagctttcggaccccagggcagctatgagaaagcctctaccgaggtcgcgggccgcacatgttgcacccctcagctggcccacctgaaggacagcgtgtgcttagctagcgacacgaaacagtttgattctagcgggtcacccgccaaaccccataccaccctgcaagttagcggtcggcagggccagcccacatgtgattgcgactccgtccccccaggcactcccccacccatcgagagcttcacttttaaagagaatcaactgtgtaggaatacttgccaggagctgcacaagcattccgtggagcagactgaaaccgccgagctccccgcatccgactctattaaccccggcaatctgcagttagtcagtgaactgaagaatccatctgggtcctgttctgttgacgtctccgcaatgttttgggaaagggctggttgtaaggagccttgcataattacagcttgcgaggacgtagtcagtttgtggaaggcgctggacgcatggcaatgggaaaaactgtatacatggcacttcgccgaggtaccagtcctccaaatcgtcccagtgccggacgtctataatctcgtgtgtgtcgccttaggcaacctagagattcgagagatcagggctctgttttgttcctcagatgacgagagcgagaagcaggtcctccttaaatcagggaatatcaaagccgtgttaggtctaacgaaacggagactagtgtctagctcaggcacactcagtgaccagcaagtggaggtgatgaccttcgcggaagacggcggaggaaaagagaatcaattcctcatgcctcccgaggagaccattctgacctttgcagaagtgcagggcatgcaggaggctctgctggggacaaccatcatgaacaatatcgtaatctggaatctgaagacagggcagctgttgaaaaagatgcacatcgatgattcttatcaagcctcagtgtgtcataaggcctactcggagatgggactcttattcatagtcctgtcccacccctgtgccaaggaaagcgagagtctccgatcccccgtcttccagctgatcgtgatcaacccaaaaaccaccttatcagtgggcgtgatgttgtactgcctcccacccggacaggctggacggttcctagaaggagatgtcaaagaccactgcgcggccgccatattaactagcggtaccatcgcaatctgggacttgctgctgggccaatgcaccgccttgttaccacctgtctctgaccagcactggtctttcgtgaagtggtccggcaccgacagccatctactggccggtcagaaggacggcaacattttcgtctatcactattcttag

SEQ ID NO: 216238 - DNA, 3561 bp, Artificial Sequence
  derived and/or modified sequence
atggatgagcccccaggcaagcccctgagctgtgaggagaaggagaagctgaaggagaagctggccttcctgaagcgggagtacagcaagaccctggcccggctgcagagggcccagagagctgagaagatcaagcacagcatcaagaagacagtggaggagcaggactgcctgagccagcaggacctgagcccccagctgaagcacagcgagcccaagaacaagatctgtgtgtatgacaagctgcacatcaagacccacctggatgaggagaccggggagaagaccagcatcaccctggatgtgggccctgagagcttcaaccctggagatggccctgggggcctgcccatccagaggacagatgacacccaggagcacttcccccaccgggtgtctgaccccagcggggagcagaagcagaagctgcccagcaggaggaagaagcagcagaagaggaccttcatcagccaggagcgggactgtgtgtttggaacagacagcctgcggctgagcggcaagaggctgaaggagcaggaggagatcagcagcaagaacccagcccggagccctgtgacagagatccgcacccacctgctgagcctgaagtctgagctgcctgacagccctgagcctgtgacagagatcaatgaagacagcgtgctgatccccccaacagcccagcctgagaagggcgtggacaccttcctgcggcggcccaacttcacccgggccaccaccgtgcccctgcagaccctgagtgacagcggcagcagccagcacctggagcacatcccccccaagggcagcagcgagctgaccacccatgacctgaagaacatccgcttcaccagccctgtgtccctggaggcccagggcaagaagatgacagtgtccacagacaacctgctggtgaacaaggccatcagcaagagcggccagctgcccaccagcagcaacctggaggccaacatcagctgcagcctgaatgagctgacctacaacaacctgcctgccaatgaaaaccagaacctgaaggagcagaaccagacagagaagagcctgaagagccccagcgacaccctggatggaagaaatgaaaacctgcaggagagcgagatcctgagccagcccaagagcctgagcctggaggccaccagccccctgtctgctgagaagcacagctgcaccgtgcctgagggcctgctcttccctgctgagtactacgtgaggaccaccaggtccatgagcaactgccagaggaaggtggccgtggaggccgtcatccagagccacctggatgtgaagaagaagggcttcaagaacaagaacaaggatgccagcaagaacctgaacctgagcaatgaggagacagaccagagcgagatccgcatgagcggcacctgcaccggccagcccagcagcaggaccagccagaagctgctgagcctgaccaaggtgagcagccctgctggccccacagaagataatgacctgagcaggaaggctgtggcccaggcccctggccgccgctacacaggcaagaggaagagcgcctgcaccccagccagtgaccactgtgagcccctgctgcccaccagcagcctgagcatcgtgaacagaagcaaggaggaggtgaccagccacaagtaccagcacgagaagctgttcatccaggtgaagggcaagaagagccgccaccagaaggaggacagcctgtcctggagcaacagcgcctacctgagcctggatgatgatgccttcaccgcccccttccacagagatggcatgctgagcctgaagcagctgctgtccttcctgagcatcacagacttccagctgcctgatgaagattttggccccctgaagctggagaaggtgaagagctgcagcgagaagcctgtggagccctttgagagcaagatgtttggagagcggcacctgaaggagggcagctgcatcttccctgaggagctgagccccaagaggatggacacagagatggaggacctggaggaggacctgattgtgctgcccgggaagagccaccccaagaggcccaacagccagagccagcacaccaagacaggcctgagcagcagcatcctgctgtacacccccctgaacacagtggccccagatgacaatgaccggcccaccacagacatgtgcagccctgccttccccatcctgggcaccaccccagccttcggcccccagggcagctatgagaaggccagcacagaggtggccggccgcacctgctgcaccccccagctggcccacctgaaggacagcgtgtgcctggccagtgacaccaagcagtttgacagcagcggcagccctgccaagccccacaccaccctgcaggtgtctggccggcagggccagcccacctgtgactgtgacagcgtgcccccaggcaccccaccacccatcgagagcttcaccttcaaggagaaccagctgtgcaggaacacctgccaggagctgcacaagcacagcgtggagcagacagaaacagctgagctgcctgccagtgacagcatcaaccctggcaacctgcagctggtgtctgagctgaagaaccccagcggcagctgcagcgtggatgtgtctgccatgttctgggagcgggccggctgcaaggagccctgcatcatcacagcctgtgaagatgtggtgtccctgtggaaggccctggatgcctggcagtgggagaagctgtacacctggcactttgctgaggtgcctgtgctgcagatcgtgcctgtgcctgatgtgtacaacctggtgtgtgtggccctgggcaacctggagatccgggagatccgggccctcttctgcagcagtgatgatgaaagtgagaagcaggtgctgctgaagagcggcaacatcaaggctgtgctgggcctgaccaagaggcggctggtgagcagcagcggcaccctgagtgaccagcaggtggaggtgatgacctttgctgaagatggcggcggcaaggagaaccagttcctgatgcctcctgaggagaccatcctgacctttgctgaggtgcagggcatgcaggaggccctgctgggcaccaccatcatgaacaacatcgtcatctggaacctgaagacaggccagctgctgaagaagatgcacattgatgacagctaccaggcctctgtgtgccacaaggcctacagcgagatgggcctgctcttcatcgtgctgagccacccctgtgccaaggagagcgagagcctgcggagccctgtgttccagctgattgtcatcaaccccaagaccaccctgtctgtgggcgtgatgctgtactgcctgcccccaggccaggccggccgcttcctggagggagatgtgaaggaccactgtgccgccgccatcctgaccagcggcaccatcgccatctgggacctgctgctgggccagtgcacagccctgctgccccctgtgtctgaccagcactggagctttgtgaagtggagcggcacagacagccacctgctggccggccagaaggatggcaacatctttgtgtaccactacagctag

SEQ ID NO: 216239 - DNA, 3561 bp, Artificial Sequence
  derived and/or modified sequence
atggacgagccccccggcaagcccctgagctgcgaggagaaggagaagctcaaggaaaagctggcattcctgaagcgcgaatacagcaaaacacttgctcgactacaaagggcacaacgggccgaaaaaatcaaacattctataaagaagaccgtggaggagcaggattgtctgagtcagcaggatctttcaccgcagttaaaacacagcgagccgaaaaataagatctgcgtctatgacaaacttcatattaaaacgcatttggacgaggaaacaggtgagaaaacaagcatcaccctagacgtggggccggagtctttcaatcccggcgacggacctggaggcctgccaattcaacggaccgatgacacgcaggagcattttcctcaccgcgtcagcgacccctctggcgaacagaaacagaagctgcccagtcgccggaaaaaacagcagaaaaggaccttcatctcccaagaacgcgactgtgtgtttgggaccgactctctccgactgtcagggaagcggctcaaagaacaggaggagattagttccaaaaatcccgctaggtctccagtcacagagattcgcacccatctgctgagtctcaaatccgaacttccagattcgcccgaacccgtgacagaaattaacgaagattccgtacttatcccccccaccgcccagccagagaagggcgtagatacattcctccgccgccctaacttcactcgggctacaaccgtcccactgcaaaccctctccgactctggttcaagccagcaccttgagcatattccaccaaaggggtccagtgagctgactacacacgaccttaagaatattagatttacctccccagtgtctcttgaagcccaggggaagaagatgaccgtgagcacagacaacctgcttgtgaataaggccatctccaaaagcggacagctgcccacctcttctaacctggaagccaatatctcctgcagcctcaatgagctgacttataacaatcttcctgctaacgaaaatcaaaatctcaaggagcaaaatcagactgagaagtccctgaaatcccccagcgatactctggacggaagaaacgaaaacttgcaagagtctgaaatcctgagccagcccaaatctttgagtctcgaagccacgtcaccactatcagcagaaaaacattcttgtaccgtaccagagggactcctgtttccagccgagtactatgtaaggactactcggagcatgtcgaactgtcagcgcaaagtggctgtcgaggccgttatccagtcacacctggacgtgaaaaagaagggattcaagaacaagaataaggacgcctctaagaacctgaacttgagcaacgaagagacggaccagtccgagattaggatgtccggcacctgtacaggccagccaagctcccgaacgtctcagaaacttctgagccttaccaaggtctcatccccagccgggcccaccgaggataacgacctctcacgaaaggcagtggcacaagcgccgggacgtcggtacacaggaaagagaaagagcgcttgcacccctgccagcgatcactgcgaaccactgttgccaacatctagcctgtccatcgttaaccgctcaaaggaggaggtgactagccacaagtatcagcatgagaaactgtttattcaggtgaaaggaaagaaaagccggcatcagaaagaagattccctgagctggtccaatagcgcttacctttcactcgatgacgatgccttcacggctcccttccaccgcgatggcatgttatcgttgaagcagctgctgtcatttctgagtatcacggacttccagctgcccgacgaagactttgggcccctgaaattggagaaggtcaagagctgtagcgagaagcctgtcgagccgttcgaaagcaaaatgtttggcgagcgccacctgaaagagggatcttgtatcttcccagaagagttgtcccctaagagaatggataccgaaatggaggatcttgaggaagatctgattgtactgcctggaaaatcacaccccaaacgacctaactcgcagtcgcaacacacgaagacaggtctgagcagttcgatccttctatatacaccacttaataccgtggccccagacgataacgacaggcccaccactgacatgtgttcacccgcttttccaatactggggacaacaccagcctttggcccacagggatcatacgagaaggcatccactgaggtggccggaagaacatgctgcactcctcagctggcacacctgaaggactcggtgtgcctggcttctgacacgaagcagtttgatagtagcggttcgcctgccaagccccacacaaccctgcaagtgtccgggagacagggccagcccacctgcgactgtgatagtgtgccaccagggacccctccccccatagagtcttttacattcaaagagaaccagctctgtcggaacacctgtcaggagctacataagcactccgtggagcagacggagaccgccgaactgccagccagcgattcaattaaccctgggaacctccagctagttagtgagctaaaaaacccgtctggctcctgttccgtggacgtgagcgctatgttctgggaaagggctgggtgcaaggagccttgtataattacggcctgcgaggacgtcgtgagcctttggaaagccctcgatgcctggcagtgggaaaaactgtacacctggcatttcgcggaggtgcctgtacttcaaatcgtgccagtacctgatgtttacaatctcgtttgtgtagctcttgggaacttggagattagggagatcagagctttgttctgcagcagtgacgatgaaagtgagaagcaggtactattgaaatctggcaatataaaggcagtactaggacttaccaagcggcgcctcgtgtcttcgtcaggtactctttcagatcagcaggtggaggtgatgacatttgccgaggatgggggagggaaagaaaaccagtttttaatgccccctgaggagacaattctgaccttcgccgaggtccagggcatgcaggaggcccttcttgggacaaccattatgaacaacatcgtgatctggaaccttaaaaccggacagttattaaaaaagatgcatatcgacgacagctatcaggcttcagtttgtcataaggcttactcagagatggggctgctgttcatcgttctttcccatccctgcgccaaggaaagcgagtccctgcgttcaccggttttccagttgatcgtcatcaaccccaaaactacgctgtcggtaggtgtgatgctctactgcctgccgccagggcaggccggtaggtttctagaaggggatgtaaaggaccactgtgctgccgccatcctgaccagtgggacaatagcgatttgggacctcctccttggacagtgtaccgccttattgccacccgtttccgatcaacactggtcattcgtgaaatggtccggcaccgactcccatttgctggccggccagaaggatggtaatatctttgtgtaccattacagttag

SEQ ID NO: 216240 - DNA, 3561 bp, Artificial Sequence
  derived and/or modified sequence
atggacgagcctcctgggaagccactgagctgcgaggaaaaggagaaactgaaagaaaaacttgccttcctcaaacgtgaatactctaaaacactggccaggctgcagcgagcccagcgcgctgaaaaaatcaaacatagcatcaagaagacagtggaggaacaggactgtctaagccaacaagacctcagccctcagttgaagcattccgagccaaagaacaaaatatgcgtatatgataaactccatatcaagacccacttagacgaggaaaccggcgaaaagacgtccattaccctcgatgtgggcccagaaagcttcaatccgggtgacggccctgggggtctgcccatccagaggaccgatgatacccaggagcacttcccccacagagtgagcgacccatctggtgagcagaagcaaaagctcccctcccgcaggaagaagcaacaaaagagaacctttatatctcaggagagagactgcgttttcggaactgatagtttgcggctctctggcaaacgtctgaaggaacaagaagagatcagcagcaaaaaccccgcacggagcccagttacagaaataagaacccatctattgagcctcaagtccgagcttcctgatagcccggaaccggtgactgagatcaatgaagactccgtgctcattcctcctacggcacagcctgaaaagggagtggacaccttcttgcggaggcctaacttcaccagagcaacgaccgtgcctctacagacgctgagcgacagtgggagcagtcaacatttggaacatataccccctaagggctcatcagagttaacaacgcacgacctgaaaaatatccgatttactagccctgtaagcctggaagcccagggcaaaaaaatgaccgtcagcacggacaacttactggtgaacaaggccatatcaaagagcggacagctgcccacaagctcaaatctggaagcaaatatttcatgttccctgaatgaactgacatacaataacctccccgctaacgagaaccagaacctgaaagagcagaatcagacagaaaagtcgctcaagagcccttcagatacacttgacggtcgcaacgagaacctacaagagagcgagattctttcccagccaaagtctctgagtctagaggctaccagtcccttgagtgcagaaaagcactcttgcacagtgcccgagggattactgttcccagctgagtattacgtccgaaccaccaggagtatgtccaattgtcagagaaaagtggccgtcgaggcagtgatacagagccatctggatgtgaagaaaaaaggttttaagaacaaaaataaagatgcttcaaagaacctcaacctctcaaacgaagaaacagatcaatcagagattcggatgtctggcacctgcacaggacagccgtccagcaggacgagccaaaaacttttatctttgacgaaggttagctcaccagctggacccacagaagataacgatctcagcagaaaggctgtggcacaggccccagggaggcggtataccggaaagaggaaatctgcatgtacacctgcaagcgaccattgtgagcccctgctgccgaccagttcgctgagtatagtgaatagatctaaggaggaggttacatcccacaaataccagcacgaaaagctgtttattcaagtgaaaggtaagaaaagcagacaccagaaggaggacagcctctcatggagtaacagcgcatatctgtccttggatgacgacgcgtttactgccccattccatcgcgatggtatgttgtctcttaaacagctgttgtcctttttgagcattactgatttccaactgcctgacgaggatttcggtcctcttaagcttgaaaaggtgaagtcctgctcagagaagcccgtggagccattcgagtctaagatgtttggtgaacgccatttgaaggaggggagttgtattttcccggaagaactaagtcccaaacgaatggacaccgaaatggaagatctggaggaagatttgatagtccttccagggaaaagccacccaaagcgacccaactcacagagccagcacactaagaccggcctgagttcgtccatattgctgtatacccccctgaatactgtggctcccgatgacaatgatcgcccaaccactgatatgtgctcacccgctttcccaattctgggcaccactcctgcgtttggcccacagggcagctatgaaaaagccagtaccgaggtggcaggtaggacatgctgtacgccccagctcgcccacctcaaggatagtgtctgtctggctagcgacactaagcaattcgacagcagcggcagtcccgcaaaaccacataccaccttgcaggtctccgggaggcaggggcaacctacatgtgactgcgattctgtacctcctggcactcctccccctatcgagtctttcacatttaaggagaatcaactgtgccggaatacctgtcaggagcttcacaaacattccgtggagcaaacagagacggcagagctccccgcttctgattccataaaccccggaaatcttcagctggtgagtgaattaaagaatccatcaggcagctgcagcgtggacgtatctgcaatgttctgggaacgggctgggtgtaaggaaccttgcatcattacagcctgcgaggatgtggtctcactgtggaaggctcttgatgcctggcagtgggaaaaactgtacacctggcattttgccgaggtgccggtgttgcagatagttccagtacctgatgtctataatctcgtctgcgtagctctgggcaatctggagattagggaaattcgcgcactgttctgttcctcggatgacgaaagtgaaaagcaagtgctgctgaaaagcggtaacatcaaagccgtgcttgggctaaccaaaagaaggctggtgagctcgagcgggacactgtccgaccagcaagtggaggtaatgaccttcgctgaagacggagggggtaaagagaaccaattcctgatgcctccagaagaaactattctcacttttgccgaagtgcaggggatgcaggaagctctgctcggtactaccattatgaataatatcgttatttggaacctcaaaactggtcagctgctgaagaaaatgcatattgacgactcgtatcaagcctctgtctgtcataaagcctattctgagatggggctgctgttcatagtcctctctcatccatgcgctaaggaatctgaaagtcttcgatctcccgtgtttcagctaatcgtgatcaaccctaaaacgaccttgtctgtgggcgtaatgctgtactgccttccaccgggacaggcaggcagatttctagaaggggatgtcaaagaccactgcgctgctgctattcttacctccggaacaatagcaatctgggacctcctgttaggccagtgtaccgccttgctacctcccgtctccgaccaacactggtcctttgtgaaatggtccggcacagactctcaccttttagccggacagaaggacgggaatatttttgtgtatcactatagttag

SEQ ID NO: 216241 - DNA, 4058 bp, Artificial Sequence
  derived and/or modified sequence
gcaggccgaatggtggatttaattggccggagtttagggcgcgcttggcccgcgtgggtcagctgatcgcgcactgagggtgcgatcccgggctccccattccttcctggggcgcctccccggcccagggccaactgggtcccggtgtcggcaggcctggggtcggcgacggctgctcttttcgttctgtcgcctgcccgatggacgagcctcccgggaagcccctcagctgtgaggagaaggaaaagttaaaggagaaattagcattcttgaaaagggaatacagcaagacactagcccgccttcagcgtgcccaaagagctgaaaagattaagcattctattaagaaaacagtagaagaacaagattgtttgtctcagcaggatctctcaccgcagctaaaacactcagaacctaaaaataaaatatgtgtttatgacaagttacacatcaaaacccatcttgatgaagaaactggagaaaagacatctatcacacttgatgttgggcctgagtcctttaaccctggagatggcccaggaggattacctatacaaagaacagatgacacccaagaacattttccccacagggtcagtgaccctagtggtgagcaaaagcagaagctgccaagcagaagaaagaagcagcagaagaggacatttatttcacaggagagagactgtgtctttggcactgattcactcagattgtctgggaaaagactaaaggaacaggaagaaatcagtagcaaaaatcctgctagatcaccagtaactgaaataagaactcaccttttaagtcttaaatctgaacttccagattctccagaaccagttacagaaattaatgaagacagtgtattaattccaccaactgcccaaccagaaaaaggtgttgatacattcctaagaagacctaatttcaccagggcgactacagttcctttacagactctatcagatagcggtagtagtcagcaccttgaacacattcctcctaaaggtagcagtgaacttactactcacgacctaaaaaacattagatttacttcacctgtaagtttggaggcacaaggcaaaaaaatgactgtctctacagataacctccttgtaaataaagctataagtaaaagtggccaactgcccacaagttctaatttagaggcaaatatttcatgttctctaaatgaactcacctacaataacttaccagcaaatgaaaaccaaaacttaaaagaacaaaatcaaacagagaaatctttaaaatctcccagtgacactcttgatggcaggaatgaaaatcttcaggaaagtgagattctaagtcaacctaagagtcttagcctggaagcaacctctcctctttctgcagaaaaacattcttgcacagtgcctgaaggccttctgtttcctgcagaatattatgttagaacaacacgaagcatgtccaattgccagaggaaagtagccgtggaggctgtcattcagagtcatttggatgtcaagaaaaaagggtttaaaaataaaaataaggatgcaagtaaaaatttaaacctttccaatgaggaaactgaccaaagtgaaattaggatgtctggcacatgcacaggacaaccaagttcaagaacctctcagaaacttctctcattaactaaagtcagctctcccgctgggcccactgaagataatgacttgtctaggaaggcagttgcccaagcacctggtagaagatacacaggaaaaagaaaatcagcctgcaccccagcatcagatcattgtgaaccacttttgccaacttctagcctgtcgattgttaacaggtccaaggaagaagtcacctcacacaaatatcagcacgaaaaattatttattcaagtgaaagggaagaaaagtcgtcatcaaaaagaggattccctttcttggagtaatagtgcttatttatccttggatgatgatgctttcacggctccatttcatagggatggaatgctgagtttaaagcaactactgtcttttctcagtatcacagactttcagttacctgatgaagactttggacctcttaagcttgaaaaagtgaagtcctgctcagaaaaaccagtggagccctttgagtcaaaaatgtttggagagagacatcttaaagagggaagctgtatttttccagaggaactgagtcctaaacgcatggatacagaaatggaggacttagaagaggaccttattgttctaccaggaaaatcacatcccaaaaggccaaactcgcaaagccagcatacaaagacgggcctttcttcatccatattactttatactcctttaaatacggttgcgcctgatgataatgacaggcctaccacagacatgtgttcacctgctttccccatcttaggtactactccagcctttggccctcaaggctcctatgaaaaagcatctacagaagttgctggacgaacttgctgcacaccccaacttgctcatttgaaagactcagtctgtcttgccagtgatactaaacaattcgacagttcaggcagcccagcaaaaccacataccaccctgcaagtgtcaggcaggcaaggacaacctacctgtgactgtgactctgtcccgccaggaacacctccacccattgagtcattcacttttaaagaaaatcagctctgtagaaacacatgccaggagctgcataaacattccgtcgaacagactgaaacagcagagcttcctgcttctgatagcataaacccaggcaacctacaattggtttcagagttaaagaatccttcaggttcctgttccgtagatgtgagtgccatgttttgggaaagagccggttgtaaagagccatgtatcataactgcttgcgaagatgtagtttctctttggaaagctctggatgcttggcagtgggaaaaactttatacctggcacttcgcagaggttccagtattacagatagttccagtgcctgatgtgtataatctcgtgtgtgtagctttgggaaatttggaaatcagagagatcagggcattgttttgttcctctgatgatgaaagtgaaaagcaagtactactgaagtctggaaatataaaagctgtgcttggcctgacaaagaggaggctagttagtagcagtgggaccctttctgatcaacaagtagaagtcatgacgtttgcagaagatggaggaggcaaagaaaaccaatttttgatgccccctgaggagactatactaacttttgctgaggtccaagggatgcaagaagctctgcttggtactactattatgaacaacattgttatttggaatttaaaaactggtcaactcctgaaaaagatgcacattgatgattcttaccaagcttcagtctgtcacaaagcctattctgaaatggggcttctctttattgtcctgagtcatccctgtgccaaagagagtgagtcgttgcgaagccctgtgtttcagctcattgtgattaaccctaagacgactctcagcgtgggtgtgatgctgtactgtcttcctccagggcaggctggcaggttcctggaaggtgacgtgaaagatcactgtgcagcagcaatcttgacttctggaacaattgccatttgggacttacttctcggtcagtgtactgccctcctcccacctgtctctgaccaacattggtcttttgtgaaatggtcgggtacagactctcatttgctggctggacaaaaagatggaaatatatttgtataccactattcataagttagggtaaagtgaaaacacaattttctggatatattgggcctcttagtattttttggagttttaaatataaaggagaatatctgaatgacacttaaaatgattgcttgtttatgtccagacagacttattttttattctaatgatggtagcaccactgatcttggatgtacatttatgtatactttgagaaaaagggttttaggttgatttttgtaatttcccacatttgtacatgtgcttttaaaggtgtacataaagcttcaaatggcaataaatatttatttttatacattc

SEQ ID NO: 216242 - protein, 718 aa, Artificial Sequence
  derived and/or modified sequence
MLNSTGELEFSNEEDPEIISQLTSLPLSGGKSSAGVPEKTGYPDSVYVMAANIFQGIRIEKSAQKVLIKYGNEPLRSLSESEDQSFQRLSYELAFSALKYQDILETILIDSCIFPSTTIPDHLSSLIIVMLYDFQDRKFQTRVLSDNEEPISEVQEVENLLNSFKIKLAAALARCRIKHDALSIYHILPETVRKQELRASTLPLYAWINTCKISPEEVYNNLKRRGYNKVKSVLHIDDKVFAVDQHCYDVLIFPSHLKNDLINIDLFKDYKLIFQDKSRSLAVHSVKALLNMDDDVLMVNTGSWYTVSHMSILTNNNTSKVFVCGVQSQAKDPDLKTLFTKIGCKNIEILHEKFINIESKDHRLQKVKVILLLPRCSGLGVSNPVEFILNEHEDTEFLKDHSQGGISVDKLHVLAQQQYEQLTHAMKFTKAQAVVYCTCSVFPEENEAVVKKALEFQDLGNKGQPYRLSPPVLPLCSLKEIQLSTDKFFRMEPSEITNGCFLSILTRERDPSETVSVNDVLARAAAKGLLDGIELGKSSKREKKKKKSKTSLTKGATTDNGIQMKIAEFLNRETKASANLSETVTKPPLPQKNTAQVGASSQTRKPNKLAPHPAVPAFVKNTCPSRPRERQTHFLRPRPEDRMVALKPIKIVLPPVFMPFSSPQGIRSRMPTQHLYCRWVAPKALVPTCLPTHSLSRKEEKPKDDTPSSLLRPPRRWL

SEQ ID NO: 216243 - DNA, 2157 bp, Artificial Sequence
  derived and/or modified sequence
atgctgaacagcaccggcgagctggagttcagcaacgaggaggaccccgagatcatcagccagctgaccagcctgcccctgagcggcggcaagagcagcgccggcgtgcccgagaagaccggctaccccgacagcgtgtacgtgatggccgccaacatcttccagggcatcagaatcgagaagagcgcccagaaggtgctgatcaagtacggcaacgagcccctgagaagcctgagcgagagcgaggaccagagcttccagagactgagctacgagctggccttcagcgccctgaagtaccaggacatcctggagaccatcctgatcgacagctgcatcttccccagcaccaccatccccgaccacctgagcagcctgatcatcgtgatgctgtacgacttccaggacagaaagttccagaccagagtgctgagcgacaacgaggagcccatcagcgaggtgcaggaggtggagaacctgctgaacagcttcaagatcaagctggccgccgccctggccagatgcagaatcaagcacgacgccctgagcatctaccacatcctgcccgagaccgtgagaaagcaggagctgagagccagcaccctgcccctgtacgcctggatcaacacctgcaagatcagccccgaggaggtgtacaacaacctgaagagaagaggctacaacaaggtgaagagcgtgctgcacatcgacgacaaggtgttcgccgtggaccagcactgctacgacgtgctgatcttccccagccacctgaagaacgacctgatcaacatcgacctgttcaaggactacaagctgatcttccaggacaagagcagaagcctggccgtgcacagcgtgaaggccctgctgaacatggacgacgacgtgctgatggtgaacaccggcagctggtacaccgtgagccacatgagcatcctgaccaacaacaacaccagcaaggtgttcgtgtgcggcgtgcagagccaggccaaggaccccgacctgaagaccctgttcaccaagatcggctgcaagaacatcgagatcctgcacgagaagttcatcaacatcgagagcaaggaccacagactgcagaaggtgaaggtgatcctgctgctgcccagatgcagcggcctgggcgtgagcaaccccgtggagttcatcctgaacgagcacgaggacaccgagttcctgaaggaccacagccagggcggcatcagcgtggacaagctgcacgtgctggcccagcagcagtacgagcagctgacccacgccatgaagttcaccaaggcccaggccgtggtgtactgcacctgcagcgtgttccccgaggagaacgaggccgtggtgaagaaggccctggagttccaggacctgggcaacaagggccagccctacagactgagcccccccgtgctgcccctgtgcagcctgaaggagatccagctgagcaccgacaagttcttcagaatggagcccagcgagatcaccaacggctgcttcctgagcatcctgaccagagagagagaccccagcgagaccgtgagcgtgaacgacgtgctggccagagccgccgccaagggcctgctggacggcatcgagctgggcaagagcagcaagagagagaagaagaagaagaagagcaagaccagcctgaccaagggcgccaccaccgacaacggcatccagatgaagatcgccgagttcctgaacagagagaccaaggccagcgccaacctgagcgagaccgtgaccaagccccccctgccccagaagaacaccgcccaggtgggcgccagcagccagaccagaaagcccaacaagctggccccccaccccgccgtgcccgccttcgtgaagaacacctgccccagcagacccagagagagacagacccacttcctgagacccagacccgaggacagaatggtggccctgaagcccatcaagatcgtgctgccccccgtgttcatgcccttcagcagcccccagggcatcagaagcagaatgcccacccagcacctgtactgcagatgggtggcccccaaggccctggtgcccacctgcctgcccacccacagcctgagcagaaaggaggagaagcccaaggacgacacccccagcagcctgctgagaccccccagaagatggctgtag

SEQ ID NO: 216244 - DNA, 2157 bp, Artificial Sequence
  derived and/or modified sequence
atgctgaattccactggagaattggagttctcaaacgaggaggatccagaaataatctcacagctcacttcgttgccattgtctggcggaaaatcatccgccggggtccccgaaaaaactggctacccggactccgtgtatgttatggcagctaacattttccagggtatcagaattgaaaagagcgcccagaaggtgctgattaaatatggaaacgagccgctgagaagcctttccgaaagcgaagaccaaagcttccagaggcttagctatgaactcgcattttctgctctgaaatatcaggacattctggaaacgatcctaatagattcttgcatttttccaagcacaaccattcccgatcaccttagcagcctgatcattgtaatgttgtacgacttccaggacaggaagttccagacgagggtgctcagtgataatgaagaacctatctctgaggtgcaggaagtggaaaatttgctcaatagttttaagatcaagctcgctgctgcccttgccaggtgtcgcataaagcatgacgcactgagcatctatcacatccttccagagaccgtacgtaaacaggaactccgagcctccactttgcctttatacgcctggattaacacctgcaaaatcagcccagaggaggtctataacaatctaaaaagaaggggttataacaaagtgaagagtgtgctgcacatcgatgacaaagtctttgccgttgaccaacactgctacgacgtgctgattttcccttcccaccttaagaacgatctgatcaacatcgacctgttcaaagattataagctgatattccaggataaatcgagaagtctcgctgttcattctgtcaaagctctattgaatatggatgacgacgtgctgatggtgaataccggatcgtggtacactgtgtcccacatgagtattctaaccaacaacaacacctctaaagtgttcgtgtgtggggtgcagtctcaggctaaagatccggatcttaaaacgctgttcaccaagatcggctgtaaaaatattgagatccttcatgaaaagtttatcaatatcgagagtaaggatcatcgccttcagaaagtcaaggtcatcctcctgttgcccagatgctcaggcttaggggtgtccaacccagtggagtttattctcaatgagcacgaggacacggaattcctgaaggatcacagccagggagggatctccgtcgataaactgcatgtccttgctcagcaacagtacgagcagctaacccatgcaatgaagttcacgaaggcacaggcagtggtctactgtacttgttccgtgtttccggaggaaaacgaggccgtggttaagaaggccctggaattccaggaccttggtaataaggggcaaccgtacagactctctcccccagttttgcctctctgttcccttaaggaaattcaactctctacagataaattcttccggatggagccgtcggagatcaccaacggatgctttttgtcaatcctgactcgagagcgggatccaagcgagaccgtgtccgtgaatgacgtcctcgcgagggcagcagcaaaagggctcctggacgggatcgagctgggcaaatccagcaaacgcgaaaagaagaaaaaaaagtccaagacaagccttaccaaaggggctacaacagataatggtattcaaatgaaaattgccgagttcctcaacagagaaaccaaggcctctgcaaatctttctgagacagtgactaaaccaccacttccgcagaaaaacaccgctcaggtgggcgcttcatcacagacaagaaagcccaataagctcgccccgcacccagcagtgccagcttttgtaaagaacacgtgcccgagccggcccagagagcggcagacgcactttctgaggccacgacccgaagatcggatggtcgcactgaagccaataaaaatagttctgccgcctgtgtttatgcccttttctagcccacagggcatccgatcgagaatgcctacgcagcatctgtactgccggtgggtagccccgaaagctctggtacccacctgcctgccgacacactccctcagcagaaaagaggaaaaaccaaaagacgatacgccaagcagcctcctgaggcctccaaggaggtggctctag

SEQ ID NO: 216245 - DNA, 2157 bp, Artificial Sequence
  derived and/or modified sequence
atgctgaacagcactggagagctggagttcagcaatgaggaggaccctgagatcatcagccagctgaccagcctgcccctgagcggcggcaagagcagcgctggggtgcctgagaagacaggctacccagattctgtgtatgtgatggccgccaacatcttccagggcatcagaattgagaagagcgcccagaaggtgctgatcaagtatggaaatgagcccctgcggagcctgtctgagagcgaggaccagagcttccagaggctgtcctatgagctggccttcagcgccctgaagtaccaggacatcctggagaccatcctgattgacagctgcatcttccccagcaccaccatcccagaccacctgagcagcctcatcatcgtgatgctgtatgacttccaggacaggaagttccagaccagggtgctgagtgacaatgaggagcccatcagcgaggtgcaggaggtggagaacctgctgaacagcttcaagatcaagctggccgccgccctggcccgctgccgcatcaagcatgatgccctgagcatctaccacatcctgcctgagaccgtgaggaagcaggagctgcgggccagcaccctgcccctgtatgcctggatcaacacctgcaagatcagccctgaggaggtgtacaacaacctgaagaggcggggctacaacaaggtgaagtctgtgctgcacattgatgacaaggtgtttgctgtggaccagcactgctatgatgtgctgatcttccccagccacctgaagaatgacctgatcaacatcgacctcttcaaggactacaagctgatcttccaggacaagagccgcagcctggccgtgcacagcgtgaaggccctgctgaacatggatgatgatgtgctgatggtgaacacaggctcctggtacacagtgagccacatgagcatcctgaccaacaacaacaccagcaaggtgtttgtgtgtggggtgcagagccaggccaaggaccctgacctgaagaccctcttcaccaagattggctgcaagaacatcgagatcctgcacgagaagttcatcaacatcgagagcaaggaccaccggctgcagaaggtgaaggtgatcctgctgctgccccgctgcagcggcctgggcgtgagcaaccctgtggagttcatcctgaatgaacatgaggacacagagttcctgaaggaccacagccagggcggcatctctgtggacaagctgcacgtgctggcccagcagcagtatgagcagctgacccacgccatgaagttcaccaaggcccaggccgtggtgtactgcacctgcagcgtcttcccagaagaaaatgaggccgtggtgaagaaggccctggagttccaggacctgggcaacaagggccagccctaccgcctgagcccccctgtgctgcccctgtgcagcctgaaggagatccagctgagcacagacaagttcttcaggatggagcccagcgagatcaccaacggctgcttcctgagcatcctgacccgggagcgggaccccagcgagaccgtgtctgtgaatgatgtgctggcccgggctgctgccaagggcctgctggatggcatcgagctgggcaagagcagcaagcgggagaagaagaagaagaagagcaagaccagcctgaccaagggggccaccacagacaatggcatccagatgaagattgctgagttcctgaaccgggagaccaaggccagcgccaacctgtctgaaacagtgaccaagccacccctgccccagaagaacacagcccaggtgggcgccagcagccagaccaggaagcccaacaagctggccccccaccctgctgtgcctgcctttgtgaagaacacctgccccagccggccccgggagcggcagacccacttcctgcggcccaggcctgaggacaggatggtggccctgaagcccatcaagatcgtgctgccccctgtgttcatgcccttcagcagcccccagggcatccgcagcaggatgcccacccagcacctgtactgccgctgggtggcccccaaggccctggtgcccacctgcctgcccacccacagcctgagcaggaaggaggagaagcccaaggatgacacccccagcagcctgctgcggcccccccggcgctggctgtag

SEQ ID NO: 216246 - DNA, 2157 bp, Artificial Sequence
  derived and/or modified sequence
atgctgaacagcaccggcgagctggagttcagcaacgaggaggaccctgagataatctctcagctcacatcacttcctctttccggcggtaagtcgagcgctggagtgccagagaagacaggataccctgatagcgtttatgtgatggcagctaatatttttcagggtattaggatcgagaagtccgctcagaaagttctgattaagtacgggaatgagcctcttcggtcccttagtgagagcgaggatcaaagcttccagcgcctgtcctacgaacttgcattctccgctctgaagtatcaagatattttggagactattctcatcgactcttgcatatttccaagcaccaccattcctgaccacctctcctctctcatcatagtcatgttatacgactttcaggacaggaaatttcagacgagagtgctgtccgacaacgaggagccgattagcgaagtgcaggaagtggagaacttgctaaactcctttaagattaaactcgccgctgccctagctcgctgtaggataaaacatgacgcacttagcatttaccatattctcccagagactgtgagaaagcaagagctcagggccagcacacttcccttgtacgcctggattaatacttgcaagattagccccgaggaggtttataataatctcaagaggcgtggctataacaaagtgaagtccgtgctccatatcgacgataaggtttttgccgtggaccagcattgttatgatgtgttgatcttccccagccacttgaaaaacgacctgattaatatcgacctcttcaaagactacaaacttatttttcaggataaatcccggagcttggccgtgcacagcgtgaaggccttgttgaacatggacgacgatgtgctcatggtgaacaccggcagttggtataccgttagccacatgtctattcttactaacaataacacatcgaaagtctttgtctgtggggtccaaagtcaggcaaaagatcctgatcttaaaactctgttcacaaaaataggctgcaagaatatcgagattttgcatgaaaaattcatcaatatagagagcaaagatcacaggctccagaaagtgaaggtgattttgcttctccccagatgttccggtctgggggtgagtaaccccgtcgaattcatcctaaacgagcatgaagacactgaatttctcaaagaccattctcagggcggcatttcggtagacaaacttcatgttctggctcagcagcaatacgaacagctgacacacgctatgaaattcaccaaagcgcaggccgtggtttattgcacttgttctgtattccccgaggagaacgaggccgtggtgaaaaaggccttggaattccaggatttaggcaataaaggtcagccctacaggctctcaccccctgtcttgcccttatgttcactgaaggaaatccaactgagtaccgacaaattcttccgcatggaaccctccgaaatcaccaatggttgtttcctgagcattttaacacgcgaaagggacccctccgagacggtgtcggttaacgacgtattagcacgcgccgccgcgaagggattactggatggcatcgaattggggaaatcttctaagcgtgaaaagaaaaagaagaagagcaagactagtttaactaagggcgccactaccgacaatggtatacaaatgaagattgctgaattcttgaatcgggaaactaaagcttccgcgaacctgtccgaaacagtcacaaaaccacccctaccgcagaagaataccgcgcaggttggtgcttctagccagacaagaaaaccaaacaaactggcccctcatcccgcggtccctgccttcgtaaagaacacgtgcccctcccggccacgggagcgccagacccattttctcaggcctcgcccggaggacaggatggtggcattgaagccaattaaaattgttcttcccccagtttttatgccgttctcgtctccccagggcataaggtcaagaatgccaacccagcacctgtactgcaggtgggtagcacccaaagcactggtgcctacgtgtttacccacacactctctgtctcggaaggaagagaaacccaaagatgacaccccgtcttcattacttcgtcccccacgacggtggctatag

SEQ ID NO: 216247 - DNA, 3698 bp, Artificial Sequence
  derived and/or modified sequence
cgccgcgccccctgccccacctccgctcgcggttgccatgaagacccggtccgggagcagtcgactgccggagactcgggaggctgagctttcctcggcctgagccagccagaccccgggcaccgcgctcacccctcttcgccgccacgtccgcgaaggcctcacgcgcgaggccaggcgaggccccgaggcgcccaccacttcacgacaccggagcgaaccgggcgccagaggctgcgacccccctgccccgaatcctgccggtgggagtggctgcatttgaaccaaacggccttcgcgggcagcagccgtcgccccgcagtcccggggctcccaagggcctgtgaccgacgccgccctccgcgtcttcgtccccgaagccccgggaaccatccgccctcgggagaccatgctgcagatgcgaggaaagccgtttcctggaacatcggaattctaaccccagggtgaaggactcacgacaggcgaggggcagacatgctgaattccacgggcgaactggagttttcgaacgaagaagatcccgagatcatctcccaactcacttccctgcctctgtccggtgggaaaagctcagctggtgtgcccgaaaaaacgggctatccggactccgtttatgtcatggcagccaacatttttcagggtattcgaatcgaaaagtcggcacagaaagtcttaatcaagtatgggaatgaacccctgcggtccttgtccgagtctgaggatcagtcctttcagcgtttgtcttatgagctggctttcagtgccctgaaatatcaagatattttggaaactatattgatagacagctgtatcttcccaagtaccacaataccagatcatttgagcagtcttattattgtgatgctatatgatttccaagatagaaaatttcaaactcgtgtcctttctgataatgaagagcccatatcagaagttcaagaagtagagaaccttcttaacagttttaagataaaattggctgcagcattggcaagatgtcgaatcaagcatgatgccctttcaatttaccacatccttccagaaacagttaggaaacaggaactaagggcctccactttaccactttatgcttggataaatacttgtaaaatcagccctgaagaagtttataataatttgaagagaagaggctataataaagtcaaatctgtattgcatattgatgataaagtctttgctgtggatcaacattgctatgatgtcttaatttttccatctcatcttaaaaatgatcttataaatatagatcttttcaaagattacaaacttatatttcaggacaaatctcgaagtcttgctgtccattctgtaaaggctttattaaatatggatgatgatgtcttaatggtcaatacaggctcatggtacacagtttcccacatgtcaattttaacaaataataatacctcaaaagtatttgtgtgtggagtacaatcacaagctaaggatcctgacttgaagacccttttcacaaaaataggatgtaaaaatattgaaatacttcatgagaaatttattaacattgaatcaaaggatcacaggttacagaaagttaaagtgattttgctgctacctcgttgttcaggactgggtgttagtaatccagtagaatttattttaaatgaacatgaagatacagaattccttaaagatcactctcaaggaggcatctcagtggacaaacttcacgttcttgctcaacagcagtatgaacagctaacacatgcaatgaaatttactaaagctcaagcagttgtttactgcacatgttcagtttttccagaagaaaatgaagctgttgttaagaaagcactggaatttcaagaccttgggaataaaggacaaccttacaggcttagtcctcctgttcttccactgtgctccttaaaggaaattcaattgtctactgataaatttttcagaatggaaccatctgaaattaccaatggttgttttctttctattttaacaagggagcgggacccttctgagacagtgtctgtgaatgatgttttggcccgagctgcagccaagggtctgctggatgggattgagttgggtaaatcatcaaaacgggagaagaagaagaaaaaatcaaaaacatcattgacaaaaggtgccactactgataatggcatccaaatgaaaattgctgagttcctgaatcgagaaactaaagccagtgctaatctatcagagactgtaacaaaaccacctcttccccagaaaaatactgctcaagtgggggcttcctcacagaccagaaaacccaacaagctggccccccatcctgcagtgcctgcatttgtgaagaacacttgtccctccagaccgcgtgaacggcagacacacttcttaagacctcggccagaagacagaatggttgctctgaaacccatcaagattgttctgcctccagtctttatgccattttcaagtccccaagggatcagatctcggatgccaactcaacatttgtactgtcgttgggttgcacccaaggcacttgtgcccacctgccttcccacacactcactatccagaaaagaggaaaagcctaaagatgacacaccttcctccctactcaggcctcctcggcgatggctttgattgtcttgtgttttttataggggccaaagagcagttgattttttttcaaagtctagtatttctctgaagattctacatctctacacaagatattcattcttttggtcacctagggatcttctaagtgtgatattactttcagagaattcagacaagtgagaaacaataatgtaggagtcagcaaagcagaattcagagacttcagccaatcactgctgctctgagaggatccagttagagactcagtatcagcggtcagaacttatctcactcctgtgaactttcaggctggacttaaagctgccaagtttcccctgcagggaaggaaacactgcctcccttcagcaggtagctcattagaaagccaaacaggcaaacgatcctggcctctcccgccagctgaccgctcttcagcatccatgcggttgtagtcgtgactttctcagtcacgatcaagggtgattttttcttaaatatcaagctgttctttgaacagggaatgaacatgagtttttgtaacgtgactgaagttgagtttaagtaggaagcgcaggaagttcccaagtgccaggtgtgtgtagctcagagttccttttacagtgaggtgtctctcactgggggagcttccaggatcctgagcagactggacacaatcatctctcccttcctctatgtcaagcactgttacaaaagactgtgagcaaatttccatctaaatattaataattctgaagaagaggcaaaactgttgaatgcaagcgatacctattgttgaagaaacccacaaatttctgattctaagatcaggggatacaacaaaatctacaagtcatttcaaatagcacacaggaatcaaactttggtaaatcatttctgaggcacaattaaatatattgtagcactatgttaattaattatattaaatgtcgattcatcttgaatgtattctcaattgcctaccaaaaattggtatgattatcatttctgggtctactgatttttcatcatggcaacagaaattgtcattaaatagaattaagatacaa

SEQ ID NO: 216248 - DNA, 2157 bp, Artificial Sequence
  derived and/or modified sequence
atgctaaacagtaccggagaacttgagttctctaacgaagaggatcccgagatcatttctcagctcacctccctgccgttgagcggcggaaaatctagcgccggagttccagagaaaacgggctacccagactcagtttacgtcatggcagctaatattttccaggggatccgcatagagaagagcgcacagaaggtgctgattaagtatggcaatgagcctctccgctctctcagcgaatcagaagaccaatcattccagcggctgagctatgagttagcttttagtgcactgaagtaccaggatatcctcgaaaccatcctgatcgattcatgtatctttccctccaccactatcccggaccatctcagttctctcataattgtgatgctgtatgatttccaggatcgcaaatttcaaactagagttctgtctgataacgaggagcccatcagtgaggttcaggaggtggagaacctcctgaacagcttcaagattaagttggctgccgctctggccagatgccgcatcaagcacgatgccctgtcaatctaccacattctgcccgagacagtgagaaaacaagagctgagggcctccaccctgcctctatacgcgtggatcaatacctgtaagatcagccctgaggaagtttataacaatctgaaacgaaggggctacaataaagtcaaatccgtccttcatatcgacgacaaagtatttgcggtggaccagcactgctacgacgttcttattttcccaagtcatttgaagaacgacctgatcaatatcgatttgttcaaggactataaactgatttttcaagataagtcccgctccttggccgttcactcagttaaggctcttcttaacatggatgacgacgtgctgatggtgaacacagggtcttggtacaccgtgtcgcacatgagtatcctgaccaacaacaacacttctaaagtgtttgtgtgcggggtgcagtcccaggcaaaggatccagacttgaagaccctttttacaaagatcggctgcaagaatattgaaattctgcacgaaaaattcattaacattgaatccaaggatcataggcttcagaaggttaaagtcattctgcttttgccccgttgtagtggcctgggcgtgtctaatcccgtggagtttattttaaacgagcatgaagacaccgaattcctaaaagaccactcgcaggggggaatcagcgttgacaagctgcacgtgctggctcaacagcaatatgaacagcttacccacgccatgaagttcactaaagcacaggccgtcgtgtactgcacctgttccgtcttcccagaagaaaacgaggccgtcgtgaagaaggccttggagtttcaggatttgggcaacaaaggccagccttacaggctgtctcccccagtgttacctctgtgcagcttaaaggaaattcagttaagcaccgataaattctttcggatggaacccagcgaaattacaaacggttgttttcttagcattcttaccagagaacgcgacccgtctgaaaccgtttcagttaatgacgttctggcgagagctgctgccaaaggactactggacggcatcgaactgggaaagtcaagtaagagagagaagaaaaaaaagaaaagcaagacaagtctcacaaaaggagcaacaaccgacaatggaatacaaatgaaaattgcagagttcctgaacagagagactaaggcctctgccaatctgtccgagaccgttaccaagcccccactgccacagaagaacactgcgcaggtcggggcatcttcccaaaccaggaagcccaacaagctcgctccccatccggctgtgcctgccttcgtgaaaaatacctgcccgtcccggcctcgggagaggcagacgcactttctgagaccgagacccgaagatcgtatggtggcattgaaaccgattaagattgtgctcccgccagtctttatgccattctcgtcccctcaagggattaggagtaggatgccaacgcagcatctgtactgtcgctgggttgctccaaaagccctcgtgccaacatgtctcccaactcattccctgagtcggaaggaggaaaaaccaaaggacgataccccctcatcattactgaggcctccccgacgctggctgtag

SEQ ID NO: 216249 - protein, 867 aa, Artificial Sequence
  derived and/or modified sequence
MENEKENLFCEPHKRGLMKTPLKESTTANIVLAEIQPDFGPLTTPTKPKEGSQGEPWTPTANLKMLISAVSPEIRNRDQKRGLFDNRSGLPEAKDCIHEHLSGDEFEKSQPSRKEKSLGLLCHKFLARYPNYPNPAVNNDICLDEVAEELNVERRRIYDIVNVLESLHMVSRLAKNRYTWHGRHNLNKTLGTLKSIGEENKYAEQIMMIKKKEYEQEFDFIKSYSIEDHIIKSNTGPNGHPDMCFVELPGVEFRAASVNSRKDKSLRVMSQKFVMLFLVSTPQIVSLEVAAKILIGEDHVEDLDKSKFKTKIRRLYDIANVLSSLDLIKKVHVTEERGRKPAFKWTGPEISPNTSGSSPVIHFTPSDLEVRRSSKENCAKNLFSTRGKPNFTRHPSLIKLVKSIESDRRKINSAPSSPIKTNKAESSQNSAPFPSKMAQLAAICKMQLEEQSSESRQKVKVQLARSGPCKPVAPLDPPVNAEMELTAPSLIQPLGMVPLIPSPLSSAVPLILPQAPSGPSYAIYLQPTQAHQSVTPPQGLSPTVCTTHSSKATGSKDSTDATTEKAANDTSKASASTRPGSLLPAPERQGAKSRTREPAGERGSKRASMLEDSGSKKKFKEDLKGLENVSATLFPSGYLIPLTQCSSLGAESILSGKENSSALSPNHRIYSSPIAGVIPVTSSELTAVNFPSFHVTPLKLMVSPTSVAAVPVGNSPALASSHPVPIQNPSSAIVNFTLQHLGLISPNVQLSASPGSGIVPVSPRIESVNVAPENAGTQQGRATNYDSPVPGQSQPNGQSVAVTGAQQPVPVTPKGSQLVAESFFRTPGGPTKPTSSSCMDFEGANKTSLGTLFVPQRKLEVSTEDVH

SEQ ID NO: 216250 - protein, 867 aa, Artificial Sequence
  derived and/or modified sequence
MQKKKENLFCEPHKRGLMKTPLKESTTANIVLAEIQPDFGPLTTPTKPKEGSQGEPWTPTANLKMLISAVSPEIRNRDQKRGLFDNRSGLPEAKDCIHEHLSGDEFEKSQPSRKEKSLGLLCHKFLARYPNYPNPAVNNDICLDEVAEELNVERRRIYDIVNVLESLHMVSRLAKNRYTWHGRHNLNKTLGTLKSIGEENKYAEQIMMIKKKEYEQEFDFIKSYSIEDHIIKSNTGPNGHPDMCFVELPGVEFRAASVNSRKDKSLRVMSQKFVMLFLVSTPQIVSLEVAAKILIGEDHVEDLDKSKFKTKIRRLYDIANVLSSLDLIKKVHVTEERGRKPAFKWTGPEISPNTSGSSPVIHFTPSDLEVRRSSKENCAKNLFSTRGKPNFTRHPSLIKLVKSIESDRRKINSAPSSPIKTNKAESSQNSAPFPSKMAQLAAICKMQLEEQSSESRQKVKVQLARSGPCKPVAPLDPPVNAEMELTAPSLIQPLGMVPLIPSPLSSAVPLILPQAPSGPSYAIYLQPTQAHQSVTPPQGLSPTVCTTHSSKATGSKDSTDATTEKAANDTSKASASTRPGSLLPAPERQGAKSRTREPAGERGSKRASMLEDSGSKKKFKEDLKGLENVSATLFPSGYLIPLTQCSSLGAESILSGKENSSALSPNHRIYSSPIAGVIPVTSSELTAVNFPSFHVTPLKLMVSPTSVAAVPVGNSPALASSHPVPIQNPSSAIVNFTLQHLGLISPNVQLSASPGSGIVPVSPRIESVNVAPENAGTQQGRATNYDSPVPGQSQPNGQSVAVTGAQQPVPVTPKGSQLVAESFFRTPGGPTKPTSSSCMDFEGANKTSLGTLFVPQRKLEVSTEDVH

SEQ ID NO: 216251 - DNA, 2604 bp, Artificial Sequence
  derived and/or modified sequence
atggagaacgaaaaggagaatctgttctgtgagcctcacaagagagggttgatgaaaactccccttaaagagtccactaccgccaacattgtccttgccgagatccaacctgatttcggacctttgaccaccccgaccaagcccaaggagggatctcagggggaaccctggacccctaccgcaaatctgaagatgctgatttctgccgtgagccccgaaataaggaacagagaccagaaacgaggccttttcgacaatcggtccggcctccctgaggcaaaagattgtattcacgagcacttgagtggcgacgagttcgaaaaatctcagcccagcagaaaggaaaagtctctcggacttctgtgccataaatttctagctcgctaccctaactaccctaaccccgcagtgaataacgacatctgcctggacgaggtggctgaggagctgaatgtagagcgaaggcggatttacgacattgtgaatgtgttggagtcgctacacatggtgagccgactagccaaaaaccgctatacctggcacgggcggcacaatttaaacaaaactctggggacactcaagagtattggtgaggagaacaagtacgccgaacagatcatgatgattaagaaaaaagaatacgagcaggaatttgacttcataaagagttactctattgaggatcatatcattaaatccaacaccggcccaaacggccaccccgacatgtgtttcgtcgaattgcctggggtcgagtttcgggccgcaagcgtgaatagccgtaaagacaaaagtctgagggtgatgagccagaagtttgtcatgctgttcctcgtgtccaccccccaaattgtctctttggaagtagccgccaagatcttaatcggcgaggaccacgtcgaagatttggacaaatctaaatttaaaacaaagatcagacggctttatgatattgccaatgtcctctcatccctagacttgataaaaaaagtccacgtgaccgaggagcgcggccgcaaaccagcattcaagtggaccggcccagaaatcagcccaaacacaagtggctcctcccccgtgatccactttacaccttccgatttggaggtgaggcggagttcaaaagaaaactgcgctaagaatttgttttccaccaggggtaaaccaaatttcacacggcacccctcattgatcaaattagttaagagcattgaaagcgacaggaggaaaatcaacagtgcccccagctctcctattaaaacgaataaggcagaatcatcccaaaactccgctcctttcccctcaaagatggctcagttagcggcgatttgtaagatgcaattagaagagcagtcctccgaaagccgacagaaggtaaaggtgcaactggctaggtccgggccttgcaagccagtggcccccctggacccccccgttaatgccgagatggagcttactgcaccgtcacttatccagcccttagggatggtgcctctgattccttcccccctgtcaagcgcggtccctctgatccttccccaagctcccagtggaccctcctacgccatttacctccagcccactcaggcccatcagtctgtgacacctccccaggggctgagcccaaccgtgtgcacaactcattcaagcaaggccactggctcaaaagattcaaccgacgctactaccgagaaagctgccaacgacacaagtaaggcgtccgcctcaactcgcccaggcagcctcctgcctgcccctgaaaggcagggagccaaatctcgtaccagagagcccgccggggagcgaggatccaaacgggcaagcatgctggaagactccggaagcaagaagaagtttaaggaagaccttaagggtctggagaatgtttcagcaaccctgttcccaagtggttacttgatcccactgactcagtgctcgagcctgggtgccgagtccatcctcagtgggaaggaaaatagctccgccctgtcgcccaatcatcgtatctacagctcacccatcgccggcgttattcccgtgacatccagtgaactgaccgccgttaactttccgagcttccatgtaacgccactcaaattgatggtgtctccaaccagtgtcgcagccgtgcccgtcgggaattccccagctctggcgtccagtcaccccgtgcctatccagaacccatcctcagcaatcgttaactttaccctgcagcacctgggattgatcagtccaaacgtccaactgagtgcaagcccaggatctggcattgtacctgtgagtccccgaattgagagcgtgaatgtggcgccagagaacgccgggacccagcagggtagagccaccaattacgatagcccagtgcctggccagagccagcccaacggccagagtgtcgctgtgaccggggcccagcagccagtccctgtgacacctaaaggctcacagttggtggccgagtccttttttcgtactcctgggggacccacaaagccaacaagctctagttgtatggatttcgagggcgcgaacaaaacctcgttaggtactctgttcgtgccacaaagaaaactagaggtcagcacggaggatgtgcactag

SEQ ID NO: 216252 - DNA, 2604 bp, Artificial Sequence
  derived and/or modified sequence
atgcagaaaaagaaggagaacctgttctgtgagccccataagcggggcctaatgaagactcccctgaaggagtcaacaactgcaaatatcgtccttgcagagatccagccagacttcgggcccctgaccactccgactaagccaaaggaggggtcacaaggagagccgtggaccccaaccgctaatctgaagatgctgatcagtgcagtgagccctgaaatccgcaaccgggaccagaagcgcggcctgttcgacaaccgctctggactaccggaggcgaaggattgcattcacgaacatctaagcggcgatgagtttgagaagagccagccatctagaaaggagaaatctctgggacttctgtgccataaattcctcgcaagataccccaactatcccaaccccgctgtgaataacgacatctgcttggatgaggtggccgaggagcttaatgtagaaaggcgtcgcatctatgatattgttaatgtgcttgaatccctgcatatggtgtcaagacttgccaaaaacaggtacacttggcacgggagacacaatcttaataagacactgggaacactgaaaagtatcggggaagagaacaaatatgccgaacagataatgatgataaagaagaaggagtacgagcaagaatttgattttatcaagagttattccattgaagatcacatcattaagtccaacacaggaccaaatggccatcctgacatgtgctttgttgaattgcctggggtcgaatttcgggccgcaagtgtgaactcaaggaaggataagagccttagagtgatgagccagaaatttgtcatgctctttctagtaagtactccacagatagtgtcattagaggtggccgccaagattcttattggagaggatcacgtggaagacctcgataagtcaaagttcaaaacaaaaatacgacggctgtacgatattgccaacgtcctctcgtccctcgatctgattaaaaaagtgcacgtgaccgaggaaaggggaaggaagccagcctttaaatggacaggccctgagatctcccctaatacttccgggagcagtccagtcatacatttcacaccgtcagaccttgaagtgcgtcgctcgagtaaggagaattgtgcaaagaacttgtttagcactcgcggcaagccaaatttcactagacacccctcgctgattaagctggtcaagagtattgaatcagacagacgcaaaattaacagcgccccctcctcaccaattaagaccaacaaggcagaatcatctcagaacagtgccccattcccctctaaaatggcccagctggccgctatttgtaaaatgcaactggaggaacagtcatcagagagcaggcaaaaggtaaaggttcagctggcaagaagtggcccctgtaagcctgttgccccattagatccaccagtaaacgctgagatggagctgaccgcaccctcccttattcagcccctgggtatggtacccctgattccatctcccttatcatctgccgtgcctcttattcttcctcaggctccctctggtcccagctacgctatttacctccaacccacacaagcccaccaatctgtcacaccaccccagggtttatctccgacagtgtgcacaacacattccagtaaggccacagggtccaaagactctactgatgctactacagagaaggccgcgaacgacactagcaaggccagcgctagcacaagacctggttcacttttaccggcccccgaaaggcagggcgccaaatcacgcactagagagcctgcaggcgagcgagggagcaaaagagcgagcatgctcgaggacagtggatcaaagaagaaatttaaggaggacctgaaagggctcgaaaacgtgagcgccaccttattccccagcggctacttgatccccctcacccagtgtagctcccttggggcagagtccatattgagcggcaaggagaattctagtgccctgagcccgaaccatagaatctactcatcaccaatcgcgggagtaatcccagtaacaagtagcgaactaaccgccgtcaattttccctcgttccacgtaactccattgaaactgatggtctcaccaacttcagtggccgccgttcccgtgggtaactctccagcgctcgcctcctcgcacccagtgcctatccagaacccaagtagtgctattgtcaactttaccttacagcatctgggtctcatctcccctaacgttcaactctcagcctcacctggttccggaatagttcctgtcagtccacgaatcgagagcgtgaacgtggctcccgaaaacgccggcactcaacaaggcagagccaccaactacgattctcctgtgccagggcaaagtcaacctaacggtcagtccgttgcagtgacaggagcccagcagccagtacccgtcactccgaagggtagccagttggtagctgagtcattcttccggaccccaggaggccctaccaaacctacaagtagcagttgcatggactttgagggagcgaacaagacctcactcggaacactgttcgttccccagcgcaagctggaagtctccactgaagatgtgcactag

SEQ ID NO: 216253 - DNA, 2604 bp, Artificial Sequence
  derived and/or modified sequence
atggagaacgagaaggaaaatctcttttgcgagccgcataagcggggtttaatgaagacacccttgaaggagagcaccaccgcaaacatcgtgctggccgaaattcaacctgacttcggacctctgacaacgccaacaaagcctaaggaagggtcccagggcgagccctggactccaactgcgaatctgaaaatgctgatcagcgcggtttcccccgagattcgaaacagggaccagaagagaggcctgtttgataacaggtctgggctgccagaagcgaaagattgtatccatgagcatctttcaggggacgaattcgagaagagccagcccagccgcaaagaaaagagcctcgggctgctctgtcacaaatttctggcaaggtaccctaactatccgaatcctgccgtgaataacgatatttgtctcgatgaggtggccgaggaactcaacgtggagcgcagacgaatctatgacatagtcaacgtgctggagtctctccatatggtgagtcggctggcaaagaaccggtacacctggcatgggcgtcataatctgaacaagacactgggtacgctgaaatctattggagaggagaacaagtacgccgaacaaatcatgatgatcaaaaagaaggagtatgaacaggagtttgatttcatcaaaagctacagcatcgaagaccacatcatcaaaagtaacacaggtcctaatggccatccggacatgtgttttgtggagctgccgggggtggagtttagagctgctagtgtgaacagccgtaaggataaatccttgcgtgtaatgtctcagaagtttgttatgttattccttgttagcacacctcagatcgtgtcccttgaagttgcggctaagattctgatcggagaagaccacgtagaggatttagataaatcgaaattcaagacaaaaatccgaagactgtacgacattgcaaatgtgctttcctctctggacctaatcaagaaggtacacgttacagaggaaagaggccgcaaacccgcctttaagtggaccggacccgagattagtccaaacacttcaggcagctctccagtaattcatttcaccccctctgacttggaagtgcggagaagtagcaaagagaattgtgctaagaacctcttcagtacaaggggcaagcctaatttcaccagacacccctctcttatcaaactggtgaaatctatcgaaagtgacagacgcaagatcaactctgcaccgagctctccaataaaaaccaataaggccgagagcagtcagaacagcgcaccttttccgagcaaaatggcacagttggctgccatatgcaagatgcagctcgaggagcagagtagcgaatccaggcaaaaagtgaaagttcaattggcccggagcggcccatgtaaacccgttgcgcccctggatcctcccgtaaacgctgagatggagcttactgccccctcactgatacaacccctgggcatggtgcctctgattccttctccattgagtagcgcagtgcccctcatcctgccacaggctccatccggaccatcatacgccatatacttgcagccaacccaggcacaccagtctgttactccccctcagggccttagccctacggtgtgcacgacccactctagcaaagccactggatcgaaagacagcaccgacgcaactactgaaaaggccgctaacgacacttcgaaggcctctgcgtctaccaggccagggagcctgttgccggctccagaacggcagggcgccaaatcaagaactcgggaaccggccggtgagaggggctctaagcgggcatcaatgctcgaagactcagggtctaaaaaaaagtttaaagaagacttgaagggtctggaaaacgtgtctgctacactattcccatcaggctaccttattccactgacccagtgttcatctctcggtgccgaatctattctatccgggaaggagaactcctcggctttaagtccaaaccataggatatatagctctcccatcgccggggtcatcccggtaacttcctccgagcttactgcagtaaattttccatcttttcacgttaccccactaaagttgatggtttctcccacctccgtggcagccgtgcccgtcggtaacagccctgcacttgcctcctcgcaccctgtgccaattcaaaacccttccagtgctatcgtaaacttcactctgcagcatctcggtttaatcagccccaatgtacagctttccgcgagcccgggctccggcatagtcccagtgtcaccccgcattgagtcagtgaacgtggcccccgagaatgctgggactcagcaggggagggcaaccaattatgactctcctgtgccagggcagagccagcctaatgggcagtcagtcgcggtgactggcgcccaacagccggtgcccgtgacacctaagggatcgcagctggttgctgagagtttcttccgaactcctggcggtccaacgaaacccacttcctccagctgcatggacttcgagggtgcaaacaagacttcactgggaaccctgtttgtgccccaaagaaaattggaggttagtacggaagacgtgcactag

SEQ ID NO: 216254 - DNA, 2604 bp, Artificial Sequence
  derived and/or modified sequence
atggagaatgagaaggagaacctcttctgtgagccccacaagaggggcctgatgaagacccccctgaaggagagcaccacagccaacatcgtgctggccgagatccagcctgactttggccccctgaccacccccaccaagcccaaggagggcagccagggcgagccctggacccccacagccaacctgaagatgctgatctctgctgtgtccccagagatccggaacagagaccagaagaggggcctgtttgacaacagaagtggcctgcctgaggccaaggactgcatccacgagcacctgtctggagatgaatttgagaagagccagcccagcaggaaggagaagagcctgggcctgctgtgccacaagttcctggcccgctaccccaactaccccaacccagctgtgaacaatgacatctgcctggatgaggtggccgaggagctgaatgtggagcggcggcgcatctatgacatcgtgaatgtgctggagagcctgcacatggtgtcccggctggccaagaaccgctacacctggcacggccgccacaacctgaacaagaccctgggcaccctgaagagcatcggggaggagaacaagtatgcagagcagatcatgatgatcaagaagaaggagtatgagcaggagtttgacttcatcaagagctacagcattgaggaccacatcatcaagagcaacacaggccccaacggccacccagacatgtgctttgtggagctgcccggggtggagttccgggccgcctctgtgaacagcaggaaggacaagagcctgcgggtgatgagccagaagtttgtgatgctgttcctggtgtccaccccccagatcgtgtccctggaggtggccgccaagatcctgattggagaagatcatgtggaggacctggacaagagcaagttcaagaccaagatccggcggctgtatgacatcgccaacgtgctgagcagcctggacctgatcaagaaggtgcacgtgacagaggagcggggcaggaagccagccttcaagtggacaggccctgagatcagccccaacaccagcggcagcagccctgtgatccacttcacccccagcgacctggaggtgagaagaagcagcaaggagaactgtgccaagaacctcttcagcacccggggcaagcccaacttcaccaggcaccccagcctcatcaagctggtgaagagcattgaaagtgacaggaggaagatcaacagcgcccccagcagccccatcaagaccaacaaggccgagagcagccagaacagcgcccccttccccagcaagatggcccagctggccgccatctgcaagatgcagctggaggagcagagcagcgagagccggcagaaggtgaaggtgcagctggcccggagcggcccctgcaagcctgtggcccccctggacccccctgtgaatgctgagatggagctgacagcccccagcctcatccagcccctgggcatggtgcccctcatccccagccccctgagcagcgctgtgcccctcatcctgccccaggcccccagcggccccagctatgccatctacctgcagcccacccaggcccaccagagcgtgaccccaccccagggcctgagccccaccgtgtgcaccacccacagcagcaaggccaccggcagcaaggacagcacagatgccaccacagagaaggccgccaatgacaccagcaaggccagcgccagcaccaggcctggcagcctgctgcctgcccctgagcggcagggcgccaagagcaggacccgggagcctgctggggagcggggcagcaagagggcctccatgctggaggacagcggcagcaagaagaagttcaaggaggacctgaagggcctggagaatgtgtctgccaccctcttccccagcggctacctgatccccctgacccagtgcagcagcctgggcgctgagagcatcctgagcggcaaggagaacagcagcgccctgagccccaaccaccgcatctacagcagccccatcgccggggtcatccctgtgaccagcagcgagctgacagctgtgaacttccccagcttccacgtgacccccctgaagctgatggtgagccccacctctgtggccgctgtgcctgtgggcaacagccctgccctggccagcagccaccctgtgcccatccagaaccccagcagcgccatcgtgaacttcaccctgcagcacctgggcctcatcagccccaacgtgcagctgagcgccagccctggcagcggcatcgtgcctgtgagccccagaattgaatctgtgaatgtggccccagaaaatgccggcacccagcagggccgggccaccaactatgacagccctgtgcccggccagagccagcccaacggccagagcgtggccgtgactggagcccagcagcctgtgcctgtgacccccaagggcagccagctggtggccgagagcttcttccgcaccccaggcggccccaccaagcccaccagcagcagctgcatggactttgaaggagccaacaagaccagcctgggcaccctgtttgtgccccagaggaagctggaggtgtccacagaagatgtgcactag

SEQ ID NO: 216255 - DNA, 2604 bp, Artificial Sequence
  derived and/or modified sequence
atgcagaagaagaaggagaacctcttctgtgagccccacaagaggggcctgatgaagacccccctgaaggagagcaccacagccaacatcgtgctggccgagatccagcctgactttggccccctgaccacccccaccaagcccaaggagggcagccagggcgagccctggacccccacagccaacctgaagatgctgatctctgctgtgtccccagagatccggaacagagaccagaagaggggcctgtttgacaacagaagtggcctgcctgaggccaaggactgcatccacgagcacctgtctggagatgaatttgagaagagccagcccagcaggaaggagaagagcctgggcctgctgtgccacaagttcctggcccgctaccccaactaccccaacccagctgtgaacaatgacatctgcctggatgaggtggccgaggagctgaatgtggagcggcggcgcatctatgacatcgtgaatgtgctggagagcctgcacatggtgtcccggctggccaagaaccgctacacctggcacggccgccacaacctgaacaagaccctgggcaccctgaagagcatcggggaggagaacaagtatgcagagcagatcatgatgatcaagaagaaggagtatgagcaggagtttgacttcatcaagagctacagcattgaggaccacatcatcaagagcaacacaggccccaacggccacccagacatgtgctttgtggagctgcccggggtggagttccgggccgcctctgtgaacagcaggaaggacaagagcctgcgggtgatgagccagaagtttgtgatgctgttcctggtgtccaccccccagatcgtgtccctggaggtggccgccaagatcctgattggagaagatcatgtggaggacctggacaagagcaagttcaagaccaagatccggcggctgtatgacatcgccaacgtgctgagcagcctggacctgatcaagaaggtgcacgtgacagaggagcggggcaggaagccagccttcaagtggacaggccctgagatcagccccaacaccagcggcagcagccctgtgatccacttcacccccagcgacctggaggtgagaagaagcagcaaggagaactgtgccaagaacctcttcagcacccggggcaagcccaacttcaccaggcaccccagcctcatcaagctggtgaagagcattgaaagtgacaggaggaagatcaacagcgcccccagcagccccatcaagaccaacaaggccgagagcagccagaacagcgcccccttccccagcaagatggcccagctggccgccatctgcaagatgcagctggaggagcagagcagcgagagccggcagaaggtgaaggtgcagctggcccggagcggcccctgcaagcctgtggcccccctggacccccctgtgaatgctgagatggagctgacagcccccagcctcatccagcccctgggcatggtgcccctcatccccagccccctgagcagcgctgtgcccctcatcctgccccaggcccccagcggccccagctatgccatctacctgcagcccacccaggcccaccagagcgtgaccccaccccagggcctgagccccaccgtgtgcaccacccacagcagcaaggccaccggcagcaaggacagcacagatgccaccacagagaaggccgccaatgacaccagcaaggccagcgccagcaccaggcctggcagcctgctgcctgcccctgagcggcagggcgccaagagcaggacccgggagcctgctggggagcggggcagcaagagggcctccatgctggaggacagcggcagcaagaagaagttcaaggaggacctgaagggcctggagaatgtgtctgccaccctcttccccagcggctacctgatccccctgacccagtgcagcagcctgggcgctgagagcatcctgagcggcaaggagaacagcagcgccctgagccccaaccaccgcatctacagcagccccatcgccggggtcatccctgtgaccagcagcgagctgacagctgtgaacttccccagcttccacgtgacccccctgaagctgatggtgagccccacctctgtggccgctgtgcctgtgggcaacagccctgccctggccagcagccaccctgtgcccatccagaaccccagcagcgccatcgtgaacttcaccctgcagcacctgggcctcatcagccccaacgtgcagctgagcgccagccctggcagcggcatcgtgcctgtgagccccagaattgaatctgtgaatgtggccccagaaaatgccggcacccagcagggccgggccaccaactatgacagccctgtgcccggccagagccagcccaacggccagagcgtggccgtgactggagcccagcagcctgtgcctgtgacccccaagggcagccagctggtggccgagagcttcttccgcaccccaggcggccccaccaagcccaccagcagcagctgcatggactttgaaggagccaacaagaccagcctgggcaccctgtttgtgccccagaggaagctggaggtgtccacagaagatgtgcactag

SEQ ID NO: 216256 - DNA, 2604 bp, Artificial Sequence
  derived and/or modified sequence
atggagaacgagaaggagaacctgttctgcgagccccacaagcgggggcttatgaagacgcctctgaaggaatccacgacagctaacattgtgcttgccgagatccagccggactttggacccctgacaacccccacaaaaccaaaagaagggtcccagggggaaccctggactcctaccgccaatctgaaaatgttgatctccgcagtatcccctgagatcaggaaccgagaccagaagcggggattatttgataaccgatctggcttgcccgaagctaaggactgtatccacgaacacctgtccggcgacgaattcgaaaaaagccagccatctaggaaagagaagtccctcggactgctgtgccacaagttcttagcccgctaccccaactacccgaacccagccgtcaataacgacatctgtctggacgaagttgctgaggagcttaacgtggaacgtcggcgcatctacgatattgtcaacgtgctggaatccctgcacatggtgtcccgcctggcaaaaaaccgctatacatggcacggcaggcataacctcaataagacgctcggcactttgaaatcaatcggcgaggagaataagtacgcggagcaaattatgatgattaaaaagaaagaatacgagcaggagttcgattttatcaagagttactctatagaggaccacatcatcaaatcaaatacaggacctaatggacatcctgacatgtgcttcgttgaattgcctggagtcgagtttcgagctgcaagcgtaaatagtaggaaggataagtccctgagggtcatgtctcagaagtttgtgatgttgtttctagtgagcacaccacaaatcgtgtctctggaagtggcggcgaagattttgatcggtgaagaccatgtcgaagatctggacaaaagcaagtttaagaccaagatccggcggttgtatgatatagccaatgtcctcagttcccttgaccttatcaagaaggttcacgtgactgaggagcgcgggcggaagccagcctttaaatggactggaccagagatcagccctaacacatctggcagttcacctgtgatccattttaccccctctgacctagaggttcggcgcagtagtaaggagaactgtgctaagaaccttttttctacccgagggaaacctaattttacacgccaccctagcctgattaaactggtgaaatcaattgagagcgatcggaggaaaattaactccgctccctcgagtcccattaagactaataaagctgaatcctcacagaactcggccccttttccaagcaaaatggcccaattagccgctatctgcaagatgcagctggaagagcagagcagtgagtctaggcagaaagttaaagtccagttagcacgctctggtccatgcaagcctgtcgcgccgctagaccccccggttaatgctgagatggaattgactgccccttctctcatccagccactcggcatggttcccctcatcccttccccgctgtctagcgctgttccattaatactgccccaggcgccctccggtccgtcatatgcaatatatctccaacctacccaggctcatcaaagcgtcacaccaccacaagggctctctcctaccgtgtgcaccacacattctagcaaagcaaccggaagcaaagactctacggacgctaccactgagaaagcagctaatgatacctcgaaggccagtgcctcaacgagacccggatcgctccttccggcgccagagagacaaggcgctaaatcacgtaccagggaacctgccggcgagaggggcagtaagcgagcgtccatgctagaggactcaggcagcaaaaagaagttcaaagaagacctgaagggcctcgagaatgtttctgccaccttatttccctccgggtaccttatccccctcacacagtgttcttctctcggagcagagagcattctgtctggaaaggagaactcctcagcacttagccctaaccaccgaatctactcatcgcccatcgcaggtgtgatccctgttaccagtagcgagctgactgctgtaaactttcccagttttcatgtaacacctctgaagctaatggtgtcaccaacgtctgtggccgcagtccccgtgggcaattcccctgccctggcaagctcccacccagtgcccatacagaatccttcaagcgcaatcgtcaattttactctacagcatcttggcctaattagtcctaatgtgcagttatctgcttctccgggttcgggcatagttccagtgagccctcgtatcgaatcagtcaacgtggcacccgaaaacgctggcacacagcagggtcgggccacaaattacgactctcctgtccccggtcagagccagcccaacggtcagtccgtcgccgtcaccggggcccaacaaccagtgccagtcacccccaagggcagccagctcgtagctgagtccttcttccgcacacccggcggacctactaaacccacctcttcgagctgcatggattttgagggtgccaacaaaacatcactcggcaccctgtttgtacctcagcggaagttggaagtgtcaaccgaggatgtgcactag

SEQ ID NO: 216257 - DNA, 2604 bp, Artificial Sequence
  derived and/or modified sequence
atgcagaagaagaaggagaacctgttctgcgagccccacaagcggggcctcatgaagacccccctgaaggagtcaaccaccgccaatatcgtcctggcggagattcagcccgacttcggaccgctaaccaccccgacgaagccaaaagagggatcgcaaggggaaccttggactcccactgccaacctcaaaatgctaataagtgcagtttccccagagattagaaacagggaccagaaacgcgggttgttcgacaataggtcgggactccccgaagctaaagactgcatccacgagcacctctccggagacgagttcgaaaaatcccagcccagtcgcaaagagaagtccctgggtctgctttgtcacaagttcctggctcgctatcctaattatcccaacccagccgtcaacaacgacatttgtctcgacgaagttgcggaggaactgaacgtagagaggagacggatctacgatattgtaaacgtgctggagagcctccatatggtcagtcggctggcaaaaaacagatacacctggcacggtaggcataatctcaacaagacactgggaacgcttaagtctatcggggaggagaacaagtatgctgagcagattatgatgattaaaaagaaagaatatgaacaggagtttgatttcatcaagtcgtacagcattgaggaccacatcatcaaaagtaataccggtccaaacggccaccccgatatgtgtttcgtggagctgcccggtgtcgagtttcgcgccgccagcgtcaattctcgtaaagataagtcactgcgtgtgatgagtcagaagttcgtgatgctgtttttggtctccacaccccagatcgtgtccttggaagtcgccgccaaaattttgatcggagaggaccacgttgaggaccttgacaaaagcaaatttaagacaaagatccgacggctgtacgacattgctaatgtactgtcttctctcgatttaattaagaaggtgcatgttacggaagagaggggtcggaaacctgcctttaagtggacaggtccagaaatctctcccaatacaagtggtagtagcccagtgattcatttcaccccttcagatctcgaagttcgccgcagcagcaaggagaattgcgccaagaacctctttagcacacgtggcaaacccaacttcaccaggcatcctagtctcatcaaactcgtgaagtccatcgagagtgatagaaggaaaataaattccgccccctcatcccccatcaagaccaataaagctgaaagctcccagaattccgcaccgttcccgtccaaaatggcacagctggctgcgatatgcaagatgcaactggaggagcagtcttccgagtcacggcagaaggttaaggtgcaattagcacggagcggtccatgtaagccagtggccccattggaccctccggtcaacgccgagatggagttgacagccccaagtcttattcagccattgggcatggtccctctcattccatctccactgagctccgccgtgcctctgatccttcctcaggctccgagtggtccgtcatatgcgatttaccttcagcctacccaggctcaccagagcgtaacacccccccaaggactgtcccccaccgtgtgtacaacccactccagcaaagctaccggctccaaggactctactgacgcgacaacagagaaagccgcgaacgatacgagtaaggcttctgcctctactagaccaggcagcctgctgcctgcccctgagaggcaaggggccaagtcaagaacccgggaacctgctggggaacgcggctctaaacgcgcttctatgctcgaggacagcggatccaaaaaaaagtttaaggaggaccttaagggactggaaaacgtgtcagccacgctcttccctagtggctacctcatccccctgactcaatgctctagcttgggtgctgaaagtatcctgagtggcaaagaaaactcctcagctctgtcacctaatcacaggatatacagcagccccatcgccggcgtaatccccgttacaagctcagaactgaccgcagtcaactttccatccttccacgtcacccccctgaagctcatggtatcacccacatctgtggccgcagtacctgtagggaattccccagccctggcatcgagccacccagtgccaatacaaaatcccagctcagcaatagttaacttcactctgcagcacttgggcctgatttcacctaacgtgcagttgtccgcctctcccgggtctggcatagtgccagtttcaccccgcattgagtctgtgaatgtggcaccagagaatgcggggacacagcaggggcgggccacaaactatgatagccctgtccctggacagtcacagcctaacggccagtccgtcgcagtcactggcgctcagcagcctgtgccagttactcctaagggttctcagctcgtggcagaaagcttcttcaggactcctggcggaccaactaagcccactagctcctcttgcatggattttgaaggagctaataagacctctctggggacgctgttcgttccgcagagaaaactggaagtatccaccgaagatgtgcattag

SEQ ID NO: 216258 - DNA, 2604 bp, Artificial Sequence
  derived and/or modified sequence
atggagaacgagaaggagaacctgttctgcgagccccacaagcggggactcatgaagaccccgctcaaggagtcaacgacagctaatatcgtcctggctgagatccagcccgactttgggcccctgactaccccgactaagccaaaagaaggctcacagggggaaccatggactcccactgccaatctcaagatgctcatatcagcagtgagcccagaaattagaaatagggaccaaaagagaggacttttcgataatcgcagcggactgccagaggctaaggactgtatccatgaacatttgtccggcgatgagtttgagaagtctcagcccagcaggaaagaaaagtccttgggactcctgtgtcataagttccttgcacgctaccccaattatcccaaccctgcagtcaacaatgatatttgtctggacgaggtcgctgaagaattgaacgtagagcggaggcggatttacgatattgtgaatgttttggagagtctgcatatggtctctagattagctaagaacagatatacttggcacggaagacataacttaaacaagactctgggaacgcttaaatcaattggcgaagaaaacaagtacgccgagcagatcatgatgattaaaaagaaggaatacgagcaagagtttgatttcatcaagagctactctattgaggaccatattataaagagcaatactgggcccaatggccacccagatatgtgtttcgtcgaactgcctggcgtggaatttagggcagcctctgttaatagcaggaaggacaaatcactgcgcgttatgtcacagaagttcgttatgttgtttctggtgtcgaccccgcaaatcgtctcactggaagtagctgccaagattctcatcggagaggaccacgtcgaagatctggacaaatcaaaatttaagaccaaaatcagacgattgtacgatatagctaatgttctgtcgtccctggatctgattaagaaagtacacgtgaccgaagagcgaggcagaaaacccgcctttaaatggaccgggcccgaaattagtccaaatactagtgggtcttcacccgtaatccacttcaccccatcggacctggaggtgagacggtcttcgaaagaaaactgtgccaagaatttgttttcaaccagaggcaagcctaatttcacacggcatccatcgctgattaaactggtgaaaagtatagagagcgaccgcaggaagataaattccgcccccagctcccccatcaaaacaaataaggcagaaagctcacagaacagtgccccatttcccagcaagatggcccaattggccgccatttgtaagatgcagctagaggagcaaagctcagagagcaggcagaaggttaaagtacaacttgcacgctccgggccttgcaagcccgtggctccgcttgatcctccggtaaacgccgagatggagctgaccgcaccatccctgattcagccactcggaatggtcccccttattccatcccctcttagttccgccgttcctcttatcttacctcaagctcccagtgggcccagttacgcaatttacctgcagcctactcaggcccaccagtctgtaactcctccgcagggcctaagccccaccgtgtgcacaactcacagctcaaaggctactgggtccaaggactctactgatgcgaccacagagaaggccgctaatgacacgagtaaggcatccgcttctacgcggcctgggtcactactgcctgccccagagcgacaaggggcaaaaagtcgcactcgtgaaccagctggagagcgtggatcaaaacgggcttctatgcttgaggactccggctcaaaaaagaagtttaaggaggacttgaaaggccttgaaaacgtgtctgcgacgctgtttccctctggttacctgatcccgctcactcaatgttcatccctgggcgccgaatccattctgagtggcaaagaaaactccagcgccctgtccccaaaccataggatctactctagccctattgctggtgtgataccggttacatcatccgagctcaccgctgtgaactttccatcattccatgttactccccttaagctcatggtatcacctacttccgttgccgccgtgccagtaggtaacagccccgccttggcttcctctcaccctgtgcccattcaaaacccttcttctgccattgtaaatttcaccctgcagcatctgggcctgatttcacccaatgttcagctctccgcttctcctggctctgggattgtgccagtgtcacctcggatagaatcagtcaatgtcgctccagagaacgcagggacacagcagggtcgcgcaacaaattacgacagtcctgtgcctggccagtctcaacctaatggacaatctgtggcggttaccggtgcacagcagccagtgcctgtgacaccgaaagggagtcagcttgttgctgagtcatttttcagaacccctggcggaccaaccaagcccacctcatcctcatgtatggatttcgagggagctaacaagaccagcttgggaaccctgttcgtgccacagaggaagctggaggtttccactgaggacgtgcactag

SEQ ID NO: 216259 - DNA, 2604 bp, Artificial Sequence
  derived and/or modified sequence
atggaaaacgagaaagagaacctgttttgcgagcctcataagaggggcctaatgaagacccctttgaaggagagcacaacagcaaatatagtgctggctgagatacagcctgactttggacctcttactacacccaccaagccaaaagagggcagccagggcgagccctggacccccacggctaatctgaaaatgctgatctcagcggtttctcctgaaatacgcaaccgtgaccagaaacgcggtctgtttgataaccgctccggcctgcctgaagctaaagactgtatccacgaacatttgagtggtgatgagtttgagaaatcccagccgtcacgaaaagagaagtcattggggctgctgtgtcacaagtttctcgctcgctatccaaattaccccaatcccgcagtgaataacgatatctgcttggatgaagtcgccgaagagttaaacgtcgaacggcgacggatttacgatatcgtgaatgtgttggagtccctgcacatggtgagtcgactggccaaaaaccgttacacttggcacggtaggcataatctgaacaagactctgggcacactgaaatctatcggagaggaaaacaagtacgctgaacaaattatgatgattaaaaaaaaggaatacgaacaggaatttgatttcatcaagtcttactcaatagaggatcatattattaagtccaatacgggaccgaatggccaccccgatatgtgttttgtcgaactgcccggagtcgaatttagggcagcatcagtcaatagtcggaaggataagtccttaagagtgatgtctcaaaagttcgttatgctttttcttgtgtccacccctcagattgtctctttagaggtggccgcaaagatccttattggcgaggatcacgtcgaagatcttgacaagagtaagttcaaaactaagatccggagactttatgatattgccaacgtcttatctagtctggatctgatcaaaaaggttcatgtgaccgaggagaggggaagaaaaccagcatttaagtggacaggccctgagatctcccctaacacttctgggtcctcacctgttatccacttcacccccagcgatcttgaagtgaggcggagcagcaaagagaactgtgctaaaaacctattctccacacggggtaaacccaacttcactcggcacccatctctgatcaagctcgtcaagtctattgagtccgacagacggaaaattaattccgcaccttctagtccaataaagactaataaagctgagagctcccagaactcagctccctttccctcgaagatggcgcagttagccgctatctgcaaaatgcaactggaagaacagtcttctgagagccgccaaaaggttaaggtgcagctggctaggagtggaccttgcaaacccgtggctcctcttgatcctccagtgaacgctgaaatggagcttaccgctccaagcctcatccagccactgggcatggtccctctgataccatctcctttgagtagtgccgtgccccttatactgccccaggccccatcagggccttcatatgccatttatttacaaccaacacaagcgcatcagtcggtaacacctccgcagggcctgagtccaaccgtctgtacgactcattcatccaaagcaaccggatctaaggactccaccgatgccacgacagaaaaagctgcaaacgatacctccaaggccagtgcctccacacggcctgggagtctgctgcctgctccagaacgtcagggcgctaagagccggactcgggagcctgccggagagcgtggatcgaagagggctagcatgctagaagactccgggtccaaaaagaaatttaaagaggatctaaaaggcctggagaatgtgtcagcaacactgttcccaagcggataccttattccactgacccagtgttcttctctgggcgcagaatctatcctgagtggtaaggagaacagctcagccctgagtcctaatcaccggatctactccagcccaatcgcaggggttatacccgtgacatcaagtgaactgacagctgtcaactttccatctttccacgttactcctctgaaactgatggtgtcaccaacctcagttgctgcggtcccagtaggaaattccccagccttagcctcgagccatccagtaccaatccagaatccatctagtgccatcgtgaatttcacccttcagcaccttggtctaatctctcctaatgtgcaattaagtgcatcacctgggtccggcattgtgcccgtctcccccaggattgagtcagtcaacgttgcaccagagaatgcgggaacccaacaaggacgtgcaaccaactatgacagtcccgtccctggtcaaagccaacccaacggccagagtgtggcggtcacaggagcgcaacaacccgttcccgtgacccctaagggctcacagctcgtcgcagaatcattttttcgcaccccaggcggacctacaaaaccaacttctagttcctgtatggatttcgaaggagcgaataaaacttctttgggaacactgttcgtgccccaacgtaaattagaggtctccaccgaggacgtgcattag

SEQ ID NO: 216260 - DNA, 2604 bp, Artificial Sequence
  derived and/or modified sequence
atgcagaagaaaaaggaaaacctgttctgtgagccccacaagcgcggacttatgaagacacctctgaaagagtccacaacagccaatattgtacttgcagagatccagcctgactttgggcctttaactactccgaccaaaccgaaggaaggttcacagggcgagccatggaccccaacagctaatttgaagatgctgattagtgcagtgtcacccgagatccggaatagagatcagaagcggggactgtttgataacagaagtggcctccctgaagccaaggactgcatccacgaacacctgtcaggggacgagttcgaaaaatcgcagccgtccaggaaagaaaagtcccttggtctattatgccacaaatttctggctcgctacccgaattatcccaacccggctgtgaataatgacatatgtttggacgaagttgcggaggagctgaacgttgaacgtcgcagaatttacgacattgtgaatgttttggagtctctgcacatggtctctcgcctcgccaagaacagatacacctggcatgggcgtcacaacttgaacaaaacactggggactctgaagagtattggcgaggaaaataagtacgccgagcaaattatgatgattaaaaagaaggagtacgaacaggagtttgacttcatcaaatcttactccatcgaggaccacataatcaagtccaatacaggcccaaacggccatcccgacatgtgcttcgtggagttgcctggagttgaattcagagcggcttctgtgaacagccgcaaggataagagcctgcgggtcatgagccagaagttcgtgatgctgttcctcgtgtctaccccccagattgtatctttggaggtggcagctaaaatactgatcggcgaggaccacgtggaagacctggataaaagcaagtttaaaaccaagatacgcaggctgtatgatattgcaaacgtacttagctcccttgatcttatcaagaaagtgcatgtgactgaggaaagaggacggaaacctgctttcaagtggactgggccagagattagcccaaatacatcaggctcttcccctgtcatccatttcacaccttctgatctggaagtgcgtagatcctccaaggagaactgtgcaaagaatctgttttcaacacggggaaaacctaactttacaaggcacccgagcctgattaagctggtcaaaagtatagaatcggatcggagaaagattaattccgcaccaagctcgccaatcaagactaacaaggccgagagtagccaaaacagtgctccatttccgtctaagatggcccagttagcagctatatgtaaaatgcaactggaggagcagagctcagaatcaagacaaaaggtgaaagtccagttggctaggtctggtccttgtaagccagtcgcccctctcgatcccccagtgaatgctgagatggagctgactgctccgagcctcattcagcccctcggcatggtccccctgattcccagcccactgtcctctgcagttccgctgattctgccccaggccccaagcggccctagttacgccatctatcttcaacctacacaggcccaccaatccgttactccccctcagggactgagtcctacagtgtgtacaacgcattctagcaaggctactggatcaaaggactctacagacgccaccactgagaaggccgctaacgacacttcaaaggctagtgcctccacccggcctggcagcctgcttcccgctcccgagagacagggagctaaatcaagaacacgggaacccgctggggaaaggggtagcaaaagagcttctatgcttgaggatagcggcagtaagaaaaaatttaaagaagatctgaaaggactggagaatgtctcggccacgctgtttccatcagggtacctgattcccctgacacagtgttccagcctcggagccgaatctattctcagcggcaaggagaattcatctgcgctgtcccctaaccataggatatattcttctcccatcgctggagtaatccccgttaccagcagtgaacttaccgcagtgaacttccctagctttcacgtcaccccactgaaattgatggtaagtcctactagcgtcgccgctgtcccggtggggaactctcccgcactggcttctagccacccagttcctattcagaatccaagcagtgctattgttaatttcaccttgcagcatctgggattaatcagtcctaacgtgcagttgagcgcatcccctggtagcggcatcgtgccagtgtctcctcgaattgaatcggtgaacgtggcaccagagaatgccggaacacaacaggggcgtgcaaccaactacgatagcccagtccctgggcagtcccagccaaatggccaatctgtggctgttacgggtgcccaacagccagtgcctgtaacacccaaaggctcgcaactcgtggcagagtcatttttccggactccaggcggaccgacaaagcctacctcatcctcatgcatggactttgagggcgcaaataagacctccctaggcacactattcgttccccagcggaagctggaagtttcgactgaggatgtccactag

SEQ ID NO: 216261 - DNA, 2604 bp, Artificial Sequence
  derived and/or modified sequence
atggaaaacgagaaggagaacttgttttgtgagcctcacaagcggggactgatgaaaacccctctgaaggagagtaccacggccaatatagtcttggcagagatacagcctgacttcggaccactgaccaccccaactaaaccaaaagaagggtctcagggggagccatggacccccacggctaacctgaagatgctgatcagtgcagtctctccggaaatccgcaacagagatcagaagcgcggtctctttgacaataggagcggcttgccggaggccaaggactgtatccatgagcacctgtctggggatgagttcgagaagtctcagccttctcgcaaggaaaagagcctcggtttgctgtgccataaattcctggcaaggtatccaaactacccaaacccagctgtgaataacgatatatgtttggacgaggtggcggaagaactgaatgttgagaggcggagaatctacgacatcgtcaacgtcctcgagtccctgcatatggtctctcggcttgcgaagaaccgatacacgtggcacggaaggcataacctcaacaaaacactgggaacccttaagagcattggcgaagaaaacaagtacgctgaacagattatgatgattaagaagaaggaatacgaacaggaatttgacttcataaagtcctacagcattgaggaccatattataaaatcaaataccggacccaacggccatccagacatgtgcttcgtagagttaccaggggtggaatttagggccgctagtgtgaattcgcgcaaagataaaagcctgagggtgatgtcgcagaaatttgttatgctctttctcgtgtcaactcctcagattgtcagtctagaggtggccgcaaagattctgataggcgaagaccatgttgaagatctcgataaatccaagttcaaaacgaagattagaaggctgtatgacattgccaatgttctatcttcgctcgatctgattaagaaagtgcatgtgacagaggagcgtgggaggaagcctgcattcaaatggactggcccagagatatctcccaatacctctggctcgtccccggtgattcattttaccccttcagatttggaagtgcggcgttcctccaaagagaactgcgctaagaaccttttctccaccagaggcaagccgaactttacgagacacccttcacttattaagctggtcaagagcattgagtcagacaggcggaagatcaacagtgctccaagctcgcctatcaagactaacaaggctgagtccagccagaattctgcaccctttccaagtaagatggcccaactggctgcgatctgtaagatgcagttggaagagcaatcttcagagtctagacagaaggtgaaagtacagctcgccagaagcgggccttgtaaaccagtcgctccgctcgatccgcctgttaatgcagagatggaactgacagctccctcactgatccaacccctagggatggttccactgattccttcacctctgtctagtgccgtgccactgattctgcctcaggctcccagtgggccaagctatgcgatctacttgcagcccacacaggctcatcagtccgtgacacccccacaggggctgagtcctacagtgtgtacaacacatagcagcaaggctaccgggtctaaggattccaccgacgctacgaccgaaaaggccgctaacgacacctcgaaagccagtgcctcaactagaccgggatccctgctgccagccccagagcgccaaggcgcaaagtctcgaacccgcgaacccgctggagagaggggtagcaaacgcgcttctatgctggaggattcaggctcgaaaaaaaaatttaaagaagatctgaaaggactggaaaacgtctctgccaccctttttccttccggttatttgatccccttgacccagtgctcttccttgggagccgaatcaatactaagtggcaaggagaatagcagcgctctttcccctaaccacagaatttacagtagtccaatagcgggtgtgatccccgtgacgtcgtcagagctgacagccgttaacttcccctcgttccacgtcacaccactgaaactgatggtgagccccactagcgtggctgccgttccagtgggcaattccccagccctggccagtagtcatcccgttcccatacagaatccgagttccgccatcgttaatttcacattacaacatctgggcctaatcagcccaaatgtgcagctctccgctagtcctggtagtgggatcgtccctgtctcgccgcgtattgaatccgtcaatgttgccccagagaacgccggaactcagcaaggtagggctaccaactacgacagtcctgtgccaggtcaatctcagcccaatggtcagagcgtcgctgtgaccggcgctcagcaaccagtccccgtgacgcccaaaggatcacagctggtggcagagtctttttttagaacccctggtgggccaactaagccaaccagtagctcttgtatggattttgagggggctaataagacctctctgggcacactgtttgtgccgcagcgaaagctggaggtgtccaccgaggatgtgcactag

SEQ ID NO: 216262 - DNA, 2604 bp, Artificial Sequence
  derived and/or modified sequence
atggagaacgagaaggagaacctgttctgcgagccccacaagagaggcctgatgaagacccccctgaaggagagcaccaccgccaacatcgtgctggccgagatccagcccgacttcggccccctgaccacccccaccaagcccaaggagggcagccagggcgagccctggacccccaccgccaacctgaagatgctgatcagcgccgtgagccccgagatcagaaacagagaccagaagagaggcctgttcgacaacagaagcggcctgcccgaggccaaggactgcatccacgagcacctgagcggcgacgagttcgagaagagccagcccagcagaaaggagaagagcctgggcctgctgtgccacaagttcctggccagataccccaactaccccaaccccgccgtgaacaacgacatctgcctggacgaggtggccgaggagctgaacgtggagagaagaagaatctacgacatcgtgaacgtgctggagagcctgcacatggtgagcagactggccaagaacagatacacctggcacggcagacacaacctgaacaagaccctgggcaccctgaagagcatcggcgaggagaacaagtacgccgagcagatcatgatgatcaagaagaaggagtacgagcaggagttcgacttcatcaagagctacagcatcgaggaccacatcatcaagagcaacaccggccccaacggccaccccgacatgtgcttcgtggagctgcccggcgtggagttcagagccgccagcgtgaacagcagaaaggacaagagcctgagagtgatgagccagaagttcgtgatgctgttcctggtgagcaccccccagatcgtgagcctggaggtggccgccaagatcctgatcggcgaggaccacgtggaggacctggacaagagcaagttcaagaccaagatcagaagactgtacgacatcgccaacgtgctgagcagcctggacctgatcaagaaggtgcacgtgaccgaggagagaggcagaaagcccgccttcaagtggaccggccccgagatcagccccaacaccagcggcagcagccccgtgatccacttcacccccagcgacctggaggtgagaagaagcagcaaggagaactgcgccaagaacctgttcagcaccagaggcaagcccaacttcaccagacaccccagcctgatcaagctggtgaagagcatcgagagcgacagaagaaagatcaacagcgcccccagcagccccatcaagaccaacaaggccgagagcagccagaacagcgcccccttccccagcaagatggcccagctggccgccatctgcaagatgcagctggaggagcagagcagcgagagcagacagaaggtgaaggtgcagctggccagaagcggcccctgcaagcccgtggcccccctggacccccccgtgaacgccgagatggagctgaccgcccccagcctgatccagcccctgggcatggtgcccctgatccccagccccctgagcagcgccgtgcccctgatcctgccccaggcccccagcggccccagctacgccatctacctgcagcccacccaggcccaccagagcgtgacccccccccagggcctgagccccaccgtgtgcaccacccacagcagcaaggccaccggcagcaaggacagcaccgacgccaccaccgagaaggccgccaacgacaccagcaaggccagcgccagcaccagacccggcagcctgctgcccgcccccgagagacagggcgccaagagcagaaccagagagcccgccggcgagagaggcagcaagagagccagcatgctggaggacagcggcagcaagaagaagttcaaggaggacctgaagggcctggagaacgtgagcgccaccctgttccccagcggctacctgatccccctgacccagtgcagcagcctgggcgccgagagcatcctgagcggcaaggagaacagcagcgccctgagccccaaccacagaatctacagcagccccatcgccggcgtgatccccgtgaccagcagcgagctgaccgccgtgaacttccccagcttccacgtgacccccctgaagctgatggtgagccccaccagcgtggccgccgtgcccgtgggcaacagccccgccctggccagcagccaccccgtgcccatccagaaccccagcagcgccatcgtgaacttcaccctgcagcacctgggcctgatcagccccaacgtgcagctgagcgccagccccggcagcggcatcgtgcccgtgagccccagaatcgagagcgtgaacgtggcccccgagaacgccggcacccagcagggcagagccaccaactacgacagccccgtgcccggccagagccagcccaacggccagagcgtggccgtgaccggcgcccagcagcccgtgcccgtgacccccaagggcagccagctggtggccgagagcttcttcagaacccccggcggccccaccaagcccaccagcagcagctgcatggacttcgagggcgccaacaagaccagcctgggcaccctgttcgtgccccagagaaagctggaggtgagcaccgaggacgtgcactag

SEQ ID NO: 216263 - DNA, 2604 bp, Artificial Sequence
  derived and/or modified sequence
atgcagaagaagaaggagaacctgttctgcgagccccacaagagaggcctgatgaagacccccctgaaggagagcaccaccgccaacatcgtgctggccgagatccagcccgacttcggccccctgaccacccccaccaagcccaaggagggcagccagggcgagccctggacccccaccgccaacctgaagatgctgatcagcgccgtgagccccgagatcagaaacagagaccagaagagaggcctgttcgacaacagaagcggcctgcccgaggccaaggactgcatccacgagcacctgagcggcgacgagttcgagaagagccagcccagcagaaaggagaagagcctgggcctgctgtgccacaagttcctggccagataccccaactaccccaaccccgccgtgaacaacgacatctgcctggacgaggtggccgaggagctgaacgtggagagaagaagaatctacgacatcgtgaacgtgctggagagcctgcacatggtgagcagactggccaagaacagatacacctggcacggcagacacaacctgaacaagaccctgggcaccctgaagagcatcggcgaggagaacaagtacgccgagcagatcatgatgatcaagaagaaggagtacgagcaggagttcgacttcatcaagagctacagcatcgaggaccacatcatcaagagcaacaccggccccaacggccaccccgacatgtgcttcgtggagctgcccggcgtggagttcagagccgccagcgtgaacagcagaaaggacaagagcctgagagtgatgagccagaagttcgtgatgctgttcctggtgagcaccccccagatcgtgagcctggaggtggccgccaagatcctgatcggcgaggaccacgtggaggacctggacaagagcaagttcaagaccaagatcagaagactgtacgacatcgccaacgtgctgagcagcctggacctgatcaagaaggtgcacgtgaccgaggagagaggcagaaagcccgccttcaagtggaccggccccgagatcagccccaacaccagcggcagcagccccgtgatccacttcacccccagcgacctggaggtgagaagaagcagcaaggagaactgcgccaagaacctgttcagcaccagaggcaagcccaacttcaccagacaccccagcctgatcaagctggtgaagagcatcgagagcgacagaagaaagatcaacagcgcccccagcagccccatcaagaccaacaaggccgagagcagccagaacagcgcccccttccccagcaagatggcccagctggccgccatctgcaagatgcagctggaggagcagagcagcgagagcagacagaaggtgaaggtgcagctggccagaagcggcccctgcaagcccgtggcccccctggacccccccgtgaacgccgagatggagctgaccgcccccagcctgatccagcccctgggcatggtgcccctgatccccagccccctgagcagcgccgtgcccctgatcctgccccaggcccccagcggccccagctacgccatctacctgcagcccacccaggcccaccagagcgtgacccccccccagggcctgagccccaccgtgtgcaccacccacagcagcaaggccaccggcagcaaggacagcaccgacgccaccaccgagaaggccgccaacgacaccagcaaggccagcgccagcaccagacccggcagcctgctgcccgcccccgagagacagggcgccaagagcagaaccagagagcccgccggcgagagaggcagcaagagagccagcatgctggaggacagcggcagcaagaagaagttcaaggaggacctgaagggcctggagaacgtgagcgccaccctgttccccagcggctacctgatccccctgacccagtgcagcagcctgggcgccgagagcatcctgagcggcaaggagaacagcagcgccctgagccccaaccacagaatctacagcagccccatcgccggcgtgatccccgtgaccagcagcgagctgaccgccgtgaacttccccagcttccacgtgacccccctgaagctgatggtgagccccaccagcgtggccgccgtgcccgtgggcaacagccccgccctggccagcagccaccccgtgcccatccagaaccccagcagcgccatcgtgaacttcaccctgcagcacctgggcctgatcagccccaacgtgcagctgagcgccagccccggcagcggcatcgtgcccgtgagccccagaatcgagagcgtgaacgtggcccccgagaacgccggcacccagcagggcagagccaccaactacgacagccccgtgcccggccagagccagcccaacggccagagcgtggccgtgaccggcgcccagcagcccgtgcccgtgacccccaagggcagccagctggtggccgagagcttcttcagaacccccggcggccccaccaagcccaccagcagcagctgcatggacttcgagggcgccaacaagaccagcctgggcaccctgttcgtgccccagagaaagctggaggtgagcaccgaggacgtgcactag

SEQ ID NO: 216264 - DNA, 3240 bp, Artificial Sequence
  derived and/or modified sequence
aagtgcactgagcgagtggcggccgggggacagtacctgcttgccttattgggcaaatacagccttccaaggtggagtctaacgccgtggtgtgaactggccacccgaacagggagtaaatagtgctttgtatctttaaggaagcccttttttaaatttaaaaaaaaagtcttaattataagactctttaaatgcccaactgcatacttggagctttgggactgaatttggaactttcctgtcaagcgacctcccacgactttactgctgagcctgtgcacgtgtgtgtaaggggagaaatccaggcatctagatgcagacttgtacccagttacttggggtcgcgtgcgctcagctgggacctgggctcgtgcgcttagtccggagccctgatctgcgaacaggatattaaaacttttagtacaattgattggactacttgaaccatcgggatttggggaggaactccagatttttcatttttaaactctaaatgtatgaggaatttacagaatggagaacgaaaaggaaaatctcttttgtgagccacataaaaggggactaatgaaaacacctctgaaagaatccaccacagcaaatatcgtgttggcagagatccagcctgactttggccctttaaccacacctaccaagcccaaggaaggctctcagggagagccgtggacaccgacagccaacctgaaaatgctcatcagtgctgtgagccctgagatccgcaacagagatcagaaaaggggtttgtttgacaacagaagtggattacctgaggccaaagactgtatacacgaacacttatctggagatgaatttgagaaatcccaaccaagtcgaaaagagaaaagtttaggattattgtgtcataagttcttagcacgatatcctaattatcccaaccctgctgtgaataatgacatctgccttgacgaagtggcagaggaacttaatgttgaacgtcgacgcatttacgatatcgtgaacgtcctagagagtttacatatggtgagccgcctcgccaaaaacaggtacacttggcacgggcgacacaatctcaacaaaacccttggcaccttgaagagcatcggggaggagaataagtacgccgagcagattatgatgatcaaaaagaaagaatatgagcaagagtttgactttattaagagttacagtatagaggatcatatcatcaaatcaaacactggcccaaatggacacccagacatgtgttttgtggaactccctggagtggaatttcgggcagcttctgtaaacagccgcaaagacaagtctttaagggtaatgagccagaaatttgtgatgctgtttttggtgtcaacgcctcagatagtaagcctagaagttgctgccaagattttaattggggaggaccatgtggaagatttggataaaagcaagtttaaaacaaaaattaggaggttgtatgatatagctaatgttctgagtagcctggatcttatcaagaaagttcatgttacagaggaaagaggccgaaaaccagctttcaaatggaccggcccagaaatcagtccaaataccagtggctccagcccagtcattcattttactccctctgatttggaggtgagacggtcttcaaaagagaactgtgccaaaaacctcttttccacacgtgggaaaccaaactttactcgacacccatctcttatcaaattggtaaagagtatagaaagtgatcggagaaagataaattctgcgcccagtagccctatcaagaccaacaaagctgagagttctcagaattctgcacccttcccaagtaaaatggctcagctcgcagctatttgtaaaatgcagttagaagagcaatcaagtgaatccagacagaaagtgaaagtacagctggcaagatctggaccctgcaaaccagtagcccctctggaccccccagtgaatgctgagatggagctgacagcaccgtccctcatccagcccctgggaatggttcccctgatccccagccccttgtcatcagcagtgcccctgatcctacctcaggccccttcaggcccatcctatgccatctacctgcagcccactcaagcccaccaaagtgtgacgccaccccaaggcctgagcccaacggtgtgcaccacccactcttctaaagctactggctcaaaagactccacagatgccaccactgagaaggcagccaatgatacctcaaaggccagtgcctctaccaggcctggaagcttgctgccagcaccagagaggcaaggggcaaagagccgaaccagggagccagctggagaaagaggctcaaagagggcaagcatgctcgaggacagtggttccaaaaagaaatttaaagaggacctaaaaggacttgaaaatgtctccgcaaccttgttcccatcaggatacctaatccctctcacgcagtgctcatccctgggggcagagtccattttgtctggtaaagaaaactcaagtgctctttccccaaaccacaggatttacagctccccaattgcaggtgttattccagtgacatcatctgaactcactgctgttaattttccctcttttcatgtaacaccgttgaagctaatggtctcaccaacttccgtggcagccgtacctgtcgggaacagcccggctctcgcttcaagccaccctgttcccatccagaacccaagctcagccattgtaaacttcaccctgcagcacctgggactcatctcacccaatgtgcagttgtctgccagccctgggtctggaatcgttcctgtgtctccaagaatagagtctgttaatgtcgcaccagaaaatgcaggcactcagcaaggaagggccaccaactatgactcaccagtcccaggccagagccagccaaatggacaatcagttgctgtgacaggggcacaacagcctgttcctgtgacacccaaagggtcacaattagtggccgaaagtttcttccgtaccccaggtggacccaccaagccaaccagctcatcctgcatggattttgagggtgctaataaaacctccttaggaactctctttgtcccacagcgaaaactggaagtctcaacagaggatgtccattaatcaacagatgttggcttagtttaattttctaaagagttgtttaatagagaaaatgtacacagactgatttggagaacacattctctgaaaatactgtaaatacgttggggatttgttcaatgt

SEQ ID NO: 216265 - DNA, 3191 bp, Artificial Sequence
  derived and/or modified sequence
atgcaaaaaaaaaaagaaaatctcttttgtgagccacataaaaggggactaatgaaaacacctctgaaagaatccaccacagcaaatatcgtgttggcagagatccagcctgactttggccctttaaccacacctaccaagcccaaggaaggctctcagggagagccgtggacaccgacagccaacctgaaaatgctcatcagtgctgtgagccctgagatccgcaacagagatcagaaaaggggtttgtttgacaacagaagtggattacctgaggccaaagactgtatacacgaacacttatctggagatgaatttgagaaatcccaaccaagtcgaaaagagaaaagtttaggattattgtgtcataagttcttagcacgatatcctaattatcccaaccctgctgtgaataatgacatctgccttgacgaagtggcagaggaacttaatgttgaacgtcgacgcatttacgatatcgtgaacgtcctagagagtttacatatggtgagccgcctcgccaaaaacaggtacacttggcacgggcgacacaatctcaacaaaacccttggcaccttgaagagcatcggggaggagaataagtacgccgagcagattatgatgatcaaaaagaaagaatatgagcaagagtttgactttattaagagttacagtatagaggatcatatcatcaaatcaaacactggcccaaatggacacccagacatgtgttttgtggaactccctggagtggaatttcgggcagcttctgtaaacagccgcaaagacaagtctttaagggtaatgagccagaaatttgtgatgctgtttttggtgtcaacgcctcagatagtaagcctagaagttgctgccaagattttaattggggaggaccatgtggaagatttggataaaagcaagtttaaaacaaaaattaggaggttgtatgatatagctaatgttctgagtagcctggatcttatcaagaaagttcatgttacagaggaaagaggccgaaaaccagctttcaaatggaccggcccagaaatcagtccaaataccagtggctccagcccagtcattcattttactccctctgatttggaggtgagacggtcttcaaaagagaactgtgccaaaaacctcttttccacacgtgggaaaccaaactttactcgacacccatctcttatcaaattggtaaagagtatagaaagtgatcggagaaagataaattctgcgcccagtagccctatcaagaccaacaaagctgagagttctcagaattctgcacccttcccaagtaaaatggctcagctcgcagctatttgtaaaatgcagttagaagagcaatcaagtgaatccagacagaaagtgaaagtacagctggcaagatctggaccctgcaaaccagtagcccctctggaccccccagtgaatgctgagatggagctgacagcaccgtccctcatccagcccctgggaatggttcccctgatccccagccccttgtcatcagcagtgcccctgatcctacctcaggccccttcaggcccatcctatgccatctacctgcagcccactcaagcccaccaaagtgtgacgccaccccaaggcctgagcccaacggtgtgcaccacccactcttctaaagctactggctcaaaagactccacagatgccaccactgagaaggcagccaatgatacctcaaaggccagtgcctctaccaggcctggaagcttgctgccagcaccagagaggcaaggggcaaagagccgaaccagggagccagctggagaaagaggctcaaagagggcaagcatgctcgaggacagtggttccaaaaagaaatttaaagaggacctaaaaggacttgaaaatgtctccgcaaccttgttcccatcaggatacctaatccctctcacgcagtgctcatccctgggggcagagtccattttgtctggtaaagaaaactcaagtgctctttccccaaaccacaggatttacagctccccaattgcaggtgttattccagtgacatcatctgaactcactgctgttaattttccctcttttcatgtaacaccgttgaagctaatggtctcaccaacttccgtggcagccgtacctgtcgggaacagcccggctctcgcttcaagccaccctgttcccatccagaacccaagctcagccattgtaaacttcaccctgcagcacctgggactcatctcacccaatgtgcagttgtctgccagccctgggtctggaatcgttcctgtgtctccaagaatagagtctgttaatgtcgcaccagaaaatgcaggcactcagcaaggaagggccaccaactatgactcaccagtcccaggccagagccagccaaatggacaatcagttgctgtgacaggggcacaacagcctgttcctgtgacacccaaagggtcacaattagtggccgaaagtttcttccgtaccccaggtggacccaccaagccaaccagctcatcctgcatggattttgagggtgctaataaaacctccttaggaactctctttgtcccacagcgaaaactggaagtctcaacagaggatgtccattaatcaacagatgttggcttagtttaattttctaaagagttgtttaatagagaaaatgtacacagactgatttggagaacacattctctgaaaatactgtaaatacgttggggatttgttcaatgtgaaatcagatagttgttttcatacatatatatatatacacacacacacacacacacacacacacatatatttgtataaagctaagtttagctttcaatcctacaaaataaaagtaaaatgttgaactctaagatatattaacttctagggggaaaaatccattattttagctatgcctatactattatgcaaagtaactgtattaaagtttacttccctctaagcaaatatgcttgacatgcctaacacagcattcccttaaacattttgcacaaagaaaatgctgtgtgatgtataatgttgtatttttaaataggggtatagctatattttttgtaatttctttaatctgttgttgcagtgtatctttttgtaaagtttgcaacaatcctcaatcaagtctatggaaaaattatttataaaatgtatttttaatcataagttgttcaaattaaaacttttct

SEQ ID NO: 216266 - DNA, 3432 bp, Artificial Sequence
  derived and/or modified sequence
aaatcgggggcttggctgctcctggacggtcacgctccctctgcccgccagccggcccgccagtcccggtcccggcgtctctctccggcacccacctcggcgctgcggaaagactgactgccaggatattaaaacttttagtacaattgattggactacttgaaccatcgggatttggggaggaactccagatttttcatttttaaactctaaatgtatgaggaatttacagaatggagaacgaaaaggaaaatctcttttgtgagccacataaaaggggactaatgaaaacacctctgaaagaatccaccacagcaaatatcgtgttggcagagatccagcctgactttggccctttaaccacacctaccaagcccaaggaaggctctcagggagagccgtggacaccgacagccaacctgaaaatgctcatcagtgctgtgagccctgagatccgcaacagagatcagaaaaggggtttgtttgacaacagaagtggattacctgaggccaaagactgtatacacgaacacttatctggagatgaatttgagaaatcccaaccaagtcgaaaagagaaaagtttaggattattgtgtcataagttcttagcacgatatcctaattatcccaaccctgctgtgaataatgacatctgccttgacgaagtggcagaggaacttaatgttgaacgtcgacgcatttacgatatcgtgaacgtcctagagagtttacatatggtgagccgcctcgccaaaaacaggtacacttggcacgggcgacacaatctcaacaaaacccttggcaccttgaagagcatcggggaggagaataagtacgccgagcagattatgatgatcaaaaagaaagaatatgagcaagagtttgactttattaagagttacagtatagaggatcatatcatcaaatcaaacactggcccaaatggacacccagacatgtgttttgtggaactccctggagtggaatttcgggcagcttctgtaaacagccgcaaagacaagtctttaagggtaatgagccagaaatttgtgatgctgtttttggtgtcaacgcctcagatagtaagcctagaagttgctgccaagattttaattggggaggaccatgtggaagatttggataaaagcaagtttaaaacaaaaattaggaggttgtatgatatagctaatgttctgagtagcctggatcttatcaagaaagttcatgttacagaggaaagaggccgaaaaccagctttcaaatggaccggcccagaaatcagtccaaataccagtggctccagcccagtcattcattttactccctctgatttggaggtgagacggtcttcaaaagagaactgtgccaaaaacctcttttccacacgtgggaaaccaaactttactcgacacccatctcttatcaaattggtaaagagtatagaaagtgatcggagaaagataaattctgcgcccagtagccctatcaagaccaacaaagctgagagttctcagaattctgcacccttcccaagtaaaatggctcagctcgcagctatttgtaaaatgcagttagaagagcaatcaagtgaatccagacagaaagtgaaagtacagctggcaagatctggaccctgcaaaccagtagcccctctggaccccccagtgaatgctgagatggagctgacagcaccgtccctcatccagcccctgggaatggttcccctgatccccagccccttgtcatcagcagtgcccctgatcctacctcaggccccttcaggcccatcctatgccatctacctgcagcccactcaagcccaccaaagtgtgacgccaccccaaggcctgagcccaacggtgtgcaccacccactcttctaaagctactggctcaaaagactccacagatgccaccactgagaaggcagccaatgatacctcaaaggccagtgcctctaccaggcctggaagcttgctgccagcaccagagaggcaaggggcaaagagccgaaccagggagccagctggagaaagaggctcaaagagggcaagcatgctcgaggacagtggttccaaaaagaaatttaaagaggacctaaaaggacttgaaaatgtctccgcaaccttgttcccatcaggatacctaatccctctcacgcagtgctcatccctgggggcagagtccattttgtctggtaaagaaaactcaagtgctctttccccaaaccacaggatttacagctccccaattgcaggtgttattccagtgacatcatctgaactcactgctgttaattttccctcttttcatgtaacaccgttgaagctaatggtctcaccaacttccgtggcagccgtacctgtcgggaacagcccggctctcgcttcaagccaccctgttcccatccagaacccaagctcagccattgtaaacttcaccctgcagcacctgggactcatctcacccaatgtgcagttgtctgccagccctgggtctggaatcgttcctgtgtctccaagaatagagtctgttaatgtcgcaccagaaaatgcaggcactcagcaaggaagggccaccaactatgactcaccagtcccaggccagagccagccaaatggacaatcagttgctgtgacaggggcacaacagcctgttcctgtgacacccaaagggtcacaattagtggccgaaagtttcttccgtaccccaggtggacccaccaagccaaccagctcatcctgcatggattttgagggtgctaataaaacctccttaggaactctctttgtcccacagcgaaaactggaagtctcaacagaggatgtccattaatcaacagatgttggcttagtttaattttctaaagagttgtttaatagagaaaatgtacacagactgatttggagaacacattctctgaaaatactgtaaatacgttggggatttgttcaatgtgaaatcagatagttgttttcatacatatatatatatacacacacacacacacacacacacacacatatatttgtataaagctaagtttagctttcaatcctacaaaataaaagtaaaatgttgaactctaagatatattaacttctagggggaaaaatccattattttagctatgcctatactattatgcaaagtaactgtattaaagtttacttccctctaagcaaatatgcttgacatgcctaacacagcattcccttaaacattttgcacaaagaaaatgctgtgtgatgtataatgttgtatttttaaataggggtatagctatattttttgtaatttctttaatctgttgttgcagtgtatctttttgtaaagtttgcaacaatcctcaatcaagtctatggaaaaattatttataaaatgtatttttaatcataagttgttcaaattaaaacttttctaaaatata

SEQ ID NO: 216267 - protein, 360 aa, Artificial Sequence
  derived and/or modified sequence
MSGSVLFTAGERWRCFLTPSRSSLYWALHNFCCRKKSTTPKKITPNVTFCDENAKEPENALDKLFSSEQQASILHVLNTASTKELEAFRLLRGRRSINIVEHRENFGPFQNLESLMNVPLFKYKSTVQVCNSILCPKTGREKRKSPENRFLRKLLKPDIERERLKAVNSIISIVFGTRRIAWAHLDRKLTVLDWQQSDRWSLMRGIYSSSVYLEEISSIISKMPKADFYVLEKTGLSIQNSSLFPILLHFHIMEAMLYALLNKTFAQDGQHQVLSMNRNAVGKHFELMIGDSRTSGKELVKQFLFDSILKADPRVFFPSDKIVHYRQMFLSTELQRVEELYDSLLQAIAFYELAVFDSQP

SEQ ID NO: 216268 - protein, 181 aa, Artificial Sequence
  derived and/or modified sequence
MSGSVLFTAGERWRCFLTPSRSSLYWALHNFCCRKKSTTPKKITPNVTFCDENAKEPENALDKLFSSEQQASILHVLNTASTKELEAFRLLRGRRSINIVEHRENFGPFQNLESLMNVPLFKYKSTVQVCNSILCPKTGREKRKSPENRFLRKLLKPDIERERLKVYSSCLLYCLIFENLL

SEQ ID NO: 216269 - DNA, 1083 bp, Artificial Sequence
  derived and/or modified sequence
atgagcggcagcgtgctgttcaccgccggcgagagatggagatgcttcctgacccccagcagaagcagcctgtactgggccctgcacaacttctgctgcagaaagaagagcaccacccccaagaagatcacccccaacgtgaccttctgcgacgagaacgccaaggagcccgagaacgccctggacaagctgttcagcagcgagcagcaggccagcatcctgcacgtgctgaacaccgccagcaccaaggagctggaggccttcagactgctgagaggcagaagaagcatcaacatcgtggagcacagagagaacttcggccccttccagaacctggagagcctgatgaacgtgcccctgttcaagtacaagagcaccgtgcaggtgtgcaacagcatcctgtgccccaagaccggcagagagaagagaaagagccccgagaacagattcctgagaaagctgctgaagcccgacatcgagagagagagactgaaggccgtgaacagcatcatcagcatcgtgttcggcaccagaagaatcgcctgggcccacctggacagaaagctgaccgtgctggactggcagcagagcgacagatggagcctgatgagaggcatctacagcagcagcgtgtacctggaggagatcagcagcatcatcagcaagatgcccaaggccgacttctacgtgctggagaagaccggcctgagcatccagaacagcagcctgttccccatcctgctgcacttccacatcatggaggccatgctgtacgccctgctgaacaagaccttcgcccaggacggccagcaccaggtgctgagcatgaacagaaacgccgtgggcaagcacttcgagctgatgatcggcgacagcagaaccagcggcaaggagctggtgaagcagttcctgttcgacagcatcctgaaggccgaccccagagtgttcttccccagcgacaagatcgtgcactacagacagatgttcctgagcaccgagctgcagagagtggaggagctgtacgacagcctgctgcaggccatcgccttctacgagctggccgtgttcgacagccagccctag

SEQ ID NO: 216270 - DNA, 546 bp, Artificial Sequence
  derived and/or modified sequence
atgagcggcagcgtgctgttcaccgccggcgagagatggagatgcttcctgacccccagcagaagcagcctgtactgggccctgcacaacttctgctgcagaaagaagagcaccacccccaagaagatcacccccaacgtgaccttctgcgacgagaacgccaaggagcccgagaacgccctggacaagctgttcagcagcgagcagcaggccagcatcctgcacgtgctgaacaccgccagcaccaaggagctggaggccttcagactgctgagaggcagaagaagcatcaacatcgtggagcacagagagaacttcggccccttccagaacctggagagcctgatgaacgtgcccctgttcaagtacaagagcaccgtgcaggtgtgcaacagcatcctgtgccccaagaccggcagagagaagagaaagagccccgagaacagattcctgagaaagctgctgaagcccgacatcgagagagagagactgaaggtgtacagcagctgcctgctgtactgcctgatcttcgagaacctgctgtag

SEQ ID NO: 216271 - DNA, 1083 bp, Artificial Sequence
  derived and/or modified sequence
atgagcggcagcgtcctttttactgcgggtgagcgatggagatgtttcctaacgccctcccggagcagtctgtactgggccctccacaacttttgctgtaggaagaaatccaccactcccaagaagattaccccaaacgtcactttttgtgacgagaacgcaaaggaacctgagaacgccctcgataaacttttctccagcgagcaacaagcatctatcttgcatgtgttaaacactgcatcaactaaggaattggaggctttcaggttgctacgcgggaggcgatcgataaacattgtcgagcatcgagaaaacttcggcccttttcagaacctggagtccctgatgaatgttcctttgttcaagtacaagtctaccgttcaggtgtgtaattcaatcctgtgtcctaagacagggagggaaaaacgcaaatcaccagagaaccgttttcttaggaaactgttgaaacccgatatcgagagagagagactgaaagcggttaacagcatcataagtatagtctttggtacacgaaggattgcatgggcccacctggatcgtaaactgaccgtactggattggcaacagtccgatcgctggtccctcatgcgtggcatttacagtagttcggtatatctagaagagattagcagtatcatatctaagatgcccaaggcagatttttacgtgctggagaagacgggtttgtcaatacagaatagcagcctgtttcccatcctcctacactttcatataatggaggctatgctctatgccctgcttaataaaacattcgcccaggacggccagcatcaggtgctcagcatgaatcgcaacgctgtagggaagcacttcgaactgatgatcggggacagccgcacgtctggcaaggagcttgtcaagcagttcctcttcgactccattctaaaagccgatccccgcgttttcttcccttccgataaaattgtccattatagacagatgttcctctcaactgaactccagagagtggaggagctgtacgatagcctgctccaggccatcgccttctatgaactcgctgtctttgatagccaaccctag

SEQ ID NO: 216272 - DNA, 1083 bp, Artificial Sequence
  derived and/or modified sequence
atgtctgggtccgttctgtttactgccggcgagaggtggcgatgctttctaacaccaagccggtcatctttgtactgggctctgcacaacttctgttgccgaaagaagagtacgacccccaagaagatcacaccaaatgtgaccttttgtgacgagaacgctaaggaacctgagaacgccctggacaaattgttcagctcagaacagcaggcgtccatcctgcatgtcctcaacactgcttccacgaaagaacttgaagcattcagattactgagaggcagacgcagtatcaacattgtagaacatcgagagaacttcggcccattccagaatctcgaatccctgatgaacgtgcccctgtttaaatataagagtacagttcaggtctgtaacagtatcttgtgtccaaagacaggaagggagaagagaaagtctcctgaaaacagattcctgcgaaagctgctcaagccagatattgagcgcgagaggctcaaggcagtcaactctatcatctcaatcgtgttcggaacacgtaggatcgcctgggcacatctcgatagaaagctgacagtcctggattggcagcagagcgacaggtggtccttaatgcgcggcatatatagttcctccgtgtacttagaggagatctcttcaataatctctaaaatgccaaaggccgatttttacgtactggagaagaccggactcagcatacagaatagcagtctttttcccatcttactgcatttccatattatggaagcaatgctatatgcccttctgaataagacttttgctcaggatggccagcaccaagtactgtcaatgaaccgcaacgccgtaggtaagcacttcgagctcatgatcggtgattctagaaccagtgggaaagaactggtgaaacagttcctgtttgatagcattttaaaggcagatccgcgcgtattctttccctccgataagatcgtgcactatcggcagatgtttttaagtacggagctgcaacgggtggaagaactgtatgactctctgttgcaggccatcgctttctacgagctagcggtattcgactcacagccctag

SEQ ID NO: 216273 - DNA, 546 bp, Artificial Sequence
  derived and/or modified sequence
atgtccggctcagtcctgtttacagctggggagcggtggagatgctttctaaccccgtcccggtcgtcgctgtattgggccctgcacaacttttgttgccggaagaaaagcacgacgcccaaaaaaatcactcccaatgtgacattctgtgatgagaacgctaaggagcctgagaacgctttggataagctttttagttctgagcagcaggcttctatactgcacgtgctgaataccgcctcgactaaagagctggaggccttccggctgttgaggggaaggcggtctatcaacatcgtagagcatcgcgagaatttcgggcctttccagaacctggagtccctcatgaatgtgccactctttaagtataagagcaccgtccaggtttgtaactccatattgtgtccgaaaaccggccgggagaaacgcaagagccctgaaaatcgattcctgcgaaaattattgaagccagacatagaaagagagcgcctgaaggtgtattcttcatgcctactttactgcctgatatttgagaacctactatag

SEQ ID NO: 216274 - DNA, 1083 bp, Artificial Sequence
  derived and/or modified sequence
atgagcggctctgtgctcttcaccgctggggagcgctggcgctgcttcctgacccccagccgcagcagcctgtactgggccctgcacaacttctgctgcaggaagaagagcaccacccccaagaagatcacccccaacgtgaccttctgtgatgaaaatgccaaggagccagaaaatgccctggacaagctgttcagcagcgagcagcaggccagcatcctgcacgtgctgaacacagccagcaccaaggagctggaggccttccggctgctgcggggccgccgcagcatcaacatcgtggagcaccgggagaactttggccccttccagaacctggagagcctgatgaatgtgcccctcttcaagtacaagagcacagtgcaggtgtgcaacagcatcctgtgccccaagacaggccgggagaagaggaagagcccagaaaatcgcttcctgaggaagctgctgaagccagacatcgagcgggagcggctgaaggctgtgaacagcatcatcagcatcgtgtttggcacccggcgcatcgcctgggcccacctggacaggaagctgactgtgctggactggcagcagagcgaccgctggagcctgatgaggggcatctacagcagctctgtgtacctggaggagatcagcagcatcatcagcaagatgcccaaggctgacttctacgtgctggagaagacaggcctgagcatccagaacagcagcctcttccccatcctgctgcacttccacatcatggaggccatgctgtatgccctgctgaacaagacctttgcccaggacggccagcaccaggtgctgtccatgaacagaaatgctgtgggcaagcactttgagctgatgattggagacagcaggaccagcggcaaggagctggtgaagcagttcctgtttgacagcatcctgaaggctgaccccagggtcttcttccccagcgacaagatcgtgcactaccggcagatgttcctgagcacagagctgcagagggtggaggagctgtatgacagcctgctgcaggccatcgccttctatgagctggccgtgtttgacagccagccctag

SEQ ID NO: 216275 - DNA, 546 bp, Artificial Sequence
  derived and/or modified sequence
atgagcggctctgtgctcttcaccgctggggagcgctggcgctgcttcctgacccccagccgcagcagcctgtactgggccctgcacaacttctgctgcaggaagaagagcaccacccccaagaagatcacccccaacgtgaccttctgtgatgaaaatgccaaggagccagaaaatgccctggacaagctgttcagcagcgagcagcaggccagcatcctgcacgtgctgaacacagccagcaccaaggagctggaggccttccggctgctgcggggccgccgcagcatcaacatcgtggagcaccgggagaactttggccccttccagaacctggagagcctgatgaatgtgcccctcttcaagtacaagagcacagtgcaggtgtgcaacagcatcctgtgccccaagacaggccgggagaagaggaagagcccagaaaatcgcttcctgaggaagctgctgaagccagacatcgagcgggagcggctgaaggtgtacagcagctgcctgctgtactgcctgatctttgagaacctgctgtag

SEQ ID NO: 216276 - DNA, 1083 bp, Artificial Sequence
  derived and/or modified sequence
atgagcggcagcgtgctgttcaccgccggcgagcggtggcggtgctttctcacgcccagtcgctcttccttgtactgggccctgcataacttttgctgtagaaaaaaaagtactacgccaaagaagatcacacctaatgtgacgttctgcgacgaaaacgcgaaagaaccagaaaacgccctagacaaactgttttcaagtgaacaacaggcctcaatcttacatgtactgaacaccgcatctaccaaagagctggaagcattcagactcttacggggaaggagatcgatcaatatcgtggaacaccgagagaatttcggcccatttcagaatttggagtcactcatgaatgttccacttttcaaatataaaagcaccgttcaggtctgcaatagcatcctgtgccctaagacgggacgtgagaaaaggaaaagcccagaaaataggtttttgagaaaactattgaagcctgatatcgagcgcgaacggctgaaagctgtgaactctatcatcagtatcgtgtttggcaccagacgcatcgcctgggctcacctggatcgtaaactaactgtgctggattggcaacaatcagacaggtggtctctcatgcgaggaatttattcatctagcgtgtacctggaagagatttcttccatcatatctaagatgcccaaagccgacttctacgtgttggaaaaaaccggcctgtctatccagaacagctccctgtttcctatcttgctccacttccatatcatggaggccatgctctatgctctgctgaacaaaacttttgctcaggatgggcaacaccaggttcttagcatgaatagaaatgccgtgggaaaacatttcgaattaatgatcggcgactccaggacgagcggcaaggagctggttaaacagtttttatttgactccattctcaaagctgatccacgggttttctttccaagcgacaaaatcgtgcactatcgacagatgttcctgtctaccgaactgcagcgtgtcgaagagttgtatgactctctgctgcaggcaatcgccttttatgagctcgccgtatttgactctcagccttag

SEQ ID NO: 216277 - DNA, 1083 bp, Artificial Sequence
  derived and/or modified sequence
atgagcggcagcgtgctgttcaccgccggcgagcggtggcggtgcttcctcacacctagtcggtcttctttgtactgggcactgcacaatttttgctgtcggaagaagtctactaccccaaagaagattaccccaaacgttaccttctgtgatgagaatgccaaggaaccagagaacgcactggataagctgttttctagcgagcaacaagcaagtatactgcacgtgctcaacacggcgagcacgaaggaattggaggcttttagacttctgagaggcaggcgcagcataaatatagtggaacatagagagaattttggccccttccagaatttagagtccctgatgaatgtgcccctgttcaaatataagagcacagtccaagtctgtaacagtatactgtgcccaaaaacggggcgggaaaaacggaaaagtcccgaaaatcgattcttacgcaagttgctgaagcccgacatcgagcgagagcgcctgaaggccgtgaattctatcataagcattgtgttcgggacgagaagaattgcctgggcacatctggatcgcaagctgaccgtcctggattggcagcaatccgatcggtggagtctgatgagagggatatacagttctagcgtgtacttggaggagatttcctctataataagtaagatgcctaaagccgatttctacgttctggagaaaacaggcttgagtatccagaatagctcactatttcctatcctgttgcactttcacatcatggaggctatgttgtacgctttactcaataagacctttgcccaagacggacaacatcaggtgctaagcatgaacagaaacgctgtgggcaagcactttgagctgatgattggggattcccggacatcgggcaaggagttagtgaagcagtttctcttcgatagcattctgaaggctgacccccgcgttttctttccaagtgacaaaatcgtgcactaccgccaaatgttcttgtcaaccgaattacaaagggtggaggaattgtatgacagcctcctgcaggctatcgccttctacgaactcgcagtctttgatagccagccatag

SEQ ID NO: 216278 - DNA, 546 bp, Artificial Sequence
  derived and/or modified sequence
atgagcggcagcgtgctgttcaccgccggcgagcggtggcggtgcttcttgaccccctcccgctctagtttatattgggccttacacaacttctgctgcagaaaaaaatctactacccctaagaagataacgcccaatgtgactttctgcgatgagaatgctaaagagcctgaaaatgccctcgataagttatttagctcggagcagcaggcttcgattctgcacgtcctgaatacagcctcaacaaaggagctagaagcattccgcctgctgcgcggacgccgaagcattaatattgttgaacatcgcgaaaattttggtccctttcagaaccttgaaagcctcatgaatgtgcccctgtttaagtataagtctaccgtgcaggtatgtaactcaatcttatgtcccaagacgggccgggaaaaaaggaaatcgcccgagaacagatttctgagaaagttgctcaaacctgacatcgagagggagcggctcaaggtatactccagttgcttgctttactgtctcatatttgaaaatctgctgtag

SEQ ID NO: 216279 - DNA, 1083 bp, Artificial Sequence
  derived and/or modified sequence
atgagcgggagtgtgctatttactgccggagagcggtggaggtgctttctgacgccttcgcgttcctcactctactgggccctccacaacttttgctgtaggaagaaatcaactacaccgaagaaaatcaccccaaacgtcactttctgtgacgagaatgcgaaggagcctgagaatgcactggacaagttgttctcatctgaacaacaggcgtctattttacatgtactgaatacggcctccacgaaggagttagaagctttccgcctgctcagaggaaggaggagtattaacatcgtggagcatagagaaaactttggccctttccagaatctggagtcgctcatgaatgtgcccttgtttaagtacaagagtacagtgcaggtctgcaactccatactgtgtcccaagacggggagagaaaaaagaaaaagtcccgagaatagattcctgcggaagctgctcaaacccgacatcgagagagagcggctgaaagccgtgaactcaatcatttcaatagtgtttgggactagacgaattgcttgggctcatttggatcggaagctgaccgtgttggactggcagcaatcagataggtggtccttgatgcgtggaatttattcctcgtccgtctacttagaggaaatcagctccatcatctcaaagatgcctaaggctgatttttatgtgctggagaagacgggcctctctattcagaatagctctctgtttcccatcttactgcacttccacatcatggaagctatgctgtacgccctgttgaataagaccttcgcgcaggacggtcagcaccaagtgctatcaatgaatcgaaatgcagtgggaaagcactttgagttgatgatcggcgatagcaggacctcaggaaaggagcttgtgaagcagttcttgttcgactccattctgaaggcggacccaagagtattttttcctagtgacaagattgtgcattacagacagatgtttctctctactgaattgcagcgcgtagaggagctgtacgacagtctcctccaagcaatcgctttttacgagctggccgtgtttgatagtcagccctag

SEQ ID NO: 216280 - DNA, 1083 bp, Artificial Sequence
  derived and/or modified sequence
atgagcggatctgttctcttcacagcaggagagcggtggcgatgttttctgaccccttctaggtcctctctctactgggccctgcacaacttctgctgtcgcaaaaagtctaccacgccgaaaaagatcacccctaatgttaccttttgcgacgagaacgctaaggaacctgaaaacgccttggataagttattttcatctgagcagcaggctagcatcttgcacgtactaaatacagcttccaccaaggaattggaagccttccgcctcctgcggggaaggcgctcaatcaacatcgtggagcatcgggaaaattttgggccttttcaaaatctggagagtctaatgaatgtgcctctcttcaagtataaatccactgtgcaggtgtgcaatagcattctttgcccaaaaactggccgagagaaaagaaaaagccccgaaaaccggtttttgcgaaaactcctgaaacccgatatagagagggaacggctcaaggcagtgaactccatcatttccatagtatttggtaccaggaggattgcatgggcacatttggatagaaaactgacggtgctggattggcagcagtcggatcgatggagtctgatgagagggatttattcatctagtgtgtacctggaggagatttccagtatcatctctaagatgcccaaggcagacttctatgtgctggagaagacagggttaagtatccagaattctagtttgttcccaatcctcctacattttcatatcatggaagccatgctgtatgccctcctgaacaagacttttgcccaggatgggcagcatcaggtcctgtctatgaataggaacgcagtcgggaaacactttgagttaatgataggtgatagtaggacatcagggaaggagctagtgaagcaattcttgtttgactcgattctgaaggccgaccctcgggtgttctttccctctgataagatcgtgcattaccggcagatgttcttatcaaccgagctgcagagggttgaggagctctacgatagcttattgcaggccatcgctttctatgagctagctgtcttcgactcacagccctag

SEQ ID NO: 216281 - DNA, 546 bp, Artificial Sequence
  derived and/or modified sequence
atgtccggaagtgtactttttaccgctggcgagaggtggaggtgctttcttacaccaagtcgctctagtttatactgggctctgcacaatttctgttgtcgcaaaaaatctacaacccccaagaaaatcacccccaacgtgacattctgtgatgaaaacgccaaggagcctgagaacgccctggacaagctgttctcttctgagcagcaggccagcattctgcacgtcttaaacaccgcatccaccaaggagctggaagccttcaggctactccgcggacgaagaagcattaacattgtggagcacagagagaacttcgggccttttcagaatctggaatccctcatgaatgttccactcttcaaatataaatcaacagtgcaggtgtgcaactcgatcttatgccctaagacggggagggagaaacgaaagtctccagagaacagatttctacgtaagctgcttaagccagacatcgaaagagagaggttgaaggtatattcttcatgcttgttgtactgcttgatattcgaaaacctactgtag

SEQ ID NO: 216282 - DNA, 1891 bp, Artificial Sequence
  derived and/or modified sequence
cttctaagaggaataccgctccagcgccaacgcaatctcctcctccctcgcctttacctaatcccttgcctgccctgtttccccgctgagctcctcaaacacttcgcatctctccccgttattccagtctacctggtgaaaaggttatttgaggaccttgtctacgctgcccctacctgatcccgctcccggcgccacaggctgggccccaacaggagctcctcaatctaagtgtctaggagaaacccagggagtctccacgaaggaggcactttacccactacagactaaaactggcctcggaatcgccttcctggagattcggcccagcggctctcaggagtcggtaggggcaagaacgtttccccggtgcagtggaagaagactgcgggccagccagggactcgggatccggggacagggcctcggcaggcgcccgcctggaagcccgcagcccagacgcggacgacccactgctcagcgggacacacctcgggccttgccccggaacgccgcttggacaacaacctttccgccgagtgcaggccgagcgcttttgggcgcagcacgcaggaaccggaagtcaatggaggaagactggacctactgattcaacttggagatgagcgggtctgtcctcttcacggcgggagagaggtggagatgctttctgaccccgtcgaggtcatccctgtactgggccttacataatttctgctgtcggaaaaaatccactacacctaagaaaattactcccaatgttactttttgtgatgaaaatgcaaaggagcccgaaaatgcacttgacaagctcttctcttcagaacagcaggcttccatcttgcatgtgttgaatacagcatctactaaagaacttgaagctttccgattgcttcgtggaagaaggtccatcaatatcgtagagcacagagaaaactttgggccatttcagaatttagagagtttaatgaatgtgcccttgtttaagtataaaagtacagttcaagtttgtaactccatactttgtccaaagactggacgggaaaaaagaaagtcaccggaaaaccggttcctgagaaagctcctcaaaccagacatagaaagagaaagacttaaggcagttaatagtatcatatctatcgtttttggtactcgaagaattgcctgggctcaccttgatcgtaagttgacagtgctggactggcagcaaagtgaccgttggagtttaatgagaggaatatactcatcatcagtctatttagaagagatttcctcgatcatttcaaagatgcctaaagcagatttctatgttctggaaaaaacaggactttccattcagaactcatctctgtttccaatactgttacattttcatatcatggaagccatgctgtatgccttattaaataaaacttttgcccaggatgggcagcatcaggtgctgagcatgaatcgaaatgcagtggggaagcattttgaactgatgattggtgactcccggactagtggaaaagagctagtgaagcagtttctcttcgattctatactgaaggcggatcctcgggtgttcttcccatcagataaaatagttcactacagacagatgtttttatctactgaactacaaagagtagaagagctttatgattcattattacaagctattgccttctatgaattagcagtgtttgactctcagccttagaattctgaggttaacgtgctaaagtataattattagctctaacgtaacaccaactgttgtgaacatccatgttattggaaaagaacacattttcagtgtattttagatgtttaaattctgacttttggctattaaatggtttacacaataagccaagaccaaatcaataaacattttatgagattc

SEQ ID NO: 216283 - DNA, 1339 bp, Artificial Sequence
  derived and/or modified sequence
gcttttgggcgcagcacgcaggaaccggaagtcaatggaggaagactggacctactgattcaacttggagatgagcgggtctgtcctcttcacggcgggagagaggtggagatgctttctgaccccgtcgaggtcatccctgtactgggccttacataatttctgctgtcggaaaaaatccactacacctaagaaaattactcccaatgttactttttgtgatgaaaatgcaaaggagcccgaaaatgcacttgacaagctcttctcttcagaacagcaggcttccatcttgcatgtgttgaatacagcatctactaaagaacttgaagctttccgattgcttcgtggaagaaggtccatcaatatcgtagagcacagagaaaactttgggccatttcagaatttagagagtttaatgaatgtgcccttgtttaagtataaaagtacagttcaagtttgtaactccatactttgtccaaagactggacgggaaaaaagaaagtcaccggaaaaccggttcctgagaaagctcctcaaaccagacatagaaagagaaagacttaaggcagttaatagtatcatatctatcgtttttggtactcgaagaattgcctgggctcaccttgatcgtaagttgacagtgctggactggcagcaaagtgaccgttggagtttaatgagaggaatatactcatcatcagtctatttagaagagatttcctcgatcatttcaaagatgcctaaagcagatttctatgttctggaaaaaacaggactttccattcagaactcatctctgtttccaatactgttacattttcatatcatggaagccatgctgtatgccttattaaataaaacttttgcccaggatgggcagcatcaggtgctgagcatgaatcgaaatgcagtggggaagcattttgaactgatgattggtgactcccggactagtggaaaagagctagtgaagcagtttctcttcgattctatactgaaggcggatcctcgggtgttcttcccatcagataaaatagttcactacagacagatgtttttatctactgaactacaaagagtagaagagctttatgattcattattacaagctattgccttctatgaattagcagtgtttgactctcagccttagaattctgaggttaacgtgctaaagtataattattagctctaacgtaacaccaactgttgtgaacatccatgttattggaaaagaacacattttcagtgtattttagatgtttaaattctgacttttggctattaaatggtttacacaataagccaagaccaaatcaataaacattttatgagattc

SEQ ID NO: 216284 - DNA, 1142 bp, Artificial Sequence
  derived and/or modified sequence
gcttttgggcgcagcacgcaggaaccggaagtcaatggaggaagactggacctactgattcaacttggagatgagcgggtctgtcctcttcacggcgggagagaggtggagatgctttctgaccccgtcgaggtcatccctgtactgggccttacataatttctgctgtcggaaaaaatccactacacctaagaaaattactcccaatgttactttttgtgatgaaaatgcaaaggagcccgaaaatgcacttgacaagctcttctcttcagaacagcaggcttccatcttgcatgtgttgaatacagcatctactaaagaacttgaagctttccgattgcttcgtggaagaaggtccatcaatatcgtagagcacagagaaaactttgggccatttcagaatttagagagtttaatgaatgtgcccttgtttaagtataaaagtacagttcaagtttgtaactccatactttgtccaaagactggacgggaaaaaagaaagtcaccggaaaaccggttcctgagaaagctcctcaaaccagacatagaaagagaaagacttaaggtatattcttcatgtctgctatactgcctaatatttgagaacctactctagaaagcactcaagtattaaactttagaggaactcatgtcctgtgtaacattgcttgataatcattatctcataaaaatcataagcaccattttttttctggaccagtgggtccgttttttgaggaatatgggtacttttgaaaacctgatgaaagctgtggaccctcttcccatagaaaaagatatagcacatatacacagaatactacacagtttcagaggactggcagattctgttaagtccactcatggactccaagtagaactgctgcaattgatctggaacatattttaaccaaattcttcagggaggattctcatccagattcatggccaaaactatttatacccagattagagtggagttgcatcttatttagggggctggattttaagtcagtttttatggagatataagtcatgcagtaaaatcctttaagaaaaaatcgattgccgacgaagtattgtgtgtagtctggttcagtaatgcttgtgcacagtaaagcttgagagtcacttagctaaag

SEQ ID NO: 216285 - protein, 723 aa, Artificial Sequence
  derived and/or modified sequence
MLSSMAAAGSVKAALQVAEVLEAIVSCCVGPEGRQVLCTKPTGEVLLSRNGGRLLEALHLEHPIARMIVDCVSSHLKKTGDGAKTFIIFLCHLLRGLHAITDREKDPLMCENIQTHGRHWKNCSRWKFISQALLTFQTQILDGIMDQYLSRHFLSIFSSAKERTLCRSSLELLLEAYFCGRVGRNNHKFISQLMCDYFFKCMTCKSGIGVFELVDDHFVELNVGVTGLPVSDSRIIAGLVLQKDFSVYRPADGDMRMVIVTETIQPLFSTSGSEFILNSEAQFQTSQFWIMEKTKAIMKHLHSQNVKLLISSVKQPDLVSYYAGVNGISVVECLSSEEVSLIRRIIGLSPFVPPQAFSQCEIPNTALVKFCKPLILRSKRYVHLGLISTCAFIPHSIVLCGPVHGLIEQHEDALHGALKMLRQLFKDLDLNYMTQTNDQNGTSSLFIYKNSGESYQAPDPGNGSIQRPYQDTVAENKDALEKTQTYLKVHSNLVIPDVELETYIPYSTPTLTPTDTFQTVETLTCLSLERNRLTDYYEPLLKNNSTAYSTRGNRIEISYENLQVTNITRKGSMLPVSCKLPNMGTSQSYLSSSMPAGCVLPVGGNFEILLHYYLLNYAKKCHQSEETMVSMIIANALLGIPKVLYKSKTGKYSFPHTYIRAVHALQTNQPLVSSQTGLESVMGKYQLLTSVLQCLTKILTIDMVITVKRHPQKVHNQDSEDEL

SEQ ID NO: 216286 - DNA, 2172 bp, Artificial Sequence
  derived and/or modified sequence
atgttaagctcaatggcagcggccggttctgttaaggctgctctccaggtggccgaagtcctagaggccatagtatcctgctgtgtcggccccgaagggagacaggtgctgtgtaccaaacctaccggagaagtactgctctcccgcaacggagggcgcctcctggaggcattgcacctcgagcatcctattgctcgaatgattgtggattgcgtctctagtcacctgaaaaagaccggtgacggcgcaaagacattcatcatattcctgtgtcatctgttgcggggactgcatgccattacggatagagagaaggatccactcatgtgcgagaacattcagacccatggcaggcattggaagaattgcagtagatggaagtttatctcccaggcgctgttaacattccagactcagattttggatggcatcatggaccagtatctgagccggcattttctttcgatttttagttcagcaaaagagagaaccctgtgtcggtcctcactcgagttgctcctggaggcctatttttgtggacgagttggcagaaataatcataagtttatttctcaactgatgtgtgattacttcttcaaatgtatgacctgtaagtctggaatcggcgtctttgagctagtagatgaccacttcgtcgagctgaatgtgggggtcaccggcctccccgtatccgacagtcggattattgccggactcgttctgcagaaggatttctcggtttatcggcccgcagacggtgatatgcggatggtgatagttaccgagactattcaacccctattctctacaagtggctctgagttcatcctcaattctgaagcacaattccagacatcacagttctggatcatggagaaaaccaaagccatcatgaaacatctgcatagccaaaacgtgaagctgcttatatcttcggtcaagcagcccgacttagtgtcttattatgccggcgtgaatggcatttcagtggtggagtgcctctctagcgaggaagtctccttgatccgaagaattattggtctgtcccccttcgtgcccccacaggccttttcacaatgcgagatccctaacaccgccttggtcaagttttgtaaaccgctgattcttcgttctaagcgctacgtgcaccttggtttaatttcaacctgcgctttcatcccacactctatcgtcctgtgtggccccgtacatggtttgatcgaacaacacgaggacgccctgcacggcgcacttaagatgctgagacaattgttcaaggatctggacctgaactacatgacacagactaacgatcagaacggaacctcttcactgtttatttacaaaaattccggggaaagttaccaggctccagatcccggaaatgggtccatacaacggccctatcaagacaccgttgctgaaaataaggacgctttagagaaaacacagacctacctaaaagtccatagcaacctggtcatccctgatgttgagctcgagacatacatcccctactccacacccaccctgacccccacggataccttccagacagtggaaactcttacttgcctgagtttggagagaaatagacttactgactactacgaaccactactgaagaacaatagtaccgcatacagcacacgcggcaatagaattgaaatttcttacgagaacctgcaagttacgaatataacgcgaaaggggagcatgctgccagtatcttgcaagctcccaaatatgggcacatctcagtcctatttgagtagttctatgcctgcaggctgcgttctgccggtgggcgggaattttgagatcctcctgcactactatttgctcaattatgccaagaagtgtcaccagtctgaagagacaatggtgagcatgattattgccaatgctctgttgggaataccaaaagtgctgtacaagtctaaaactggcaagtatagctttccccatacatacatccgtgccgtacatgccttacagaccaatcagccactggtctcaagccagacgggactggaatcagtaatgggcaaataccagctgctgacctccgtgctccagtgtttgaccaagattctgacaatcgacatggtcattacagttaaacggcatccacagaaggtgcacaaccaggactcagaggatgagttgtag

SEQ ID NO: 216287 - DNA, 2172 bp, Artificial Sequence
  derived and/or modified sequence
atgctgagctccatggctgctgctggctctgtgaaggccgccctgcaggtggccgaggtgctggaggccatcgtgtcctgctgcgtgggccctgagggccggcaggtgctgtgcaccaagcccaccggggaggtgctgctgagcagaaatggaggccgcctgctggaggccctgcacctggagcaccccatcgccaggatgattgtggactgtgtgagcagccacctgaagaagacaggagatggagccaagaccttcatcatcttcctgtgccacctgctgcggggcctgcacgccatcacagaccgggagaaggaccccctgatgtgtgagaacatccagacccacggccgccactggaagaactgcagccgctggaagttcatcagccaggccctgctgaccttccagacccagatcctggatggcatcatggaccagtacctgagccgccacttcctgagcatcttcagcagcgccaaggagaggaccctgtgccgcagcagcctggagctgctgctggaggcctacttctgtggccgggtgggcaggaacaaccacaagttcatcagccagctgatgtgtgactacttcttcaagtgcatgacctgcaagagcggcatcggcgtgtttgagctggtggatgaccactttgtggagctgaatgtgggcgtgacaggcctgcctgtgtctgacagccgcatcatcgccggcctggtgctgcagaaggacttctctgtgtacagaccagcagatggagacatgaggatggtgattgtgacagagaccatccagcccctcttcagcaccagcggcagcgagttcatcctgaacagcgaggcccagttccagaccagccagttctggatcatggagaagaccaaggccatcatgaagcacctgcacagccagaatgtgaagctgctgatcagctctgtgaagcagcctgacctggtgtcctactatgccggcgtgaatggcatctctgtggtggagtgcctgagcagcgaggaggtgtccctcatccgccgcatcatcggcctgagcccctttgtgcccccccaggccttcagccagtgtgagatccccaacacagccctggtgaagttctgcaagcccctcatcctgcggagcaagagatatgtgcacctgggcctcatcagcacctgtgccttcatcccccacagcatcgtgctgtgtggccctgtgcacggcctgattgagcagcatgaagatgccctgcatggagccctgaagatgctgcggcagctgttcaaggacctggacctgaactacatgacccagaccaatgaccagaatggcaccagcagcctcttcatctacaagaacagcggggagagctaccaggccccagaccctggaaatggcagcatccagaggccctaccaggacacagtggccgagaacaaggatgccctggagaagacccagacctacctgaaggtgcacagcaacctggtgatcccagatgtggagctggagacctacatcccctacagcacccccaccctgacccccacagacaccttccagacagtggagaccctgacctgcctgagcctggagaggaaccggctgacagactactatgagcccctgctgaagaacaacagcacagcctacagcacccggggcaacagaattgagatctcctatgagaacctgcaggtgaccaacatcaccaggaagggctccatgctgcctgtgtcctgcaagctgcccaacatgggcaccagccagagctacctgagcagctccatgcctgctggctgtgtgctgcctgtgggcggcaactttgagatcctgctgcactactacctgctgaactatgccaagaagtgccaccagagcgaggagaccatggtgtccatgatcatcgccaatgccctgctgggcatccccaaggtgctgtacaagagcaagacaggcaagtacagcttcccccacacctacatccgggctgtgcacgccctgcagaccaaccagcccctggtgagcagccagacaggcctggagagcgtgatgggcaagtaccagctgctgacctctgtgctgcagtgcctgaccaagatcctgaccatcgacatggtgatcaccgtgaagaggcacccccagaaggtgcacaaccaggacagtgaagatgagctgtag

SEQ ID NO: 216288 - DNA, 2172 bp, Artificial Sequence
  derived and/or modified sequence
atgctgagcagcatggccgccgccggcagcgtgaaggccgccctgcaagtggcagaggtgctcgaggctatagtgagctgttgtgtaggtccagaaggccgacaggttctgtgtactaagccaaccggcgaagttctcctgtccagaaacggggggaggttgttggaagccctgcacctagagcatccaattgcaagaatgatcgtcgactgcgtcagttcccatcttaaaaaaaccggagacggagccaagacattcatcatattcctttgccatctgctcagaggattacatgctataacggatcgggaaaaagacccgctaatgtgtgaaaacattcagacccatggaagacattggaagaattgcagtaggtggaagttcatctcacaggccctactcacgttccaaacccagattctggatggcattatggaccagtatctgtcacgccatttcctttcaatcttctcttctgccaaggagcgtactctgtgtcgctcaagcctagaactcctgttggaggcatacttttgtggaagagtgggtcgcaacaatcataaattcatctcccaattgatgtgtgactacttttttaagtgcatgacttgcaaatccgggataggtgtcttcgaacttgtagacgatcatttcgtggaactgaacgtcggggtgacgggacttcccgtgtccgattcaagaattattgcaggtctggtcctccagaaagactttagtgtctaccgcccagccgatggcgatatgcggatggtgattgttactgaaacaatccagccactttttagtacctctggctcggagtttattctgaactctgaggcccagttccagacaagtcagttttggattatggagaaaacaaaggctatcatgaagcatctccactctcagaatgtgaaactcttaattagtagcgtcaagcagcccgacttggtctcttactatgctggcgtgaacggcattagcgtggtggaatgcctgtcttccgaagaagtgtcattgattcggagaatcatcgggctgtcaccatttgttcccccacaggcattcagtcagtgcgagattcctaatacagctctggtgaagttttgcaagccactgattttacgctccaaaaggtatgtccatctgggactgatctccacttgtgcgttcataccccactccattgtgctgtgcggtccagttcacggtctcatcgagcaacacgaggacgctttacatggggccttgaaaatgcttcgccagttatttaaagatttggatcttaactatatgacacagaccaacgaccagaacggaacatcctcactatttatatacaaaaacagtggggagtcctaccaagcccctgaccccggcaatggaagcattcagagaccctaccaggacactgtggcggaaaacaaggacgctctcgaaaaaacccagacatacctgaaagtgcattctaacctcgttatacctgatgtcgagctggagacatacattccatattctactcctacactgaccccaacagacacttttcagactgtcgagaccctgacttgtctgagtctggagagaaatcgtctgaccgattattatgaacccctgctgaaaaataactcaacagcttacagtaccagggggaataggattgagatctcctacgaaaacttacaggtgactaacattaccaggaaagggtctatgctccccgtgtcgtgtaaactgccaaacatggggacgagtcaaagctatctatcttcgtccatgcccgctggctgtgtcctaccagtcggcgggaacttcgagattctgctccattattatctgttgaactacgccaaaaagtgccaccagtccgaggagacgatggtgagcatgatcatcgccaatgctttgttaggcattcccaaagtactgtacaagagcaagaccggcaaatactcattcccacacacatacattagggctgtgcacgccctgcagacaaatcagcccctcgtctcatctcaaaccgggctcgagtctgttatgggcaaataccagctcctgacctctgtgctgcagtgcctaactaaaattctcactattgatatggtgataactgtgaagcgtcatcctcaaaaagttcacaatcaggactctgaggatgagctctag

SEQ ID NO: 216289 - DNA, 2172 bp, Artificial Sequence
  derived and/or modified sequence
atgctttcaagtatggctgcagccggttccgtgaaggctgctctgcaggtagctgaagtgctcgaagctatagtgagctgctgtgtgggccctgagggacggcaggtgctctgcactaaaccaactggtgaggtgttgctcagccgcaacggagggaggctgctcgaggccttgcaccttgagcaccccatcgctaggatgattgtggactgcgtttcaagccaccttaagaagacaggtgacggcgctaagacattcatcatctttctgtgtcatctgctgagaggacttcatgctatcaccgatcgcgagaaggaccctctgatgtgcgaaaatatccagactcacggacgacattggaaaaactgcagccgctggaagttcatatcccaggccctccttacattccagacccagatactcgatgggatcatggaccaatacctcagtcggcattttcttagtattttctcctcagccaaagaacgaaccctatgtcgtagctccttggagctcctcctggaggcttatttttgcggtcgagtcggcaggaataaccataaattcatcagtcagctgatgtgtgactattttttcaaatgtatgacttgcaagagtggaatcggcgtctttgaattggtggatgaccactttgtcgagctgaatgtcggggtgacaggcctgcccgtaagtgattctcgcatcattgccggattagtcttgcagaaggattttagcgtttaccgtccggcagatggtgacatgcgaatggtgattgttactgagactatccagccattattcagcacctccgggtccgaatttatcctgaacagtgaggcccagttccaaacctctcaattctggatcatggagaaaaccaaggctatcatgaagcacttgcactcacagaacgttaaactgcttatttccagcgttaagcagccagacttggtgtcatactatgctggggtgaacggcatatctgttgttgaatgcctgtcctccgaggaggtgtctctcatcaggcgcattataggactgagtccgtttgttccaccacaggctttttctcagtgcgagatccctaatacagctctggtgaagttttgcaaaccactgattctccgtagcaagagatatgttcatctgggactcatttcaacatgtgccttcattcctcactccattgtgctttgcggtccagtgcacggcttaattgaacagcatgaggacgcgctgcacggcgcacttaagatgctgagacagctcttcaaggacctggatcttaattatatgacccagactaatgaccagaacggaacctcatccctctttatttacaagaattctggagagtcctatcaggcaccggatcctggtaatggtagtatccagcggccatatcaggatacggtcgccgagaataaggacgccctcgaaaaaacacagacatatctaaaggtccacagcaatctggttattcccgatgttgagctggaaacttacattccctactctacccccacactgacaccgaccgacacatttcagactgtagagaccctgacctgtctgagcctggaaaggaacaggttaacagattactatgagcctctcctgaaaaacaattccaccgcgtactccacgcgcggtaacagaatcgagatctcatacgaaaacctacaggtgaccaacataactaggaaaggctccatgctccccgtctcttgcaagttgcccaacatgggaacttcccagtcatatctcagcagttccatgcccgcaggctgtgtccttcctgtcgggggtaactttgagatcctgctccattattacctcttgaattatgcaaaaaaatgtcaccagtcggaagagacaatggtaagcatgattattgctaacgccctgctcggcattcctaaagttttatataagagcaaaaccgggaaatattcatttcctcacacgtatataagggcggtgcacgcgctccagacgaatcagcctttagtgtccagccaaacaggcctcgagtccgtgatggggaagtaccaattattgacgtccgtgctgcagtgcttaaccaagattttaacgatcgatatggtcattactgtcaagaggcatccccaaaaggtgcacaaccaggattccgaagatgaattatag

SEQ ID NO: 216290 - DNA, 3595 bp, Artificial Sequence
  derived and/or modified sequence
attccgtttccggccgttcccacccctgttttcggtcggcccgggtgttctgcaagctggtcaaaaaggggaagcggcccagatatgttaagttctatggccgctgcagggtctgtgaaggcggcgttgcaggtggccgaggtgctggaagccatcgtgagctgctgcgtggggcccgagggacggcaagttttgtgtacgaagcccactggcgaggtgcttctcagccggaatggaggccgcctcctggaggcgctacacttagagcatcccatagccaggatgatagtggactgtgtttccagtcatctcaaaaaaacaggagatggtgcaaaaacatttattatctttctttgccatttgcttagaggacttcatgcaatcacagacagagaaaaggatcctttgatgtgtgaaaacattcaaacccatggaaggcattggaaaaattgttctcggtggaaatttatttcccaggctctcctaacgtttcagacacaaatattagacggtattatggaccagtacctaagtagacactttttgtctatcttttcgtctgctaaagagagaacattgtgtaggagctctttagagttgctcttagaagcatacttttgtggaagagtgggaagaaataatcataaatttatttcacagttgatgtgtgactactttttcaagtgtatgacttgtaaaagtgggattggtgtatttgagttagtggatgaccattttgtagagttgaatgttggtgtcactggccttcctgtttcagattccaggatcatagctggtcttgtgcttcagaaagatttttctgtgtaccgcccagcagatggtgacatgcgaatggtgatagtaacagaaaccattcagcctcttttttccacttctggatcagagtttattctaaattcagaagcacagtttcagacatctcaattttggattatggaaaagacaaaagcaataatgaaacatctacatagtcagaatgtaaaattgctcatatctagtgtgaaacaaccagatttagttagttattatgcaggggtgaatggcatatcagtggttgagtgtttatcatcagaagaagtttctcttatccggaggatcattggtctttctccatttgtaccaccacaggccttttcgcagtgtgaaatacctaacactgctttggtgaaattttgtaaacctcttatccttagatccaaaagatatgttcatctaggcttgataagcacatgtgcatttataccacactctatagttctttgtggaccagtgcatggtctcattgaacaacatgaggatgctttacatggagcacttaaaatgcttcggcaattatttaaagaccttgatctaaattacatgacacaaaccaatgaccaaaatggcacttcaagtctttttatttataagaacagtggagaaagttatcaagcaccagatcctggtaatggctcaatacaaaggccttatcaggacacagttgcagagaacaaagatgcattggaaaaaactcaaacatatttaaaagtacattctaatttggtaattccagatgtagaattagaaacatatattccgtattcaacccccacactgacaccaacagatacattccaaacagttgaaacgctgacatgtttgtctttggaaagaaacaggctaactgattattatgaaccattactcaagaacaattccactgcttattcaacaaggggaaatagaatagaaatttcttacgaaaatttacaggtcacaaatattactagaaagggaagcatgttaccagtgagctgtaagttaccgaatatgggtacttcccagagttacctttcctcatctatgccagctggttgtgttttgccagtaggtggtaattttgagatcttgttacattactatcttctcaattatgccaaaaaatgccatcaatcagaagaaaccatggttagtatgataatagctaatgcacttttaggcattcccaaagtcctttataaatctaaaacaggaaagtacagctttccacatacatatataagagctgtccatgcactgcaaaccaatcaacccttggtaagcagtcagacaggtttggaatcagtaatgggtaaataccagctactaacttcagttcttcagtgtttgacaaaaatattaaccattgacatggtaatcactgttaagagacaccctcagaaagttcacaatcaagattcagaagatgaactataacatcagaagtttttaattaaccaaacttttcatctaactcaagccaagtaaagcagtcatgtgaccactggttctaaagtcagttcagtctacttaggaaaatagcgtaactttaaaagtctttagaagaagcacactaaggtcaccagaccagatacaaatattaaattactttatggaacaaatctagaggggaagccaagatttggctaagtgtgtctgttttttccctattttatgcctctgtgtctcagctctgtgttagcctatgtgtttaggggagggtttttctttatagctcctttttactctcctgtatctttttcactccagccctccttcatcgttacatgtttagttcatagaatcatttaatctctgatttgggtgggcttattctaattgtttttaatattgaatacattatttgcattaattttccctactcatactttgtaaagctgagtaaaaggctcaaattatttttttcaaaaagcataaaattaaattagcagtgagtaaaaggctcaaattttttttcaaaaagcataaaattaatttttacttttatgtggtcattggtttactgccacttcatttggaaaacttggatagattttcacctttgatatacctttgaatatatgttacctgaaatataactgtgcattgttaactctttcatttctgtagtaaaaggttaatactagaaaggatatgcaattaatactttgattttctcctgaccccaagagcttgtaaggatatgtcatgtatttactggtttttcttgtatctggtgcatagccagagttccacagtaacaaataatttgacaatttttatttctaatgtttatttctgttttatttttaatttttatttctaatttatttcatttacaaatgttcatattttaaaaacttgtcaatgtaaataatatgatgcatcttatcatggacaaggacagtgttttctacctttatcagttctctgtaatacccaaaacagtgctgtatttactccaagtattcagaagtgcttgttgaacaaaacagtgttatctttaattcattcctttaaatacatgtttccagtttacttattcaacagattcttacttgggattgactgaagaaaaaaaactttaattatagttgaataagtgttgactaatgtattttaaaaactataatatcaaaattttttatattaaatgtaattctgattttttaaacatttatgctatatgatgcattattttgtttctgtgaatatggagagaataaattagctcttttgctgaattcatggatgaatgaactttaaaactgctgca

SEQ ID NO: 216291 - DNA, 2172 bp, Artificial Sequence
  derived and/or modified sequence
atgctgagcagcatggccgccgccggcagcgtgaaggccgccctgcaggtggccgaggtgctggaggccatcgtgagctgctgcgtgggccccgagggcagacaggtgctgtgcaccaagcccaccggcgaggtgctgctgagcagaaacggcggcagactgctggaggccctgcacctggagcaccccatcgccagaatgatcgtggactgcgtgagcagccacctgaagaagaccggcgacggcgccaagaccttcatcatcttcctgtgccacctgctgagaggcctgcacgccatcaccgacagagagaaggaccccctgatgtgcgagaacatccagacccacggcagacactggaagaactgcagcagatggaagttcatcagccaggccctgctgaccttccagacccagatcctggacggcatcatggaccagtacctgagcagacacttcctgagcatcttcagcagcgccaaggagagaaccctgtgcagaagcagcctggagctgctgctggaggcctacttctgcggcagagtgggcagaaacaaccacaagttcatcagccagctgatgtgcgactacttcttcaagtgcatgacctgcaagagcggcatcggcgtgttcgagctggtggacgaccacttcgtggagctgaacgtgggcgtgaccggcctgcccgtgagcgacagcagaatcatcgccggcctggtgctgcagaaggacttcagcgtgtacagacccgccgacggcgacatgagaatggtgatcgtgaccgagaccatccagcccctgttcagcaccagcggcagcgagttcatcctgaacagcgaggcccagttccagaccagccagttctggatcatggagaagaccaaggccatcatgaagcacctgcacagccagaacgtgaagctgctgatcagcagcgtgaagcagcccgacctggtgagctactacgccggcgtgaacggcatcagcgtggtggagtgcctgagcagcgaggaggtgagcctgatcagaagaatcatcggcctgagccccttcgtgcccccccaggccttcagccagtgcgagatccccaacaccgccctggtgaagttctgcaagcccctgatcctgagaagcaagagatacgtgcacctgggcctgatcagcacctgcgccttcatcccccacagcatcgtgctgtgcggccccgtgcacggcctgatcgagcagcacgaggacgccctgcacggcgccctgaagatgctgagacagctgttcaaggacctggacctgaactacatgacccagaccaacgaccagaacggcaccagcagcctgttcatctacaagaacagcggcgagagctaccaggcccccgaccccggcaacggcagcatccagagaccctaccaggacaccgtggccgagaacaaggacgccctggagaagacccagacctacctgaaggtgcacagcaacctggtgatccccgacgtggagctggagacctacatcccctacagcacccccaccctgacccccaccgacaccttccagaccgtggagaccctgacctgcctgagcctggagagaaacagactgaccgactactacgagcccctgctgaagaacaacagcaccgcctacagcaccagaggcaacagaatcgagatcagctacgagaacctgcaggtgaccaacatcaccagaaagggcagcatgctgcccgtgagctgcaagctgcccaacatgggcaccagccagagctacctgagcagcagcatgcccgccggctgcgtgctgcccgtgggcggcaacttcgagatcctgctgcactactacctgctgaactacgccaagaagtgccaccagagcgaggagaccatggtgagcatgatcatcgccaacgccctgctgggcatccccaaggtgctgtacaagagcaagaccggcaagtacagcttcccccacacctacatcagagccgtgcacgccctgcagaccaaccagcccctggtgagcagccagaccggcctggagagcgtgatgggcaagtaccagctgctgaccagcgtgctgcagtgcctgaccaagatcctgaccatcgacatggtgatcaccgtgaagagacacccccagaaggtgcacaaccaggacagcgaggacgagctgtag

SEQ ID NO: 216292 - protein, 182 aa, Artificial Sequence
  derived and/or modified sequence
MEPQLGPEAAALRPGWLALLLWVSALSCSFSLPASSLSSLVPQVRTSYNFGRTFLGLDKCNACIGTSICKKFFKEEIRSDNWLASHLGLPPDSLLSYPANYSDDSKIWRPVEIFRLVSKYQNEISDRRICASASAPKTCSIERVLRKTERFQKWLQAKRLTPDLVQDCHQGQRELKFLCMLR

SEQ ID NO: 216293 - DNA, 549 bp, Artificial Sequence
  derived and/or modified sequence
atggagccgcagctgggtcccgaggccgcagccctgcgcccaggatggctggctcttctactgtgggtctcagcgttaagctgttcattttctctgccagcctcgtcgctgtctagcctggtgccacaggtgcgtactagctacaatttcggacgtacgtttctaggtctcgacaaatgcaatgcctgcatcggaaccagtatctgcaaaaaatttttcaaagaagagatccgctccgataattggctcgcttctcacctgggcttgcccccagattctctgttgtcataccctgctaattattccgatgatagtaagatttggcgccctgtggagattttccgattagtaagcaaataccagaatgaaatttccgaccgtcgcatatgcgcgtctgcgtcagctccaaagacctgcagcatcgagagggtcctacggaaaactgagagatttcagaagtggctccaggccaaacggctgacccctgacctggttcaggactgccatcagggccagcgggaactaaagttcctctgcatgctccgatag

SEQ ID NO: 216294 - DNA, 549 bp, Artificial Sequence
  derived and/or modified sequence
atggagccgcaactgggacctgaagctgctgcacttcgacccggctggttagcccttctcctctgggtgtcagccctgtcatgctctttctcactgcccgcgagcagtttaagttctcttgtacctcaagtgcgcacatcctacaactttggcaggaccttcctcggactggataaatgtaatgcttgcattggcacctcaatctgtaaaaaattctttaaggaggaaatacgatccgacaactggctggcctcccatctaggcctccctcccgactcccttctctcataccccgccaattattctgacgattccaaaatttggcgtcctgtggaaatcttcagacttgtgagcaagtaccaaaatgaaataagcgatcgtagaatttgtgcctccgcttccgcacccaagacctgctccattgaaagggtgttgaggaaaaccgagcgatttcagaaatggctccaggccaaaagactgacgccagatttagttcaagactgtcaccagggacaaagggaactcaaattcctgtgcatgctcaggtag

SEQ ID NO: 216295 - DNA, 549 bp, Artificial Sequence
  derived and/or modified sequence
atggagccgcaactgggacctgaagctgctgcacttcgacccggctggttagcccttctcctctgggtgtcagccctgtcatgctctttctcactgcccgcgagcagtttaagttctcttgtacctcaagtgcgcacatcctacaactttggcaggaccttcctcggactggataaatgtaatgcttgcattggcacctcaatctgtaaaaaattctttaaggaggaaatacgatccgacaactggctggcctcccatctaggcctccctcccgactcccttctctcataccccgccaattatagcgatgacagtaaaatatggagacccgtcgagatctttaggttggtctctaaataccagaatgagatcagtgatagaagaatatgcgcctcggctagcgcacccaaaacatgtagcatcgagagagtacttagaaagacagaacgatttcagaagtggctccaagcaaaaaggttgaccccagaccttgtccaggattgtcaccagggccagcgagagctaaaattcctgtgcatgttgaggtag

SEQ ID NO: 216296 - DNA, 549 bp, Artificial Sequence
  derived and/or modified sequence
atggagccccagctgggccccgaggccgccgccctgagacccggctggctggccctgctgctgtgggtgagcgccctgagctgcagcttcagcctgcccgccagcagcctgagcagcctggtgccccaggtgagaaccagctacaacttcggcagaaccttcctgggcctggacaagtgcaacgcctgcatcggcaccagcatctgcaagaagttcttcaaggaggagatcagaagcgacaactggctggccagccacctgggcctgccccccgacagcctgctgagctaccccgccaactacagcgacgacagcaagatctggagacccgtggagatcttcagactggtgagcaagtaccagaacgagatcagcgacagaagaatctgcgccagcgccagcgcccccaagacctgcagcatcgagagagtgctgagaaagaccgagagattccagaagtggctgcaggccaagagactgacccccgacctggtgcaggactgccaccagggccagagagagctgaagttcctgtgcatgctgagatag

SEQ ID NO: 216297 - DNA, 549 bp, Artificial Sequence
  derived and/or modified sequence
atggagcctcagctgggacccgaagctgccgcactcagacccgggtggctggccctattactttgggtatctgccctctcctgctcatttagcttgcccgcctcctcgttatcttctttagtcccacaggttcgaacttcatataatttcgggaggacttttctgggcctcgataagtgcaatgcctgtattgggacgtctatttgcaaaaagttctttaaagaggagattaggagcgacaattggttggcgagtcaccttggattgccccccgactccttgttatcctatcccgctaattactctgacgattccaaaatctggcgccccgtggagatctttcggctggtgtccaagtaccagaacgaaatctcggatagacggatctgtgcctcggctagtgcgcccaaaacttgtagcattgagagagttctgagaaagacagagcgttttcagaaatggttacaggcaaagagactgacacctgacctcgtccaagactgtcatcaagggcagcgggaactcaagttcttgtgcatgcttcggtag

SEQ ID NO: 216298 - DNA, 549 bp, Artificial Sequence
  derived and/or modified sequence
atggagccccagctgggccctgaggccgccgccctgcggcccggctggctggccctgctgctgtgggtgtctgccctgagctgcagcttcagcctgcctgccagcagcctgagcagcctggtgccccaggtgaggaccagctacaactttggccgcaccttcctgggcctggacaagtgcaatgcctgcatcggcaccagcatctgcaagaagttcttcaaggaggagatccgcagtgacaactggctggccagccacctgggcctgcccccagacagcctgctgagctacccagccaactacagtgatgacagcaagatctggaggcctgtggagatcttccggctggtgtccaagtaccagaatgagatcagtgaccggcgcatctgtgccagcgccagcgcccccaagacctgcagcattgagcgggtgctgaggaagacagagcgcttccagaagtggctgcaggccaagaggctgaccccagacctggtgcaggactgccaccagggccagcgggagctgaagttcctgtgcatgctgaggtag

SEQ ID NO: 216299 - DNA, 2513 bp, Artificial Sequence
  derived and/or modified sequence
ctctttggccaagccctgcctctgtacagcctcgagtggacagccagaggctgcagctggagcccagagcccaagatggagccccagctggggcctgaggctgccgccctccgccctggctggctggccctgctgctgtgggtctcagccctgagctgttctttctccttgccagcttcttccctttcttctctggtgccccaagtcagaaccagctacaattttggaaggactttcctcggtcttgataaatgcaatgcctgcatcgggacatctatttgcaagaagttctttaaagaagaaataagatctgacaactggctggcttcccaccttggactgcctcccgattccttgctttcttatcctgcaaattactcagatgattccaaaatctggcgccctgtggagatctttagactggtcagcaaatatcaaaacgagatctcagacaggagaatctgtgcctctgcatcagccccaaagacctgcagcattgagcgtgtcctgcggaaaacagagaggttccagaaatggctgcaggccaagcgcctcacgccggacctggtgcaggactgtcaccagggccagagagaactaaagttcctgtgtatgctgagataacaccagtgaaaaagcctggcatggagcccagcactgagaacttccagaaagtgttagccttctcccaactgtgttataccaaccacattttcaaatagtaatcattaaagaggcttctgcatcaaaccttcacatgcagctcccatgccaccctccagaattcaccaacacacaggcccaccagcaacaggctacctttgcacaatattctctgatgacaactccaaagccccggctctttccaccacactgtggtcccctagatggggctgttgctgagcccaccccaatccagatgtgatccccctgtgatctacttctggcaagattctcagtctggacaggtcttccctatgagatagaacctgataaggagctagggcaattctgacaacattaccaaaggcccacataacttctaaattttggtctggtctgaaggaaaacctgttcttgccctagtgatggatgaactctcttatctctggcttctagagggaaaaaaaagcatacctcttttactttttaagtacctccatcagagtcatgaaatcacctgtcaagactatctatcttttatgtttccattctggtaagaactctttaaatgaggacactgctgattgctggtgatgttttttgagcaaacactcgggggtatggatgaaagccaatcgcaggtcaaatgactccttggggaagctacttctcctctattcagatttcactaaaatcttccaagatgaaagcaaatctagatttcggtcttcattgctgtccatttttgtaatgaacgagtgtttttcctttagctagtgtatcaggcagggttctaccagagaaacagaaccagtaggagatacatatacatgtccagatttatttcaaagaattgatttacatgattgtggggattggcaagtccaaaatccatatggtaggcctgcaatctgtaaacctttgggcaggagctgatgctgtagtttgcagatagaattccttgttccttaaaaaaatctgtttttgttcttaagggctttgaatgattggatcaggcccacccagattacctagataatctcttttacttaaagtaaactgattgtaggtgctaatcacatctatgaaatgccttcacagcaacacctagattagcattcaattgaataactggggaatacagcctagccaagttgacacataaaattaaccatcacagcaacatgcctgctaaattttatcgaccgtcttcagactgttaaggattgtggtagagaactgtgacagccactctcagcatcaccctgaaccaaaggcccctatcaagtaacaatatagccaagcaaaattccagtcaatagagacattgactggttggctggcttcccaagggatagcaccagacaagaaatgcaaggatgaggaaaccaggcacgggagagagaggggcaacagaggtccagggtttggttatctttttatttttcactgggaggtggtaagttagccctgttgcccatgtatgcagatgggagaagtgatttagaaactccaaagcaattggtaatccccaaaatgggtgtatctggtttgaaatgaaaccttattttattggaaatggttggtttcccaattctgtttgccattggccaatataattgtgggtttgcacatggccagcacatgccaaacagaagtagacaaaggtctcactctgtaagtgggaccttggggaggagctgcctccatcataaagggaggggttagtaaaaatggtctcttaagcctgttcctgctacagttatagaggttgctcagaaccttctcagcaaatatagcagttatctattgttgtgtattaaaccatttcaacacatagtggcttaaaa

SEQ ID NO: 216300 - DNA, 549 bp, Artificial Sequence
  derived and/or modified sequence
atggagccccagctgggccccgaggccgccgccctgcggcccggctggttggctttactcctgtgggtttccgccctctcatgctctttctctcttcctgcttcctctctcagctctctagttccacaggtccggactagctataacttcggaaggacgttcctcggcttagacaagtgcaatgcctgcatcggaacgtcaatatgcaagaagtttttcaaagaagagattcggtccgacaactggctggctagccacctgggtctgcctcccgattctctcttgagctacccagctaactactccgacgactcgaaaatttggcgccctgttgaaatttttcggctggtgtccaagtaccaaaatgagatttccgacaggagaatatgcgcctcagcgtccgctcccaagacgtgttctattgagcgggtgctacggaagactgagcgctttcagaagtggcttcaggctaagcggctgactccggatcttgtgcaggactgtcatcagggacagcgtgagctgaaatttctgtgcatgctccgctag

SEQ ID NO: 216301 - RNA, 549 nt, Artificial Sequence
  derived and/or modified sequence
auggagccgcaacugggaccugaagcugcugcacuucgacccggcugguuagcccuucuccucugggugucagcccugucaugcucuuucucacugcccgcgagcaguuuaaguucucuuguaccucaagugcgcacauccuacaacuuuggcaggaccuuccucggacuggauaaauguaaugcuugcauuggcaccucaaucuguaaaaaauucuuuaaggaggaaauacgauccgacaacuggcuggccucccaucuaggccucccucccgacucccuucucucauaccccgccaauuauucugacgauuccaaaauuuggcguccuguggaaaucuucagacuugugagcaaguaccaaaaugaaauaagcgaucguagaauuugugccuccgcuuccgcacccaagaccugcuccauugaaaggguguugaggaaaaccgagcgauuucagaaauggcuccaggccaaaagacugacgccagauuuaguucaagacugucaccagggacaaagggaacucaaauuccugugcaugcucagguag

SEQ ID NO: 216302 - RNA, 549 nt, Artificial Sequence
  derived and/or modified sequence
auggagccgcaacugggaccugaagcugcugcacuucgacccggcugguuagcccuucuccucugggugucagcccugucaugcucuuucucacugcccgcgagcaguuuaaguucucuuguaccucaagugcgcacauccuacaacuuuggcaggaccuuccucggacuggauaaauguaaugcuugcauuggcaccucaaucuguaaaaaauucuuuaaggaggaaauacgauccgacaacuggcuggccucccaucuaggccucccucccgacucccuucucucauaccccgccaauuauagcgaugacaguaaaauauggagacccgucgagaucuuuagguuggucucuaaauaccagaaugagaucagugauagaagaauaugcgccucggcuagcgcacccaaaacauguagcaucgagagaguacuuagaaagacagaacgauuucagaaguggcuccaagcaaaaagguugaccccagaccuuguccaggauugucaccagggccagcgagagcuaaaauuccugugcauguugagguag

SEQ ID NO: 216303 - protein, 1148 aa, Artificial Sequence
  derived and/or modified sequence
MPLFKNTSVSSLYSGCRLTLLRPEKDGAATRVDAVCTHRPDPKSPGLDRERLYWKLSQLTHGITELGPYTLDRHSLYVNGFTHQSSMTTTRTPDTSTMHLATSRTPASLSGPMTASPLLVLFTINFTITNLRYEENMHHPGSRKFNTTERVLQGLLRPVFKNTSVGPLYSGCRLTLLRPKKDGAATKVDAICTYRPDPKSPGLDREQLYWELSQLTHSITELGPYTLDRDSLYVNGFTQRSSVPTTSIPGTPTVDLGTSGTPVSKPGPSAASPLLVLFTLNFTITNLRYEENMQHPGSRKFNTTERVLQGLLRSLFKSTSVGPLYSGCRLTLLRPEKDGTATGVDAICTHHPDPKSPRLDREQLYWELSQLTHNITELGPYALDNDSLFVNGFTHRSSVSTTSTPGTPTVYLGASKTPASIFGPSAASHLLILFTLNFTITNLRYEENMWPGSRKFNTTERVLQGLLRPLFKNTSVGPLYSGCRLTLLRPEKDGEATGVDAICTHRPDPTGPGLDREQLYLELSQLTHSITELGPYTLDRDSLYVNGFTHRSSVPTTSTGVVSEEPFTLNFTINNLRYMADMGQPGSLKFNITDNVMQHLLSPLFQRSSLGARYTGCRVIALRSVKNGAETRVDLLCTYLQPLSGPGLPIKQVFHELSQQTHGITRLGPYSLDKDSLYLNGYNEPGPDEPPTTPKPATTFLPPLSEATTAMGYHLKTLTLNFTISNLQYSPDMGKGSATFNSTEGVLQHLLRPLFQKSSMGPFYLGCQLISLRPEKDGAATGVDTTCTYHPDPVGPGLDIQQLYWELSQLTHGVTQLGFYVLDRDSLFINGYAPQNLSIRGEYQINFHIVNWNLSNPDPTSSEYITLLRDIQDKVTTLYKGSQLHDTFRFCLVTNLTMDSVLVTVKALFSSNLDPSLVEQVFLDKTLNASFHWLGSTYQLVDIHVTEMESSVYQPTSSSSTQHFYLNFTITNLPYSQDKAQPGTTNYQRNKRNIEDALNQLFRNSSIKSYFSDCQVSTFRSVPNRHHTGVDSLCNFSPLARRVDRVAIYEEFLRMTRNGTQLQNFTLDRSSVLVDGYSPNRNEPLTGNSDLPFWAVILIGLAGLLGVITCLICGVLVTTRRRKKEGEYNVQQQCPGYYQSHLDLEDLQ

SEQ ID NO: 216304 - protein, 447 aa, Artificial Sequence
  derived and/or modified sequence
TAAGPLLVPFTLNFTITNLQYEEDMHHPGSRKFNTTERVLQGLLGPMFKNTSVGLLYSGCRLTLLRPEKNGAATGMDAICSHRLDPKSPGLNREQLYWELSQLTHGIKELGPYTLDRNSLYVNGFTHRSSVAPTSTPGTSTVDLGTSGTPSSLPSPTTAVPLLVPFTLNFTITNLQYGEDMRHPGSRKFNTTERVLQGLLGPLFKNSSVGPLYSGCRLISLRSEKDGAATGVDAICTHHLNPQSPGLDREQLYWQLSQMTNGIKELGPYTLDRNSLYVNGFTHRSSGLTTSTTGPLLVPFTLNFTITNLQYEENMGHPGSRKFNITESVLQGLLKPLFKSTSVGPLYSGCRLTLLRPEKDGVATRVDAICTHRPDPKIPGLDRQQLYWELSQLTHSITELGPYTLDRDSLYVNGFTQRSSVPTTSTPGTFTVQPETSETPSSLPGPT

SEQ ID NO: 216305 - DNA, 3447 bp, Artificial Sequence
  derived and/or modified sequence
atgcccctgttcaagaacaccagcgtgagcagcctgtacagcggctgcagactgaccctgctgagacccgagaaggacggcgccgccaccagagtggacgccgtgtgcacccacagacccgaccccaagagccccggcctggacagagagagactgtactggaagctgagccagctgacccacggcatcaccgagctgggcccctacaccctggacagacacagcctgtacgtgaacggcttcacccaccagagcagcatgaccaccaccagaacccccgacaccagcaccatgcacctggccaccagcagaacccccgccagcctgagcggccccatgaccgccagccccctgctggtgctgttcaccatcaacttcaccatcaccaacctgagatacgaggagaacatgcaccaccccggcagcagaaagttcaacaccaccgagagagtgctgcagggcctgctgagacccgtgttcaagaacaccagcgtgggccccctgtacagcggctgcagactgaccctgctgagacccaagaaggacggcgccgccaccaaggtggacgccatctgcacctacagacccgaccccaagagccccggcctggacagagagcagctgtactgggagctgagccagctgacccacagcatcaccgagctgggcccctacaccctggacagagacagcctgtacgtgaacggcttcacccagagaagcagcgtgcccaccaccagcatccccggcacccccaccgtggacctgggcaccagcggcacccccgtgagcaagcccggccccagcgccgccagccccctgctggtgctgttcaccctgaacttcaccatcaccaacctgagatacgaggagaacatgcagcaccccggcagcagaaagttcaacaccaccgagagagtgctgcagggcctgctgagaagcctgttcaagagcaccagcgtgggccccctgtacagcggctgcagactgaccctgctgagacccgagaaggacggcaccgccaccggcgtggacgccatctgcacccaccaccccgaccccaagagccccagactggacagagagcagctgtactgggagctgagccagctgacccacaacatcaccgagctgggcccctacgccctggacaacgacagcctgttcgtgaacggcttcacccacagaagcagcgtgagcaccaccagcacccccggcacccccaccgtgtacctgggcgccagcaagacccccgccagcatcttcggccccagcgccgccagccacctgctgatcctgttcaccctgaacttcaccatcaccaacctgagatacgaggagaacatgtggcccggcagcagaaagttcaacaccaccgagagagtgctgcagggcctgctgagacccctgttcaagaacaccagcgtgggccccctgtacagcggctgcagactgaccctgctgagacccgagaaggacggcgaggccaccggcgtggacgccatctgcacccacagacccgaccccaccggccccggcctggacagagagcagctgtacctggagctgagccagctgacccacagcatcaccgagctgggcccctacaccctggacagagacagcctgtacgtgaacggcttcacccacagaagcagcgtgcccaccaccagcaccggcgtggtgagcgaggagcccttcaccctgaacttcaccatcaacaacctgagatacatggccgacatgggccagcccggcagcctgaagttcaacatcaccgacaacgtgatgcagcacctgctgagccccctgttccagagaagcagcctgggcgccagatacaccggctgcagagtgatcgccctgagaagcgtgaagaacggcgccgagaccagagtggacctgctgtgcacctacctgcagcccctgagcggccccggcctgcccatcaagcaggtgttccacgagctgagccagcagacccacggcatcaccagactgggcccctacagcctggacaaggacagcctgtacctgaacggctacaacgagcccggccccgacgagccccccaccacccccaagcccgccaccaccttcctgccccccctgagcgaggccaccaccgccatgggctaccacctgaagaccctgaccctgaacttcaccatcagcaacctgcagtacagccccgacatgggcaagggcagcgccaccttcaacagcaccgagggcgtgctgcagcacctgctgagacccctgttccagaagagcagcatgggccccttctacctgggctgccagctgatcagcctgagacccgagaaggacggcgccgccaccggcgtggacaccacctgcacctaccaccccgaccccgtgggccccggcctggacatccagcagctgtactgggagctgagccagctgacccacggcgtgacccagctgggcttctacgtgctggacagagacagcctgttcatcaacggctacgccccccagaacctgagcatcagaggcgagtaccagatcaacttccacatcgtgaactggaacctgagcaaccccgaccccaccagcagcgagtacatcaccctgctgagagacatccaggacaaggtgaccaccctgtacaagggcagccagctgcacgacaccttcagattctgcctggtgaccaacctgaccatggacagcgtgctggtgaccgtgaaggccctgttcagcagcaacctggaccccagcctggtggagcaggtgttcctggacaagaccctgaacgccagcttccactggctgggcagcacctaccagctggtggacatccacgtgaccgagatggagagcagcgtgtaccagcccaccagcagcagcagcacccagcacttctacctgaacttcaccatcaccaacctgccctacagccaggacaaggcccagcccggcaccaccaactaccagagaaacaagagaaacatcgaggacgccctgaaccagctgttcagaaacagcagcatcaagagctacttcagcgactgccaggtgagcaccttcagaagcgtgcccaacagacaccacaccggcgtggacagcctgtgcaacttcagccccctggccagaagagtggacagagtggccatctacgaggagttcctgagaatgaccagaaacggcacccagctgcagaacttcaccctggacagaagcagcgtgctggtggacggctacagccccaacagaaacgagcccctgaccggcaacagcgacctgcccttctgggccgtgatcctgatcggcctggccggcctgctgggcgtgatcacctgcctgatctgcggcgtgctggtgaccaccagaagaagaaagaaggagggcgagtacaacgtgcagcagcagtgccccggctactaccagagccacctggacctggaggacctgcagtag

SEQ ID NO: 216306 - DNA, 1344 bp, Artificial Sequence
  derived and/or modified sequence
accgccgccggccccctgctggtgcccttcaccctgaacttcaccatcaccaacctgcagtacgaggaggacatgcaccaccccggcagcagaaagttcaacaccaccgagagagtgctgcagggcctgctgggccccatgttcaagaacaccagcgtgggcctgctgtacagcggctgcagactgaccctgctgagacccgagaagaacggcgccgccaccggcatggacgccatctgcagccacagactggaccccaagagccccggcctgaacagagagcagctgtactgggagctgagccagctgacccacggcatcaaggagctgggcccctacaccctggacagaaacagcctgtacgtgaacggcttcacccacagaagcagcgtggcccccaccagcacccccggcaccagcaccgtggacctgggcaccagcggcacccccagcagcctgcccagccccaccaccgccgtgcccctgctggtgcccttcaccctgaacttcaccatcaccaacctgcagtacggcgaggacatgagacaccccggcagcagaaagttcaacaccaccgagagagtgctgcagggcctgctgggccccctgttcaagaacagcagcgtgggccccctgtacagcggctgcagactgatcagcctgagaagcgagaaggacggcgccgccaccggcgtggacgccatctgcacccaccacctgaacccccagagccccggcctggacagagagcagctgtactggcagctgagccagatgaccaacggcatcaaggagctgggcccctacaccctggacagaaacagcctgtacgtgaacggcttcacccacagaagcagcggcctgaccaccagcaccaccggccccctgctggtgcccttcaccctgaacttcaccatcaccaacctgcagtacgaggagaacatgggccaccccggcagcagaaagttcaacatcaccgagagcgtgctgcagggcctgctgaagcccctgttcaagagcaccagcgtgggccccctgtacagcggctgcagactgaccctgctgagacccgagaaggacggcgtggccaccagagtggacgccatctgcacccacagacccgaccccaagatccccggcctggacagacagcagctgtactgggagctgagccagctgacccacagcatcaccgagctgggcccctacaccctggacagagacagcctgtacgtgaacggcttcacccagagaagcagcgtgcccaccaccagcacccccggcaccttcaccgtgcagcccgagaccagcgagacccccagcagcctgcccggccccacctag

SEQ ID NO: 216307 - DNA, 3447 bp, Artificial Sequence
  derived and/or modified sequence
atgccactgtttaagaatacttctgtttctagtttatacagcgggtgcaggcttactctcctgcgaccagaaaaggacggcgcggccacccgggtcgacgccgtgtgtacacatcgacccgacccgaagtcccctggcctggaccgtgagcggctttactggaagctgtcacagctgacccacggaatcaccgaactcggaccttatacgcttgatcgacatagcctatacgtgaacggtttcacccaccagagctcaatgacgactacaaggactcctgatacctctacaatgcacctcgcaacctccagaaccccagcttccctttccggccctatgaccgccagcccccttttagttcttttcacaatcaacttcaccattaccaatctgcggtacgaagaaaacatgcaccacccggggtctcggaagtttaacactaccgaacgggttctgcaaggtctcctgaggccagtctttaagaacacatccgttgggccgctgtacagcggttgcagactcaccctcctgcgacccaaaaaggacggcgctgccactaaagttgatgcaatttgcacttacagacccgatcctaagtctccagggttagacagagaacagctatactgggaactatcgcagctcactcattcgatcactgagctaggcccttacactctggacagggattccctgtatgtcaatggtttcacgcaacggtcatccgtccctaccacaagcatccccgggacacctaccgtcgatcttggaacctccggtacccccgtgtccaagccaggtccaagtgccgcctcacccctcctagtgttgttcacgttaaatttcacaattaccaacctgcgttatgaggagaacatgcagcatccagggtctaggaaattcaataccacagagagggtgcttcagggcctactgcgcagcctattcaagagtacaagcgtgggccctctctacagcggatgtcgcttgaccctactgcggccggagaaggatggaactgccacaggagttgacgcaatttgcactcaccacccagatccgaagagcccccgattggatagagagcagctatattgggaactttctcagctgacgcataacatcaccgagttaggaccgtatgctcttgataacgacagcctgttcgtcaacggatttacacaccggagctcagtgagcactacgtctacaccgggtacacccactgtgtacttaggggcatccaaaactcccgcttccattttcggtccttcagccgcctcccaccttttgatcttgtttacattgaacttcacgattacaaatctgcggtatgaggaaaacatgtggcccggcagccgaaaattcaacactacagagagagttctccagggcctcttgcggccattgttcaagaacacgtccgtgggccccttgtatagtggatgccgcttgacccttcttaggccggagaaggacggggaagcaacaggagtggacgccatttgcacccaccggcccgatcccaccggcccaggcttagaccgggagcagctgtacctcgaattgagccaacttactcatagcattacagagctcggcccctacactttggaccgagacagcctgtacgtcaacgggttcactcacaggagcagcgttccaaccacatctacaggtgtggtgtcggaagaaccattcacactgaactttacgatcaataacctccggtatatggcggacatgggccaacccggaagtttgaaattcaacataacagacaacgttatgcaacatttattgagccccctgttccaaaggtcttcactaggagcacgttatacgggctgcagagtcatcgctctgagatcagtgaaaaacggagctgaaacccgggtggatctactgtgtacctatcttcaacccttgagcgggcctgggctcccaatcaaacaggtcttccatgagctgagccaacaaacgcacggcattaccagacttgggccgtactctctggataaagacagcctgtatctcaacggctacaacgagcccggccctgatgaacctcctaccactcccaaacccgccaccaccttcctcccaccactttccgaggccactactgccatgggctatcaccttaagacattgaccctcaacttcacaatctccaatctccagtatagcccagatatgggtaagggaagcgcgacatttaactcaacggagggcgtcctgcagcacctgctgcgccccctgttccagaagagttctatggggccattttatctcgggtgtcaactgatctctttgagacccgaaaaagatggggccgccaccggggtcgatactacctgtacttaccaccctgaccccgtaggaccggggttggacatccagcagctttattgggagctgagccagctgactcacggggtcacccagctgggtttctacgtgcttgaccgcgattccctcttcatcaatgggtatgcgccccaaaaccttagtattcgaggcgaataccagatcaacttccacatcgtgaattggaacctgagcaatcccgatcctaccagctccgaatatatcactctcctaagagatattcaggataaagtgaccaccctgtataagggcagtcagctccacgatactttccgcttctgccttgttaccaacttaaccatggattccgttcttgtcacagtgaaggcgctgttcagcagcaatcttgatcctagtttagtggaacaggtctttctggataagactctgaacgcaagctttcactggctggggagtacataccaactggttgacattcatgtaactgaaatggagagcagcgtctatcaacctacctctagtagttccacacaacacttctacctgaacttcacaatcacaaatctgccttacagccaagataaggctcagcctggcaccactaactatcagcgaaataagcgaaacattgaggatgctctgaatcagttattccggaactcttcgatcaagtcctacttttctgactgtcaagtgagtacattcaggtctgtgccgaatcgacaccataccggtgtggactccctctgtaatttctcccctttggccagacgggtcgatcgagtggccatctatgaggaatttctcagaatgactcgaaacggtacgcagctacagaacttcaccttagataggagctcagtgcttgtggacggatactccccaaataggaatgagcctttgacaggaaattctgacctgcccttctgggccgtgatcctgatcggactggccggtcttctcggagtcattacctgcctcatctgtggggtgctagtcacaacaagacggaggaagaaagagggtgaatacaacgtccagcagcaatgtcccgggtattatcagtctcacctggatcttgaagatctgcaatag

SEQ ID NO: 216308 - DNA, 1344 bp, Artificial Sequence
  derived and/or modified sequence
accgcagctggcccccttttggttccatttactctgaatttcaccattacaaacctccaatatgaagaagacatgcaccaccccggatctcggaagttcaacacaactgagagggtgttgcagggccttttaggccccatgtttaaaaacacttccgttggcttactctactccgggtgtcgcttgaccctgctgcggcccgaaaaaaacggagccgcaactggcatggacgcaatctgtagccacaggctggacccaaaatcacccggactgaacagggaacagctctattgggagctcagccagttaacccacggcattaaagaactcggcccgtataccctcgatagaaatagcctctacgtgaacggttttacacatagaagcagtgttgctcctacctcaacccccggcacctcgaccgtggacctggggacatccggaacaccgtcttccctgccaagccctaccacagcagtccctctattagtgccattcaccctcaattttacaatcaccaatctgcagtatggggaggacatgcgccatcccggatcccggaagttcaataccacagagagagtgctgcaggggctgctcgggccgctgtttaaaaactctagtgtaggtccactgtatagcgggtgccgcttaatttccctcaggtctgaaaaagatggggccgcaactggagtggacgcgatttgcactcaccacctgaatccacaaagtccaggcctggaccgggagcagctttattggcaactatctcagatgactaatggcattaaagaactaggaccgtatactctagacaggaattcactatacgtcaacgggtttactcaccggtccagcggcctaaccacctccacaactggccctctgctggttcccttcactcttaacttcacaatcactaatctgcagtacgaagagaacatgggtcaccccggttctcgcaaatttaacattactgagtctgtgttacaaggcctgctgaagcctctgttcaagtcaacctccgtcggtcctctgtactctggctgcagactgaccctgctgagaccggagaaggatggtgtcgctacccgcgtcgacgcgatctgtacccaccggccagatccaaaaataccagggcttgataggcagcagctctattgggaactttcacagctcacccattctattaccgagctgggcccttacacccttgatcgggactctctgtacgtaaatggtttcacccaacggtcatccgtcccgacgacttctacgcctgggaccttcactgtgcagcccgagacgagtgaaactcccagctccctgccaggcccaacgtag

SEQ ID NO: 216309 - DNA, 3447 bp, Artificial Sequence
  derived and/or modified sequence
atgcccctcttcaagaacacctctgtgagcagcctgtacagcggctgccgcctgaccctgctgcggcctgagaaggatggagctgccaccagggtggatgctgtgtgcacccacaggccagaccccaagagccctggcctggaccgggagcggctgtactggaagctgagccagctgacccacggcatcacagagctgggcccctacaccctggacagacacagcctgtatgtgaatggcttcacccaccagagctccatgaccaccaccaggaccccagacaccagcaccatgcacctggccaccagcaggaccccagccagcctgagcggccccatgacagccagccccctgctggtgctcttcaccatcaacttcaccatcaccaacctgcgctatgaggagaacatgcaccaccctggcagcaggaagttcaacaccacagagcgggtgctgcagggcctgctgcggcctgtgttcaagaacacctctgtgggccccctgtacagcggctgccgcctgaccctgctgcggcccaagaaggatggagctgccaccaaggtggatgccatctgcacctacagaccagaccccaagagccctggcctggaccgggagcagctgtactgggagctgagccagctgacccacagcatcacagagctgggcccctacaccctggaccgggacagcctgtatgtgaatggcttcacccagaggagctctgtgcccaccaccagcatccctggcacccccaccgtggacctgggcaccagcggcacccctgtgtccaagccaggccccagcgctgccagccccctgctggtgctcttcaccctgaacttcaccatcaccaacctgcgctatgaggagaacatgcagcaccctggcagcaggaagttcaacaccacagagcgggtgctgcagggcctgctgcggagcctcttcaagagcacctctgtgggccccctgtacagcggctgccgcctgaccctgctgcggcctgagaaggatggaacagccaccggggtggatgccatctgcacccaccacccagaccccaagagcccccggctggaccgggagcagctgtactgggagctgagccagctgacccacaacatcacagagctgggcccctatgccctggacaatgacagcctgtttgtgaatggcttcacccacaggagctctgtgtccaccaccagcaccccaggcacccccaccgtgtacctgggcgccagcaagaccccagccagcatcttcggccccagcgctgccagccacctgctgatcctcttcaccctgaacttcaccatcaccaacctgcgctatgaggagaacatgtggccaggcagcaggaagttcaacaccacagagcgggtgctgcagggcctgctgcggcccctcttcaagaacacctctgtgggccccctgtacagcggctgccgcctgaccctgctgcggcctgagaaggatggagaggccactggagtggatgccatctgcacccacaggccagaccccaccggccctggcctggaccgggagcagctgtacctggagctgagccagctgacccacagcatcacagagctgggcccctacaccctggaccgggacagcctgtatgtgaatggcttcacccacaggagctctgtgcccaccaccagcactggagtggtgtctgaggagcccttcaccctgaacttcaccatcaacaacctgcgctacatggctgacatgggccagcccggcagcctgaagttcaacatcacagacaacgtgatgcagcacctgctgagccccctcttccagaggagcagcctgggcgcccgctacacaggctgcagggtcatcgccctgcggtctgtgaagaatggagctgagaccagggtggacctgctgtgcacctacctgcagcccctgagcggccctggcctgcccatcaagcaggtgttccacgagctgagccagcagacccacggcatcacccggctgggcccctacagcctggacaaggacagcctgtacctgaatggctacaatgaacctggcccagatgagccccccaccacccccaagccagccaccaccttcctgccccccctgtctgaggccaccacagccatgggctaccacctgaagaccctgaccctgaacttcaccatcagcaacctgcagtacagcccagacatgggcaaaggaagtgccaccttcaacagcacagaaggagtgctgcagcacctgctgcggcccctcttccagaagagctccatgggccccttctacctgggctgccagctgatcagcctgcggcctgagaaggatggagctgccactggagtggacaccacctgcacctaccacccagaccctgtgggccctggcctggacatccagcagctgtactgggagctgagccagctgacccacggcgtgacccagctgggcttctacgtgctggaccgggacagcctcttcatcaatggctacgccccccagaacctgagcatccggggggagtaccagatcaacttccacatcgtgaactggaacctgagcaacccagaccccaccagcagcgagtacatcaccctgctgcgggacatccaggacaaggtgaccaccctgtacaagggcagccagctgcatgacaccttccgcttctgcctggtgaccaacctgaccatggacagcgtgctggtgacagtgaaggccctcttcagcagcaacctggaccccagcctggtggagcaggtgttcctggacaagaccctgaatgccagcttccactggctgggcagcacctaccagctggtggacatccacgtgacagagatggagagctctgtgtaccagcccaccagcagcagcagcacccagcacttctacctgaacttcaccatcaccaacctgccctacagccaggacaaggcccagcccggcaccaccaactaccagaggaacaagaggaacattgaagatgccctgaaccagctgttcaggaacagcagcatcaagagctacttcagtgactgccaggtgtccaccttccgctctgtgcccaacagacaccacactggagtggacagcctgtgcaacttcagccccctggccaggagagtggacagagtggccatctatgaggagttcctgaggatgaccagaaatggcacccagctgcagaacttcaccctggacaggagctctgtgctggtggatggctacagccccaacagaaatgagcccctgaccggcaacagcgacctgcccttctgggccgtcatcctgattggcctggccggcctgctgggcgtcatcacctgcctgatctgtggggtgctggtgaccaccaggaggaggaagaaggagggggagtacaacgtgcagcagcagtgccccggctactaccagagccacctggacctggaggacctgcagtag

SEQ ID NO: 216310 - DNA, 1344 bp, Artificial Sequence
  derived and/or modified sequence
acagctgctggccccctgctggtgcccttcaccctgaacttcaccatcaccaacctgcagtatgaggaggacatgcaccaccctggcagcaggaagttcaacaccacagagcgggtgctgcagggcctgctgggccccatgttcaagaacacctctgtgggcctgctgtacagcggctgccgcctgaccctgctgcggcctgagaagaatggagctgccaccggcatggatgccatctgcagccaccggctggaccccaagagccctggcctgaaccgggagcagctgtactgggagctgagccagctgacccacggcatcaaggagctgggcccctacaccctggacaggaacagcctgtatgtgaatggcttcacccacaggagctctgtggcccccaccagcaccccaggcaccagcacagtggacctgggcaccagcggcacccccagcagcctgcccagccccaccacagctgtgcccctgctggtgcccttcaccctgaacttcaccatcaccaacctgcagtatggagaggacatgaggcaccctggcagcaggaagttcaacaccacagagcgggtgctgcagggcctgctgggccccctcttcaagaacagctctgtgggccccctgtacagcggctgccgcctcatcagcctgcggtctgagaaggatggagctgccaccggggtggatgccatctgcacccaccacctgaacccccagagccctggcctggaccgggagcagctgtactggcagctgagccagatgaccaacggcatcaaggagctgggcccctacaccctggacaggaacagcctgtatgtgaatggcttcacccacaggagcagcggcctgaccaccagcaccaccggccccctgctggtgcccttcaccctgaacttcaccatcaccaacctgcagtatgaggagaacatgggccaccctggcagcaggaagttcaacatcacagagagcgtgctgcagggcctgctgaagcccctcttcaagagcacctctgtgggccccctgtacagcggctgccgcctgaccctgctgcggcctgagaaggatggagtggccaccagggtggatgccatctgcacccacaggccagaccccaagatccctggcctggaccggcagcagctgtactgggagctgagccagctgacccacagcatcacagagctgggcccctacaccctggaccgggacagcctgtatgtgaatggcttcacccagaggagctctgtgcccaccaccagcaccccaggcaccttcaccgtgcagcctgagaccagcgagacccccagcagcctgcccggccccacctag

SEQ ID NO: 216311 - DNA, 3447 bp, Artificial Sequence
  derived and/or modified sequence
atgcccctgttcaagaacaccagcgtgagcagcctgtacagcggctgtagactgaccctgcttagaccagagaaagacggcgctgcaacaagggtggacgccgtgtgcacccacagacctgatcccaagagccctggcttggacagagagaggctgtactggaagttgtcccagctcacgcacgggattactgaacttggaccttacactctggataggcacagcttgtatgttaacggcttcacacaccagtcctcaatgaccacaaccagaacacccgatacctccactatgcatctggccactagtcgtacacccgccagtttgtctgggcccatgacagccagccccctcttggtgctctttactattaacttcactatcaccaacctgcgttacgaagaaaatatgcatcatcccgggagccgaaaatttaacacaaccgaaagagtcctacaaggcctcctgagaccagtttttaagaacacatccgttggccccctgtactccggatgcagactgaccctgcttcgcccaaagaaggacggcgctgccacaaaagtggacgcaatctgtacctataggcctgaccctaagagcccgggtcttgaccgcgagcagttatattgggaactgtctcagctaacacactcaataacagagctgggcccatacacacttgacagagatagcctgtacgtgaacggcttcactcagcgatcctccgtccctacgacatccatccctgggactcctactgttgacttgggcaccagcggcactcctgtaagcaagccaggacccagcgctgccagccccttattggtattgttcactctcaacttcactatcactaatctcaggtatgaagagaatatgcagcaccccgggtcgagaaagttcaatactacggaacgcgtgcttcaagggcttctgcgatcactgttcaaaagcacctctgtaggccctctctacagcggctgtagacttacgctcctccgccctgagaaagacggcactgcaacaggcgtcgacgccatttgtacacaccaccccgatcctaagagcccacggcttgacagagagcagctgtattgggaattgagccagctcacgcataatattaccgagctggggccatatgcgctggacaacgattcgctgtttgtcaatggctttactcatcggtcctctgtctctaccacatcaacccctggcacccctactgtgtacctaggcgctagcaagacgcccgcctctatctttgggccgtcagccgccagtcatctgctgatcctgttcacccttaattttaccattaccaatctgcgatacgaagagaatatgtggcctggaagcagaaagtttaatacaaccgagagagttttgcaggggctgctgaggccactctttaagaatacatcggtgggaccactgtacagtggatgcaggctcaccctactgaggcctgagaaggacggcgaggcaaccggcgtggacgctatctgcacccaccggcccgatcccacagggcccggcctcgatcgggagcaactctacttggaactgtctcagttaactcattctatcactgagcttggcccttacacactcgatagggatagcttatacgtcaacggctttacacacaggtcttctgtcccgacaacgtcgactggcgtagtgagcgaggagccctttaccctgaacttcacaattaataatctccgctatatggccgatatgggacaacccggtagcctgaagttcaacattacagataacgtaatgcagcatctcctcagcccactgttccagcgcagctccttaggggcccggtacacaggatgccgggtgatagccttacgaagcgtgaaaaatggcgctgagacccgggtggatctactttgtacctatctgcaacctctgtctggcccaggcctgcccattaaacaggtgttccatgagctctcacagcaaacgcatgggattacgcgacttgggccctactctttggataaggactctctgtatctcaatggttataacgagccgggccccgacgaaccgcccaccacaccaaagcccgcaacaacgttcctgccacccttatcggaagctacaacagccatgggataccatctgaagaccctgacactgaacttcaccatcagtaatctgcagtatagccccgatatgggaaagggatcggccactttcaactccacagaaggcgtcctccaacatttgctacggccgctgttccagaagtcgtctatgggacccttctacctcgggtgtcagcttatcagcctccgccctgaaaaagatggagcggctaccggggtggatactacttgcacctaccacccggaccccgttggaccaggactggacatccaacagctgtattgggaactgagtcagctgacgcacggcgttacacaactaggattctacgtcttagaccgcgactcgctgtttattaatggctacgcaccccaaaatcttagtatacgtggcgaataccagatcaacttccacatagttaactggaatctgagtaatccggaccccactagttctgagtacattacactgctcagagatatccaggataaggtcaccactctgtacaaagggtcgcagctacacgacactttccggttttgtctagtgacaaatttgactatggactcagtacttgtaacagttaaagccttgttcagcagcaatctggatccaagtctggtggagcaggtctttcttgacaaaaccctgaatgcctcttttcactggctaggttctacctaccagctggtggatatccacgttaccgagatggagagctctgtgtaccaaccaacctctagctcatcaacccagcatttctacctgaatttcaccatcacaaatcttccatattctcaggacaaggcccagccaggtaccacaaactatcagcgcaacaagaggaatatcgaggatgctcttaatcaactgtttcgaaactcaagtatcaagtcttacttcagcgactgccaggtgtcgacatttcgcagcgtaccgaacaggcatcacaccggtgtggacagcctgtgtaacttttccccattggctcgccgggttgaccgcgttgctatctacgaagagttccttaggatgacaaggaacggcacacagctgcagaacttcactttggatcgctcatccgtgcttgtagatggatattccccaaaccggaacgaacccctgactgggaacagcgatctccccttttgggccgtgattctgatcggcctggccggtctgctgggggtcattacatgcctgatttgtggagttctcgttactacgaggcgtcgtaaaaaggagggagaatataatgtccaacagcagtgtcccggatactatcagtcacaccttgatcttgaggatctgcagtag

SEQ ID NO: 216312 - DNA, 1344 bp, Artificial Sequence
  derived and/or modified sequence
accgccgccggccccctgctggtgcccttcaccctgaacttcaccataaccaatttgcagtacgaagaagacatgcaccacccagggtcgcggaaattcaataccacggaaagagttctacagggtctgctgggccccatgtttaagaacacgtctgtgggcttgttatacagtggctgcaggctgaccctgctgcggccagaaaagaatggtgcggcgaccgggatggatgccatctgttctcaccgtctggacccgaaatcccccgggctgaaccgggagcagctgtactgggaactgtcccaattgactcacggcatcaaggaactgggaccgtacacattggaccggaatagcctgtacgttaacgggttcacccacaggtccagcgtggccccaacctctacgcccggcaccagcaccgtggatttgggcacaagtggcacacctagtagtctcccctcaccgaccactgctgtaccccttttggttccattcacccttaactttaccattacaaacctgcagtatggcgaggacatgagacatcctgggtcgaggaagttcaatactactgagcgagttttgcaaggtttgctgggtcctctttttaaaaacagtagcgtgggcccattgtacagtggctgtaggctcattagtctccggtccgaaaaggacggggctgcgacgggcgtcgacgccatctgtacacatcacctcaacccccaaagccctggtctggacagggagcagctgtactggcaactgagccaaatgaccaacggcatcaaggagctgggaccatacactttagacagaaacagcttatacgtcaacggatttacccaccggagctcgggcctgactacaagcacgacagggcccttgctggtgcctttcacactaaattttaccatcacaaatctccaatacgaggaaaacatgggacacccagggagcaggaaattcaatattacggagtcagtactccagggattactgaaaccattgtttaagagcacctctgttggacccctctactccgggtgccgtctgacactcctgcggccagaaaaagatggagtcgcaacacgggtggacgcaatctgtacgcaccgccccgatccaaaaatccctggactggataggcaacaattgtattgggagttgagccaactaacacacagcattacggagctgggaccatacacattggaccgtgacagtctctacgttaatggattcacacagagatcttccgtgcccactactagcacgcctggcacttttacagtgcaaccagagacatcagagactccctcttccctgccaggccccacctag

SEQ ID NO: 216313 - DNA, 3557 bp, Artificial Sequence
  derived and/or modified sequence
gagagggtccttcagggtctgcttatgcccttgttcaagaacaccagtgtcagctctctgtactctggttgcagactgaccttgctcaggcctgagaaggatggggcagccaccagagtggatgctgtctgcacccatcgtcctgaccccaaaagccctggactggacagagagcggctgtactggaagctgagccagctgacccacggcatcactgagctgggcccctacaccctggacaggcacagtctctatgtcaatggtttcacccatcagagctctatgacgaccaccagaactcctgatacctccacaatgcacctggcaacctcgagaactccagcctccctgtctggacccatgaccgccagccctctcctggtgctattcacaattaacttcaccatcactaacctgcggtatgaggagaacatgcatcaccctggctctagaaagtttaacaccacggagagagtccttcagggtctgctcaggcctgtgttcaagaacaccagtgttggccctctgtactctggctgcagactgaccttgctcaggcccaagaaggatggggcagccaccaaagtggatgccatctgcacctaccgccctgatcccaaaagccctggactggacagagagcagctatactgggagctgagccagctgacccacagcatcactgagctgggcccctacaccctggacagggacagtctctatgtcaatggtttcacacagcggagctctgtgcccaccactagcattcctgggacccccacagtggacctgggaacatctgggactccagtttctaaacctggtccctcggctgccagccctctcctggtgctattcactctcaacttcaccatcaccaacctgcggtatgaggagaacatgcagcaccctggctccaggaagttcaacaccacggagagggtccttcagggcctgctcaggtccctgttcaagagcaccagtgttggccctctgtactctggctgcagactgactttgctcaggcctgaaaaggatgggacagccactggagtggatgccatctgcacccaccaccctgaccccaaaagccctaggctggacagagagcagctgtattgggagctgagccagctgacccacaatatcactgagctgggcccctatgccctggacaacgacagcctctttgtcaatggtttcactcatcggagctctgtgtccaccaccagcactcctgggacccccacagtgtatctgggagcatctaagactccagcctcgatatttggcccttcagctgccagccatctcctgatactattcaccctcaacttcaccatcactaacctgcggtatgaggagaacatgtggcctggctccaggaagttcaacactacagagagggtccttcagggcctgctaaggcccttgttcaagaacaccagtgttggccctctgtactctggctgcaggctgaccttgctcaggccagagaaagatggggaagccaccggagtggatgccatctgcacccaccgccctgaccccacaggccctgggctggacagagagcagctgtatttggagctgagccagctgacccacagcatcactgagctgggcccctacacactggacagggacagtctctatgtcaatggtttcacccatcggagctctgtacccaccaccagcaccggggtggtcagcgaggagccattcacactgaacttcaccatcaacaacctgcgctacatggcggacatgggccaacccggctccctcaagttcaacatcacagacaacgtcatgcagcacctgctcagtcctttgttccagaggagcagcctgggtgcacggtacacaggctgcagggtcatcgcactaaggtctgtgaagaacggtgctgagacacgggtggacctcctctgcacctacctgcagcccctcagcggcccaggtctgcctatcaagcaggtgttccatgagctgagccagcagacccatggcatcacccggctgggcccctactctctggacaaagacagcctctaccttaacggttacaatgaacctggtccagatgagcctcctacaactcccaagccagccaccacattcctgcctcctctgtcagaagccacaacagccatggggtaccacctgaagaccctcacactcaacttcaccatctccaatctccagtattcaccagatatgggcaagggctcagctacattcaactccaccgagggggtccttcagcacctgctcagacccttgttccagaagagcagcatgggccccttctacttgggttgccaactgatctccctcaggcctgagaaggatggggcagccactggtgtggacaccacctgcacctaccaccctgaccctgtgggccccgggctggacatacagcagctttactgggagctgagtcagctgacccatggtgtcacccaactgggcttctatgtcctggacagggatagcctcttcatcaatggctatgcaccccagaatttatcaatccggggcgagtaccagataaatttccacattgtcaactggaacctcagtaatccagaccccacatcctcagagtacatcaccctgctgagggacatccaggacaaggtcaccacactctacaaaggcagtcaactacatgacacattccgcttctgcctggtcaccaacttgacgatggactccgtgttggtcactgtcaaggcattgttctcctccaatttggaccccagcctggtggagcaagtctttctagataagaccctgaatgcctcattccattggctgggctccacctaccagttggtggacatccatgtgacagaaatggagtcatcagtttatcaaccaacaagcagctccagcacccagcacttctacctgaatttcaccatcaccaacctaccatattcccaggacaaagcccagccaggcaccaccaattaccagaggaacaaaaggaatattgaggatgcgctcaaccaactcttccgaaacagcagcatcaagagttatttttctgactgtcaagtttcaacattcaggtctgtccccaacaggcaccacaccggggtggactccctgtgtaacttctcgccactggctcggagagtagacagagttgccatctatgaggaatttctgcggatgacccggaatggtacccagctgcagaacttcaccctggacaggagcagtgtccttgtggatgggtattctcccaacagaaatgagcccttaactgggaattctgaccttcccttctgggctgtcatcctcatcggcttggcaggactcctgggagtcatcacatgcctgatctgcggtgtcctggtgaccacccgccggcggaagaaggaaggagaatacaacgtccagcaacagtgcccaggctactaccagtcacacctagacctggaggatctgcaatgactggaacttgccggtgcctggggtgcctttcccccagccagggtccaaagaagcttggctggggcagaaataaaccatattggtcg

SEQ ID NO: 216314 - DNA, 32753 bp, Artificial Sequence
  derived and/or modified sequence
aagcgttgcacaattcccccaacctccatacatacggcagctcttctagacacaggttttcccaggtcaaatgcggggaccccagccatatctcccaccctgagaaattttggagtttcagggagctcagaagctctgcagaggccaccctctctgaggggattcttcttagacctccatccagaggcaaatgttgacctgtccatgctgaaaccctcaggccttcctgggtcatcttctcccacccgctccttgatgacagggagcaggagcactaaagccacaccagaaatggattcaggactgacaggagccaccttgtcacctaagacatctacaggtgcaatcgtggtgacagaacatactctgccctttacttccccagataagaccttggccagtcctacatcttcggttgtgggaagaaccacccagtctttgggggtgatgtcctctgctctccctgagtcaacctctagaggaatgacacactccgagcaaagaaccagcccatcgctgagtccccaggtcaatggaactccctctaggaactaccctgctacaagcatggtttcaggattgagttccccaaggaccaggaccagttccacagaaggaaattttaccaaagaagcatctacatacacactcactgtagagaccacaagtggcccagtcactgagaagtacacagtccccactgagacctcaacaactgaaggtgacagcacagagaccccctgggacacaagatatattcctgtaaaaatcacatctccaatgaaaacatttgcagattcaactgcatccaaggaaaatgccccagtgtctatgactccagctgagaccacagttactgactcacatactccaggaaggacaaacccatcatttgggacactttattcttccttccttgacctatcacctaaagggaccccaaattccagaggtgaaacaagcctggaactgattctatcaaccactggatatcccttctcctctcctgaacctggctctgcaggacacagcagaataagtaccagtgcgcctttgtcatcatctgcttcagttctcgataataaaatatcagagaccagcatattctcaggccagagtctcacctcccctctgtctcctggggtgcccgaggccagagccagcacaatgcccaactcagctatccctttttccatgacactaagcaatgcagaaacaagtgccgaaagggtcagaagcacaatttcctctctggggactccatcaatatccacaaagcagacagcagagactatccttaccttccatgccttcgctgagaccatggatatacccagcacccacatagccaagactttggcttcagaatggttgggaagtccaggtacccttggtggcaccagcacttcagcgctgacaaccacatctccatctaccactttagtctcagaggagaccaacacccatcactccacgagtggaaaggaaacagaaggaactttgaatacatctatgactccacttgagacctctgctcctggagaagagtccgaaatgactgccaccttggtccccactctaggttttacaactcttgacagcaagatcagaagtccatctcaggtctcttcatcccacccaacaagagagctcagaaccacaggcagcacctctgggaggcagagttccagcacagctgcccacgggagctctgacatcctgagggcaaccacttccagcacctcaaaagcatcatcatggaccagtgaaagcacagctcagcaatttagtgaaccccagcacacacagtgggtggagacaagtcctagcatgaaaacagagagacccccagcatcaaccagtgtggcagcccctatcaccacttctgttccctcagtggtctctggcttcaccaccctgaagaccagctccacaaaagggatttggcttgaagaaacatctgcagacacactcatcggagaatccacagctggcccaaccacccatcagtttgctgttcccactgggatttcaatgacaggaggcagcagcaccaggggaagccagggcacaacccacctactcaccagagccacagcatcatctgagacatccgcagatttgactctggccacgaacggtgtcccagtctccgtgtctccagcagtgagcaagacggctgctggctcaagtcctccaggagggacaaagccatcatatacaatggtttcttctgtcatccctgagacatcatctctacagtcctcagctttcagggaaggaaccagcctgggactgactccattaaacactagacatcccttctcttcccctgaaccagactctgcaggacacaccaagataagcaccagcattcctctgttgtcatctgcttcagttcttgaggataaagtgtcagcgaccagcacattctcacaccacaaagccacctcatctattaccacagggactcctgaaatctcaacaaagacaaagcccagctcagccgttctttcctccatgaccctaagcaatgcagcaacaagtcctgaaagagtcagaaatgcaacttcccctctgactcatccatctccatcaggggaagagacagcagggagtgtcctcactctcagcacctctgctgagactacagactcacctaacatccacccaactgggacactgacttcagaatcgtcagagagtcctagcactctcagcctcccaagtgtctctggagtcaaaaccacattttcttcatctactccttccactcatctatttactagtggagaagaaacagaggaaacttcgaatccatctgtgtctcaacctgagacttctgtttccagagtaaggaccaccttggccagcacctctgtccctaccccagtattccccaccatggacacctggcctacacgttcagctcagttctcttcatcccacctagtgagtgagctcagagctacgagcagtacctcagttacaaactcaactggttcagctcttcctaaaatatctcacctcactgggacggcaacaatgtcacagaccaatagagacacgtttaatgactctgctgcaccccaaagcacaacttggccagagactagtcccagattcaagacagggttaccttcagcaacaaccactgtttcaacctctgccacttctctctctgctactgtaatggtctctaaattcacttctccagcaactagttccatggaagcaacttctatcagggaaccatcaacaaccatcctcacaacagagaccacgaatggcccaggctctatggctgtggcttctaccaacatcccaattggaaagggctacattactgaaggaagattggacacaagccatctgcccattggaaccacagcttcctctgagacatctatggattttaccatggccaaagaaagtgtctcaatgtcagtatctccatctcagtccatggatgctgctggctcaagcactccaggaaggacaagccaattcgttgacacattttctgatgatgtctatcatttaacatccagagaaattacaatacctagagatggaacaagctcagctctgactccacaaatgactgcaactcaccctccatctcctgatcctggctctgctagaagcacctggcttggcatcttgtcctcatctccttcttctcctactcccaaagtcacaatgagctccacattttcaactcagagagtcaccacaagcatgataatggacacagttgaaactagtcggtggaacatgcccaacttaccttccacgacttccttgacaccaagtaatattccaacaagtggtgccataggaaaaagcaccctggttcccttggacactccatctccagccacatcattggaggcatcagaagggggacttccaaccctcagcacctaccctgaatcaacaaacacacccagcatccacctcggagcacacgctagttcagaaagtccaagcaccatcaaacttaccatggcttcagtagtaaaacctggctcttacacacctctcaccttcccctcaatagagacccacattcatgtatcaacagccagaatggcttactcttctgggtcttcacctgagatgacagctcctggagagactaacactggtagtacctgggaccccaccacctacatcaccactacggatcctaaggatacaagttcagctcaggtctctacaccccactcagtgaggacactcagaaccacagaaaaccatccaaagacagagtccgccaccccagctgcttactctggaagtcctaaaatctcaagttcacccaatctcaccagtccggccacaaaagcatggaccatcacagacacaactgaacactccactcaattacattacacaaaattggcagaaaaatcatctggatttgagacacagtcagctccaggacctgtctctgtagtaatccctacctcccctaccattggaagcagcacattggaactaacttctgatgtcccaggggaacccctggtccttgctcccagtgagcagaccacaatcactctccccatggcaacatggctgagtaccagtttgacagaggaaatggcttcaacagaccttgatatttcaagtccaagttcacccatgagtacatttgctatttttccacctatgtccacaccttctcatgaactttcaaagtcagaggcagataccagtgccattagaaatacagattcaacaacgttggatcagcacctaggaatcaggagtttgggcagaactggggacttaacaactgttcctatcaccccactgacaaccacgtggaccagtgtgattgaacactcaacacaagcacaggacaccctttctgcaacgatgagtcctactcacgtgacacagtcactcaaagatcaaacatctataccagcctcagcatccccttcccatcttactgaagtctaccctgagctcgggacacaagggagaagctcctctgaggcaaccactttttggaaaccatctacagacacactgtccagagagattgagactggcccaacaaacattcaatccactccacccatggacaacacaacaacagggagcagtagtagtggagtcaccctgggcatagcccaccttcccataggaacatcctccccagctgagacatccacaaacatggcactggaaagaagaagttctacagccactgtctctatggctgggacaatgggactccttgttactagtgctccaggaagaagcatcagccagtcattaggaagagtttcctctgtcctttctgagtcaactactgaaggagtcacagattctagtaagggaagcagcccaaggctgaacacacagggaaatacagctctctcctcctctcttgaacccagctatgctgaaggaagccagatgagcacaagcatccctctaacctcatctcctacaactcctgatgtggaattcatagggggcagcacattttggaccaaggaggtcaccacagttatgacctcagacatctccaagtcttcagcaaggacagagtccagctcagctacccttatgtccacagctttgggaagcactgaaaatacaggaaaagaaaaactcagaactgcctctatggatcttccatctccaactccatcaatggaggtgacaccatggatttctctcactctcagtaatgcccccaataccacagattcacttgacctcagccatggggtgcacaccagctctgcagggactttggccactgacaggtcattgaatactggtgtcactagagcctccagattggaaaacggctctgatacctcttctaagtccctgtctatgggaaacagcactcacacttccatgacttacacagagaagagtgaagtgtcttcttcaatccatccccgacctgagacctcagctcctggagcagagaccactttgacttccactcctggaaacagggccataagcttaacattgcctttttcatccattccagtggaagaagtcatttctacaggcataacctcaggaccagacatcaactcagcacccatgacacattctcccatcaccccaccaacaattgtatggaccagtacaggcacaattgaacagtccactcaaccactacatgcagtttcttcagaaaaagtttctgtgcagacacagtcaactccatatgtcaactctgtggcagtgtctgcttcccctacccatgagaattcagtctcttctggaagcagcacatcctctccatattcctcagcctcacttgaatccttggattccacaatcagtaggaggaatgcaatcacttcctggctatgggacctcactacatctctccccactacaacttggccaagtactagtttatctgaggcactgtcctcaggccattctggggtttcaaacccaagttcaactacgactgaatttccactcttttcagctgcatccacatctgctgctaagcaaagaaatccagaaacagagacccatggtccccagaatacagccgcgagtactttgaacactgatgcatcctcggtcacaggtctttctgagactcctgtgggggcaagtatcagctctgaagtccctcttccaatggccataacttctagatcagatgtttctggccttacatctgagagtactgctaacccgagtttaggcacagcctcttcagcagggaccaaattaactaggacaatatccctgcccacttcagagtctttggtttcctttagaatgaacaaggatccatggacagtgtcaatccctttggggtcccatccaactactaatacagaaacaagcatcccagtaaacagcgcaggtccacctggcttgtccacagtagcatcagatgtaattgacacaccttcagatggggctgagagtattcccactgtctccttttccccctcccctgatactgaagtgacaactatctcacatttcccagaaaagacaactcattcatttagaaccatttcatctctcactcatgagttgacttcaagagtgacacctattcctggggattggatgagttcagctatgtctacaaagcccacaggagccagtccctccattacactgggagagagaaggacaatcacctctgctgctccaaccacttcccccatagttctcactgctagtttcacagagaccagcacagtttcactggataatgaaactacagtaaaaacctcagatatccttgacgcacggaaaacaaatgagctcccctcagatagcagttcttcttctgatctgatcaacacctccatagcttcttcaactatggatgtcactaaaacagcctccatcagtcccactagcatctcaggaatgacagcaagttcctccccatctctcttctcttcagatagaccccaggttcccacatctacaacagagacaaatacagccacctctccatctgtttccagtaacacctattctcttgatgggggctccaatgtgggtggcactccatccactttaccaccctttacaatcacccaccctgtcgagacaagctcggccctattagcctggtctagaccagtaagaactttcagcaccatggtcagcactgacactgcctccggagaaaatcctacctctagcaattctgtggtgacttctgttccagcaccaggtacatggaccagtgtaggcagtactactgacttacctgccatgggctttctcaagacaagtcctgcaggagaggcacactcacttctagcatcaactattgaaccagccactgccttcactccccatctctcagcagcagtggtcactggatccagtgctacatcagaagccagtcttctcactacgagtgaaagcaaagccattcattcttcaccacagaccccaactacacccacctctggagcaaactgggaaacttcagctactcctgagagccttttggtagtcactgagacttcagacacaacacttacctcaaagattttggtcacagataccatcttgttttcaactgtgtccacgccaccttctaaatttccaagtacggggactctgtctggagcttccttccctactttactcccggacactccagccatccctctcactgccactgagccaacaagttcattagctacatcctttgattccaccccactggtgactatagcttcggatagtcttggcacagtcccagagactaccctgaccatgtcagagacctcaaatggtgatgcactggttcttaagacagtaagtaacccagataggagcatccctggaatcactatccaaggagtaacagaaagtccactccatccttcttccacttccccctctaagattgttgctccacggaatacaacctatgaaggttcgatcacagtggcactttctactttgcctgcgggaactactggttcccttgtattcagtcagagttctgaaaactcagagacaacggctttggtagactcatcagctgggcttgagagggcatctgtgatgccactaaccacaggaagccagggtatggctagctctggaggaatcagaagtgggtccactcactcaactggaaccaaaacattttcttctctccctctgaccatgaacccaggtgaggttacagccatgtctgaaatcaccacgaacagactgacagctactcaatcaacagcacccaaagggatacctgtgaagcccaccagtgctgagtcaggcctcctaacacctgtctctgcctcctcaagcccatcaaaggcctttgcctcactgactacagctcccccaacttgggggatcccacagtctaccttgacatttgagttttctgaggtcccaagtttggatactaagtccgcttctttaccaactcctggacagtccctgaacaccattccagactcagatgcaagcacagcatcttcctcactgtccaagtctccagaaaaaaacccaagggcaaggatgatgacttccacaaaggccataagtgcaagctcatttcaatcaacaggttttactgaaacccctgagggatctgcctccccttctatggcagggcatgaacccagagtccccacttcaggaacaggggaccctagatatgcctcagagagcatgtcttatccagacccaagcaaggcatcatcagctatgacatcgacctctcttgcatcaaaactcacaactctcttcagcacaggtcaagcagcaaggtctggttctagttcctctcccataagcctatccactgagaaagaaacaagcttcctttcccccactgcatccacctccagaaagacttcactatttcttgggccttccatggcaaggcagcccaacatattggtgcatcttcagacttcagctctgacactttctccaacatccactctaaatatgtcccaggaggagcctcctgagttaacctcaagccagaccattgcagaagaagagggaacaacagctgaaacacagacgttaaccttcacaccatctgagaccccaacatccttgttacctgtctcttctcccacagaacccacagccagaagaaagagttctccagaaacatgggcaagctctatttcagttcctgccaagacctccttggttgaaacaactgatggaacgctagtgaccaccataaagatgtcaagccaggcagcacaaggaaattccacgtggcctgccccagcagaggagacggggagcagtccagcaggcacatccccaggaagcccagaaatgtctaccactctcaaaatcatgagctccaaggaacccagcatcagcccagagatcaggtccactgtgagaaattctccttggaagactccagaaacaactgttcccatggagaccacagtggaaccagtcacccttcagtccacagccctaggaagtggcagcaccagcatctctcacctgcccacaggaaccacatcaccaaccaagtcaccaacagaaaatatgttggctacagaaagggtctccctctccccatccccacctgaggcttggaccaacctttattctggaactccaggagggaccaggcagtcactggccacaatgtcctctgtctccctagagtcaccaactgctagaagcatcacagggactggtcagcaaagcagtccagaactggtttcaaagacaactggaatggaattctctatgtggcatggctctactggagggaccacaggggacacacatgtctctctgagcacatcttccaatatccttgaagaccctgtaaccagcccaaactctgtgagctcattgacagataaatccaaacataaaaccgagacatgggtaagcaccacagccattccctccactgtcctgaataataagataatggcagctgaacaacagacaagtcgatctgtggatgaggcttattcatcaactagttcttggtcagatcagacatctgggagtgacatcacccttggtgcatctcctgatgtcacaaacacattatacatcacctccacagcacaaaccacctcactagtgtctctgccctctggagaccaaggcattacaagcctcaccaatccctcaggaggaaaaacaagctctgcgtcatctgtcacatctccttcaatagggcttgagactctgagggccaatgtaagtgcagtgaaaagtgacattgcccctactgctgggcatctatctcagacttcatctcctgcggaagtgagcatcctggacgtaaccacagctcctactccaggtatctccaccaccatcaccaccatgggaaccaactcaatctcaactaccacacccaacccagaagtgggtatgagtaccatggacagcaccccggccacagagaggcgcacaacttctacagaacacccttccacctggtcttccacagctgcatcagattcctggactgtcacagacatgacttcaaacttgaaagttgcaagatctcctggaacaatttccacaatgcatacaacttcattcttagcctcaagcactgaattagactccatgtctactccccatggccgtataactgtcattggaaccagcctggtcactccatcctctgatgcttcagctgtaaagacagagaccagtacaagtgaaagaacattgagtccttcagacacaactgcatctactcccatctcaactttttctcgtgtccagaggatgagcatctcagttcctgacattttaagtacaagttggactcccagtagtacagaagcagaagatgtgcctgtttcaatggtttctacagatcatgctagtacaaagactgacccaaatacgcccctgtccacttttctgtttgattctctgtccactcttgactgggacactgggagatctctgtcatcagccacagccactacctcagctcctcagggggccacaactccccaggaactcactttggaaaccatgatcagcccagctacctcacagttgcccttctctatagggcacattacaagtgcagtcacaccagctgcaatggcaaggagctctggagttactttttcaagaccagatcccacaagcaaaaaggcagagcagacttccactcagcttcccaccaccacttctgcacatccagggcaggtgcccagatcagcagcaacaactctggatgtgatcccacacacagcaaaaactccagatgcaacttttcagagacaagggcagacagctcttacaacagaggcaagagctacatctgactcctggaatgagaaagaaaaatcaaccccaagtgcaccttggatcactgagatgatgaattctgtctcagaagataccatcaaggaggttaccagctcctccagtgtattaaggaccctgaatacgctggacataaacttggaatctgggacgacttcatccccaagttggaaaagcagcccatatgagagaattgccccttctgagtccaccacagacaaagaggcaattcacccttctacaaacacagtagagaccacaggctgggtcacaagttccgaacatgcttctcattccactatcccagcccactcagcgtcatccaaactcacatctccagtggttacaacctccaccagggaacaagcaatagtttctatgtcaacaaccacatggccagagtctacaagggctagaacagagcctaattccttcttgactattgaactgagggacgtcagcccttacatggacaccagctcaaccacacaaacaagtattatctcttccccaggttccactgcgatcaccaaggggcctagaacagaaattacctcctctaagagaatatccagctcattccttgcccagtctatgaggtcgtcagacagcccctcagaagccatcaccaggctgtctaactttcctgccatgacagaatctggaggaatgatccttgctatgcaaacaagtccacctggcgctacatcactaagtgcacctactttggatacatcagccacagcctcctggacagggactccactggctacgactcagagatttacatactcagagaagaccactctctttagcaaaggtcctgaggatacatcacagccaagccctccctctgtggaagaaaccagctcttcctcttccctggtacctatccatgctacaacctcgccttccaatattttgttgacatcacaagggcacagtccctcctctactccacctgtgacctcagttttcttgtctgagacctctggcctggggaagaccacagacatgtcgaggataagcttggaacctggcacaagtttacctcccaatttgagcagtacagcaggtgaggcgttatccacttatgaagcctccagagatacaaaggcaattcatcattctgcagacacagcagtgacgaatatggaggcaaccagttctgaatattctcctatcccaggccatacaaagccatccaaagccacatctccattggttacctcccacatcatgggggacatcacttcttccacatcagtatttggctcctccgagaccacagagattgagacagtgtcctctgtgaaccagggacttcaggagagaagcacatcccaggtggccagctctgctacagagacaagcactgtcattacccatgtgtctagtggtgatgctactactcatgtcaccaagacacaagccactttctctagcggaacatccatctcaagccctcatcagtttataacttctaccaacacatttacagatgtgagcaccaacccctccacctctctgataatgacagaatcttcaggagtgaccatcaccacccaaacaggtcctactggagctgcaacacagggtccatatctcttggacacatcaaccatgccttacttgacagagactccattagctgtgactccagattttatgcaatcagagaagaccactctcataagcaaaggtcccaaggatgtgtcctggacaagccctccctctgtggcagaaaccagctatccctcttccctgacacctttcttggtcacaaccatacctcctgccacttccacgttacaagggcaacatacatcctctcctgtttctgcgacttcagttcttacctctggactggtgaagaccacagatatgttgaacacaagcatggaacctgtgaccaattcacctcaaaatttgaacaatccatcaaatgagatactggccactttggcagccaccacagatatagagactattcatccttccataaacaaagcagtgaccaatatggggactgccagttcagcacatgtactgcattccactctcccagtcagctcagaaccatctacagccacatctccaatggttcctgcctccagcatgggggacgctcttgcttctatatcaatacctggttctgagaccacagacattgagggagagccaacatcctccctgactgctggacgaaaagagaacagcaccctccaggagatgaactcaactacagagtcaaacatcatcctctccaatgtgtctgtgggggctattactgaagccacaaaaatggaagtcccctcttttgatgcaacattcataccaactcctgctcagtcaacaaagttcccagatattttctcagtagccagcagtagactttcaaactctcctcccatgacaatatctacccacatgaccaccacccagacagggtcttctggagctacatcaaagattccacttgccttagacacatcaaccttggaaacctcagcagggactccatcagtggtgactgaggggtttgcccactcaaaaataaccactgcaatgaacaatgatgtcaaggacgtgtcacagacaaaccctccctttcaggatgaagccagctctccctcttctcaagcacctgtccttgtcacaaccttaccttcttctgttgctttcacaccgcaatggcacagtacctcctctcctgtttctatgtcctcagttcttacttcttcactggtaaagaccgcaggcaaggtggatacaagcttagaaacagtgaccagttcacctcaaagtatgagcaacactttggatgacatatcggtcacttcagcagccaccacagatatagagacaacgcatccttccataaacacagtagttaccaatgtggggaccaccggttcagcatttgaatcacattctactgtctcagcttacccagagccatctaaagtcacatctccaaatgttaccacctccaccatggaagacaccacaatttccagatcaatacctaaatcctctaagactacaagaactgagactgagacaacttcctccctgactcctaaactgagggagaccagcatctcccaggagatcacctcgtccacagagacaagcactgttccttacaaagagctcactggtgccactaccgaggtatccaggacagatgtcacttcctctagcagtacatccttccctggccctgatcagtccacagtgtcactagacatctccacagaaaccaacaccaggctgtctacctccccaataatgacagaatctgcagaaataaccatcaccacccaaacaggtcctcatggggctacatcacaggatacttttaccatggacccatcaaatacaaccccccaggcagggatccactcagctatgactcatggattttcacaattggatgtgaccactcttatgagcagaattccacaggatgtatcatggacaagtcctccctctgtggataaaaccagctccccctcttcctttctgtcctcacctgcaatgaccacaccttccctgatttcttctaccttaccagaggataagctctcctctcctatgacttcacttctcacctctggcctagtgaagattacagacatattacgtacacgcttggaacctgtgaccagctcacttccaaatttcagcagcacctcagataagatactggccacttctaaagacagtaaagacacaaaggaaatttttccttctataaacacagaagagaccaatgtgaaagccaacaactctggacatgaatcccattcccctgcactggctgactcagagacacccaaagccacaactcaaatggttatcaccaccactgtgggagatccagctccttccacatcaatgccagtgcatggttcctctgagactacaaacattaagagagagccaacatatttcttgactcctagactgagagagaccagtacctctcaggagtccagctttcccacggacacaagttttctactttccaaagtccccactggtactattactgaggtctccagtacaggggtcaactcttctagcaaaatttccaccccagaccatgataagtccacagtgccacctgacaccttcacaggagagatccccagggtcttcacctcctctattaagacaaaatctgcagaaatgacgatcaccacccaagcaagtcctcctgagtctgcatcgcacagtacccttcccttggacacatcaaccacactttcccagggagggactcattcaactgtgactcagggattcccatactcagaggtgaccactctcatgggcatgggtcctgggaatgtgtcatggatgacaactccccctgtggaagaaaccagctctgtgtcttccctgatgtcttcacctgccatgacatccccttctcctgtttcctccacatcaccacagagcatcccctcctctcctcttcctgtgactgcacttcctacttctgttctggtgacaaccacagatgtgttgggcacaacaagcccagagtctgtaaccagttcacctccaaatttgagcagcatcactcatgagagaccggccacttacaaagacactgcacacacagaagccgccatgcatcattccacaaacaccgcagtgaccaatgtagggacttccgggtctggacataaatcacaatcctctgtcctagctgactcagagacatcgaaagccacacctctgatgagtaccacctccaccctgggggacacaagtgtttccacatcaactcctaatatctctcagactaaccaaattcaaacagagccaacagcatccctgagccctagactgagggagagcagcacgtctgagaagaccagctcaacaacagagacaaatactgccttttcttatgtgcccacaggtgctattactcaggcctccagaacagaaatctcctctagcagaacatccatctcagaccttgatcggcccacaatagcacccgacatctccacaggaatgatcaccaggctcttcacctcccccatcatgacaaaatctgcagaaatgaccgtcaccactcaaacaactactcctggggctacatcacagggtatccttccctgggacacatcaaccacacttttccagggagggactcattcaaccgtgtctcagggattcccacactcagagataaccactcttcggagcagaacccctggagatgtgtcatggatgacaactccccctgtggaagaaaccagctctgggttttccctgatgtcaccttccatgacatccccttctcctgtttcctccacatcaccagagagcatcccctcctctcctctccctgtgactgcacttcttacttctgttctggtgacaaccacaaatgtattgggcacaacaagcccagagcccgtaacgagttcacctccaaatttaagcagccccacacaggagagactgaccacttacaaagacactgcgcacacagaagccatgcatgcttccatgcatacaaacactgcagtggccaacgtggggacctccatttctggacatgaatcacaatcttctgtcccagctgattcacacacatccaaagccacatctccaatgggtatcaccttcgccatgggggatacaagtgtttctacatcaactcctgccttctttgagactagaattcagactgaatcaacatcctctttgattcctggattaagggacaccaggacgtctgaggagatcaacactgtgacagagaccagcactgtcctttcagaagtgcccactactactactactgaggtctccaggacagaagttatcacttccagcagaacaaccatctcagggcctgatcattccaaaatgtcaccctacatctccacagaaaccatcaccaggctctccacttttccttttgtaacaggatccacagaaatggccatcaccaaccaaacaggtcctatagggactatctcacaggctacccttaccctggacacatcaagcacagcttcctgggaagggactcactcacctgtgactcagagatttccacactcagaggagaccactactatgagcagaagtactaagggcgtgtcatggcaaagccctccctctgtggaagaaaccagttctccttcttccccagtgcctttacctgcaataacctcacattcatctctttattccgcagtatcaggaagtagccccacttctgctctccctgtgacttcccttctcacctctggcaggaggaagaccatagacatgttggacacacactcagaacttgtgaccagctccttaccaagtgcaagtagcttctcaggtgagatactcacttctgaagcctccacaaatacagagacaattcacttttcagagaacacagcagaaaccaatatggggaccaccaattctatgcataaactacattcctctgtctcaatccactcccagccatccggacacacacctccaaaggttactggatctatgatggaggacgctattgtttccacatcaacacctggttctcctgagactaaaaatgttgacagagactcaacatcccctctgactcctgaactgaaagaggacagcaccgccctggtgatgaactcaactacagagtcaaacactgttttctccagtgtgtccctggatgctgctactgaggtctccagggcagaagtcacctactatgatcctacattcatgccagcttctgctcagtcaacaaagtccccagacatttcacctgaagccagcagcagtcattctaactctcctcccttgacaatatctacacacaagaccatcgccacacaaacaggtccttctggggtgacatctcttggccaactgaccctggacacatcaaccatagccacctcagcaggaactccatcagccagaactcaggattttgtagattcagaaacaaccagtgtcatgaacaatgatctcaatgatgtgttgaagacaagccctttctctgcagaagaagccaactctctctcttctcaggcacctctccttgtgacaacctcaccttctcctgtaacttccacattgcaagagcacagtacctcctctcttgtttctgtgacctcagtacccacccctacactggcgaagatcacagacatggacacaaacttagaacctgtgactcgttcacctcaaaatttaaggaacaccttggccacttcagaagccaccacagatacacacacaatgcatccttctataaacacagcagtggccaatgtggggaccaccagttcaccaaatgaattctattttactgtctcacctgactcagacccatataaagccacatccgcagtagttatcacttccacctcgggggactcaatagtttccacatcaatgcctagatcctctgcgatgaaaaagattgagtctgagacaactttctccctgatatttagactgagggagactagcacctcccagaaaattggctcatcctcagacacaagcacggtctttgacaaagcattcactgctgctactactgaggtctccagaacagaactcacctcctctagcagaacatccatccaaggcactgaaaagcccacaatgtcaccggacacctccacaagatctgtcaccatgctttctacttttgctggcctgacaaaatccgaagaaaggaccattgccacccaaacaggtcctcatagggcgacatcacagggtacccttacctgggacacatcaatcacaacctcacaggcagggacccactcagctatgactcatggattttcacaattagatttgtccactcttacgagtagagttcctgagtacatatcagggacaagcccaccctctgtggaaaaaaccagctcttcctcttcccttctgtctttaccagcaataacctcaccgtcccctgtacctactacattaccagaaagtaggccgtcttctcctgttcatctgacttcactccccacctctggcctagtgaagaccacagatatgctggcatctgtggccagtttacctccaaacttgggcagcacctcacataagataccgactacttcagaagacattaaagatacagagaaaatgtatccttccacaaacatagcagtaaccaatgtggggaccaccacttctgaaaaggaatcttattcgtctgtcccagcctactcagaaccacccaaagtcacctctccaatggttacctctttcaacataagggacaccattgtttccacatccatgcctggctcctctgagattacaaggattgagatggagtcaacattctccctggctcatgggctgaagggaaccagcacctcccaggaccccatcgtatccacagagaaaagtgctgtccttcacaagttgaccactggtgctactgagacctctaggacagaagttgcctcttctagaagaacatccattccaggccctgatcattccacagagtcaccagacatctccactgaagtgatccccagcctgcctatctcccttggcattacagaatcttcaaatatgaccatcatcactcgaacaggtcctcctcttggctctacatcacagggcacatttaccttggacacaccaactacatcctccagggcaggaacacactcgatggcgactcaggaatttccacactcagaaatgaccactgtcatgaacaaggaccctgagattctatcatggacaatccctccttctatagagaaaaccagcttctcctcttccctgatgccttcaccagccatgacttcacctcctgtttcctcaacattaccaaagaccattcacaccactccttctcctatgacctcactgctcacccctagcctagtgatgaccacagacacattgggcacaagcccagaacctacaaccagttcacctccaaatttgagcagtacctcacatgagatactgacaacagatgaagacaccacagctatagaagccatgcatccttccacaagcacagcagcgactaatgtggaaaccaccagttctggacatgggtcacaatcctctgtcctagctgactcagaaaaaaccaaggccacagctccaatggataccacctccaccatggggcatacaactgtttccacatcaatgtctgtttcctctgagactacaaaaattaagagagagtcaacatattccttgactcctggactgagagagaccagcatttcccaaaatgccagcttttccactgacacaagtattgttctttcagaagtccccactggtactactgctgaggtctccaggacagaagtcacctcctctggtagaacatccatccctggcccttctcagtccacagttttgccagaaatatccacaagaacaatgacaaggctctttgcctcgcccaccatgacagaatcagcagaaatgaccatccccactcaaacaggtccttctgggtctacctcacaggatacccttaccttggacacatccaccacaaagtcccaggcaaagactcattcaactttgactcagagatttccacactcagagatgaccactctcatgagcagaggtcctggagatatgtcatggcaaagctctccctctctggaaaatcccagctctctcccttccctgctgtctttacctgccacaacctcacctcctcccatttcctccacattaccagtgactatctcctcctctcctcttcctgtgacttcacttctcacctctagcccggtaacgaccacagacatgttacacacaagcccagaacttgtaaccagttcacctccaaagctgagccacacttcagatgagagactgaccactggcaaggacaccacaaatacagaagctgtgcatccttccacaaacacagcagcgtccaatgtggagattcccagctctggacatgaatccccttcctctgccttagctgactcagagacatccaaagccacatcaccaatgtttattacctccacccaggaggatacaactgttgccatatcaacccctcacttcttggagactagcagaattcagaaagagtcaatttcctccctgagccctaaattgagggagacaggcagttctgtggagacaagctcagccatagagacaagtgctgtcctttctgaagtgtccattggtgctactactgagatctccaggacagaagtcacctcctctagcagaacatccatctctggttctgctgagtccacaatgttgccagaaatatccaccacaagaaaaatcattaagttccctacttcccccatcctggcagaatcatcagaaatgaccatcaagacccaaacaagtcctcctgggtctacatcagagagtacctttacattagacacatcaaccactccctccttggtaataacccattcgactatgactcagagattgccacactcagagataaccactcttgtgagtagaggtgctggggatgtgccacggcccagctctctccctgtggaagaaacaagccctccatcttcccagctgtctttatctgccatgatctcaccttctcctgtttcttccacattaccagcaagtagccactcctcttctgcttctgtgacttcacttctcacaccaggccaagtgaagactactgaggtgttggacgcaagtgcagaacctgaaaccagttcacctccaagtttgagcagcacctcagttgaaatactggccacctctgaagtcaccacagatacggagaaaattcatcctttctcaaacacggcagtaaccaaagttggaacttccagttctggacatgaatccccttcctctgtcctacctgactcagagacaaccaaagccacatcggcaatgggtaccatctccattatgggggatacaagtgtttctacattaactcctgccttatctaacactaggaaaattcagtcagagccagcttcctcactgaccaccagattgagggagaccagcacctctgaagagaccagcttagccacagaagcaaacactgttctttctaaagtgtccactggtgctactactgaggtctccaggacagaagccatctcctttagcagaacatccatgtcaggccctgagcagtccacaatgtcacaagacatctccataggaaccatccccaggatttctgcctcctctgtcctgacagaatctgcaaaaatgaccatcacaacccaaacaggtccttcggagtctacactagaaagtacccttaatttgaacacagcaaccacaccctcttgggtggaaacccactctatagtaattcagggatttccacacccagagatgaccacttccatgggcagaggtcctggaggtgtgtcatggcctagccctccctttgtgaaagaaaccagccctccatcctccccgctgtctttacctgccgtgacctcacctcatcctgtttccaccacattcctagcacatatccccccctctccccttcctgtgacttcacttctcacctctggcccggcgacaaccacagatatcttgggtacaagcacagaacctggaaccagttcatcttcaagtttgagcaccacctcccatgagagactgaccacttacaaagacactgcacatacagaagccgtgcatccttccacaaacacaggagggaccaatgtggcaaccaccagctctggatataaatcacagtcctctgtcctagctgactcatctccaatgtgtaccacctccaccatgggggatacaagtgttctcacatcaactcctgccttccttgagactaggaggattcagacagagctagcttcctccctgacccctggattgagggagtccagcggctctgaagggaccagctcaggcaccaagatgagcactgtcctctctaaagtgcccactggtgctactactgagatctccaaggaagacgtcacctccatcccaggtcccgctcaatccacaatatcaccagacatctccacaagaaccgtcagctggttctctacatcccctgtcatgacagaatcagcagaaataaccatgaacacccatacaagtcctttaggggccacaacacaaggcaccagtactttggacacgtcaagcacaacctctttgacaatgacacactcaactatatctcaaggattttcacactcacagatgagcactcttatgaggaggggtcctgaggatgtatcatggatgagccctccccttctggaaaaaactagaccttccttttctctgatgtcttcaccagccacaacttcaccttctcctgtttcctccacattaccagagagcatctcttcctctcctcttcctgtgacttcactcctcacgtctggcttggcaaaaactacagatatgttgcacaaaagctcagaacctgtaaccaactcacctgcaaatttgagcagcacctcagttgaaatactggccacctctgaagtcaccacagatacagagaaaactcatccttcttcaaacagaacagtgaccgatgtggggacctccagttctggacatgaatccacttcctttgtcctagctgactcacagacatccaaagtcacatctccaatggttattacctccaccatggaggatacgagtgtctccacatcaactcctggcttttttgagactagcagaattcagacagaaccaacatcctccctgacccttggactgagaaagaccagcagctctgaggggaccagcttagccacagagatgagcactgtcctttctggagtgcccactggtgccactgctgaagtctccaggacagaagtcacctcctctagcagaacatccatctcaggctttgctcagctcacagtgtcaccagagacttccacagaaaccatcaccagactccctacctccagcataatgacagaatcagcagaaatgatgatcaagacacaaacagatcctcctgggtctacaccagagagtactcatactgtggacatatcaacaacacccaactgggtagaaacccactcgactgtgactcagagattttcacactcagagatgaccactcttgtgagcagaagccctggtgatatgttatggcctagtcaatcctctgtggaagaaaccagctctgcctcttccctgctgtctctgcctgccacgacctcaccttctcctgtttcctctacattagtagaggatttcccttccgcttctcttcctgtgacttctcttctcaaccctggcctggtgataaccacagacaggatgggcataagcagagaacctggaaccagttccacttcaaatttgagcagcacctcccatgagagactgaccactttggaagacactgtagatacagaagacatgcagccttccacacacacagcagtgaccaacgtgaggacctccatttctggacatgaatcacaatcttctgtcctatctgactcagagacacccaaagccacatctccaatgggtaccacctacaccatgggggaaacgagtgtttccatatccacttctgacttctttgagaccagcagaattcagatagaaccaacatcctccctgacttctggattgagggagaccagcagctctgagaggatcagctcagccacagagggaagcactgtcctttctgaagtgcccagtggtgctaccactgaggtctccaggacagaagtgatatcctctaggggaacatccatgtcagggcctgatcagttcaccatatcaccagacatctctactgaagcgatcaccaggctttctacttcccccattatgacagaatcagcagaaagtgccatcactattgagacaggttctcctggggctacatcagagggtaccctcaccttggacacctcaacaacaaccttttggtcagggacccactcaactgcatctccaggattttcacactcagagatgaccactcttatgagtagaactcctggagatgtgccatggccgagccttccctctgtggaagaagccagctctgtctcttcctcactgtcttcacctgccatgacctcaacttcttttttctccacattaccagagagcatctcctcctctcctcatcctgtgactgcacttctcacccttggcccagtgaagaccacagacatgttgcgcacaagctcagaacctgaaaccagttcacctccaaatttgagcagcacctcagctgaaatattagccacgtctgaagtcaccaaagatagagagaaaattcatccctcctcaaacacacctgtagtcaatgtagggactgtgatttataaacatctatccccttcctctgttttggctgacttagtgacaacaaaacccacatctccaatggctaccacctccactctggggaatacaagtgtttccacatcaactcctgccttcccagaaactatgatgacacagccaacttcctccctgacttctggattaagggagatcagtacctctcaagagaccagctcagcaacagagagaagtgcttctctttctggaatgcccactggtgctactactaaggtctccagaacagaagccctctccttaggcagaacatccaccccaggtcctgctcaatccacaatatcaccagaaatctccacggaaaccatcactagaatttctactcccctcaccacgacaggatcagcagaaatgaccatcacccccaaaacaggtcattctggggcatcctcacaaggtacctttaccttggacacatcaagcagagcctcctggccaggaactcactcagctgcaactcacagatctccacactcagggatgaccactcctatgagcagaggtcctgaggatgtgtcatggccaagccgcccatcagtggaaaaaactagccctccatcttccctggtgtctttatctgcagtaacctcaccttcgccactttattccacaccatctgagagtagccactcatctcctctccgggtgacttctcttttcacccctgtcatgatgaagaccacagacatgttggacacaagcttggaacctgtgaccacttcacctcccagtatgaatatcacctcagatgagagtctggccacttctaaagccaccatggagacagaggcaattcagctttcagaaaacacagctgtgactcagatgggcaccatcagcgctagacaagaattctattcctcttatccaggcctcccagagccatccaaagtgacatctccagtggtcacctcttccaccataaaagacattgtttctacaaccatacctgcttcctctgagataacaagaattgagatggagtcaacatccaccctgacccccacaccaagggagaccagcacctcccaggagatccactcagccacaaagccaagcactgttccttacaaggcactcactagtgccacgattgaggactccatgacacaagtcatgtcctctagcagaggacctagccctgatcagtccacaatgtcacaagacatatccactgaagtgatcaccaggctctctacctcccccatcaagacagaatctacagaaatgaccattaccacccaaacaggttctcctggggctacatcaaggggtacccttaccttggacacttcaacaacttttatgtcagggacccactcaactgcatctcaaggattttcacactcacagatgaccgctcttatgagtagaactcctggagatgtgccatggctaagccatccctctgtggaagaagccagctctgcctctttctcactgtcttcacctgtcatgacctcatcttctcccgtttcttccacattaccagacagcatccactcttcttcgcttcctgtgacatcacttctcacctcagggctggtgaagaccacagagctgttgggcacaagctcagaacctgaaaccagttcacccccaaatttgagcagcacctcagctgaaatactggccatcactgaagtcactacagatacagagaaactggagatgaccaatgtggtaacctcaggttatacacatgaatctccttcctctgtcctagctgactcagtgacaacaaaggccacatcttcaatgggtatcacctaccccacaggagatacaaatgttctcacatcaacccctgccttctctgacaccagtaggattcaaacaaagtcaaagctctcactgactcctgggttgatggagaccagcatctctgaagagaccagctctgccacagaaaaaagcactgtcctttctagtgtgcccactggtgctactactgaggtctccaggacagaagccatctcttctagcagaacatccatcccaggccctgctcaatccacaatgtcatcagacacctccatggaaaccatcactagaatttctacccccctcacaaggaaagaatcaacagacatggccatcacccccaaaacaggtccttctggggctacctcgcagggtacctttaccttggactcatcaagcacagcctcctggccaggaactcactcagctacaactcagagatttccacagtcagtggtgacaactcctatgagcagaggtcctgaggatgtgtcatggccaagcccgctgtctgtggaaaaaaacagccctccatcttccctggtatcttcatcttcagtaacctcaccttcgccactttattccacaccatctgggagtagccactcctctcctgtccctgtcacttctcttttcacctctatcatgatgaaggccacagacatgttggatgcaagtttggaacctgagaccacttcagctcccaatatgaatatcacctcagatgagagtctggccgcttctaaagccaccacggagacagaggcaattcacgtttttgaaaatacagcagcgtcccatgtggaaaccaccagtgctacagaggaactctattcctcttccccaggcttctcagagccaacaaaagtgatatctccagtggtcacctcttcctctataagagacaacatggtttccacaacaatgcctggctcctctggcattacaaggattgagatagagtcaatgtcatctctgacccctggactgagggagaccagaacctcccaggacatcacctcatccacagagacaagcactgtcctttacaagatgccctctggtgccactcctgaggtctccaggacagaagttatgccctctagcagaacatccattcctggccctgctcagtccacaatgtcactagacatctccgatgaagttgtcaccaggctgtctacctctcccatcatgacagaatctgcagaaataaccatcaccacccaaacaggttattctctggctacatcccaggttacccttcccttgggcacctcaatgacctttttgtcagggacccactcaactatgtctcaaggactttcacactcagagatgaccaatcttatgagcaggggtcctgaaagtctgtcatggacgagccctcgctttgtggaaacaactagatcttcctcttctctgacatcattacctctcacgacctcactttctcctgtgtcctccacattactagacagtagcccctcctctcctcttcctgtgacttcacttatcctcccaggcctggtgaagactacagaagtgttggatacaagctcagagcctaaaaccagttcatctccaaatttgagcagcacctcagttgaaataccggccacctctgaaatcatgacagatacagagaaaattcatccttcctcaaacacagcggtggccaaagtgaggacctccagttctgttcatgaatctcattcctctgtcctagctgactcagaaacaaccataaccataccttcaatgggtatcacctccgctgtggacgataccactgttttcacatcaaatcctgccttctctgagactaggaggattccgacagagccaacattctcattgactcctggattcagggagactagcacctctgaagagaccacctcaatcacagaaacaagtgcagtcctttatggagtgcccactagtgctactactgaagtctccatgacagaaatcatgtcctctaatagaatacacatccctgactctgatcagtccacgatgtctccagacatcatcactgaagtgatcaccaggctctcttcctcatccatgatgtcagaatcaacacaaatgaccatcaccacccaaaaaagttctcctggggctacagcacagagtactcttaccttggccacaacaacagcccccttggcaaggacccactcaactgttcctcctagatttttacactcagagatgacaactcttatgagtaggagtcctgaaaatccatcatggaagagctctctctttgtggaaaaaactagctcttcatcttctctgttgtccttacctgtcacgacctcaccttctgtttcttccacattaccgcagagtatcccttcctcctctttttctgtgacttcactcctcaccccaggcatggtgaagactacagacacaagcacagaacctggaaccagtttatctccaaatctgagtggcacctcagttgaaatactggctgcctctgaagtcaccacagatacagagaaaattcatccttcttcaagcatggcagtgaccaatgtgggaaccaccagttctggacatgaactatattcctctgtttcaatccactcggagccatccaaggctacatacccagtgggtactccctcttccatggctgaaacctctatttccacatcaatgcctgctaattttgagaccacaggatttgaggctgagccattttctcatttgacttctggatttaggaagacaaacatgtccctggacaccagctcagtcacaccaacaaatacaccttcttctcctgggtccactcaccttttacagagttccaagactgatttcacctcttctgcaaaaacatcatccccagactggcctccagcctcacagtatactgaaattccagtggacataatcaccccctttaatgcttctccatctattacggagtccactgggataacctccttcccagaatccaggtttactatgtctgtaacagaaagtactcatcatctgagtacagatttgctgccttcagctgagactatttccactggcacagtgatgccttctctatcagaggccatgacttcatttgccaccactggagttccacgagccatctcaggttcaggtagtccattctctaggacagagtcaggccctggggatgctactctgtccaccattgcagagagcctgccttcatccactcctgtgccattctcctcttcaaccttcactaccactgattcttcaaccatcccagccctccatgagataacttcctcttcagctaccccatatagagtggacaccagtcttgggacagagagcagcactactgaaggacgcttggttatggtcagtactttggacacttcaagccaaccaggcaggacatcttcatcacccattttggataccagaatgacagagagcgttgagctgggaacagtgacaagtgcttatcaagttccttcactctcaacacggttgacaagaactgatggcattatggaacacatcacaaaaatacccaatgaagcagcacacagaggtaccataagaccagtcaaaggccctcagacatccacttcgcctgccagtcctaaaggactacacacaggagggacaaaaagaatggagaccaccaccacagctctgaagaccaccaccacagctctgaagaccacttccagagccaccttgaccaccagtgtctatactcccactttgggaacactgactcccctcaatgcatcaatgcaaatggccagcacaatccccacagaaatgatgatcacaaccccatatgttttccctgatgttccagaaacgacatcctcattggctaccagcctgggagcagaaaccagcacagctcttcccaggacaaccccatctgttttcaatagagaatcagagaccacagcctcactggtctctcgttctggggcagagagaagtccggttattcaaactctagatgtttcttctagtgagccagatacaacagcttcatgggttatccatcctgcagagaccatcccaactgtttccaagacaacccccaattttttccacagtgaattagacactgtatcttccacagccaccagtcatggggcagacgtcagctcagccattccaacaaatatctcacctagtgaactagatgcactgaccccactggtcactatttcggggacagatactagtacaacattcccaacactgactaagtccccacatgaaacagagacaagaaccacatggctcactcatcctgcagagaccagctcaactattcccagaacaatccccaatttttctcatcatgaatcagatgccacaccttcaatagccaccagtcctggggcagaaaccagttcagctattccaattatgactgtctcacctggtgcagaagatctggtgacctcacaggtcactagttctgggacagacagaaatatgactattccaactttgactctttctcctggtgaaccaaagacgatagcctcattagtcacccatcctgaagcacagacaagttcggccattccaacttcaactatctcgcctgctgtatcacggttggtgacctcaatggtcaccagtttggcggcaaagacaagtacaactaatcgagctctgacaaactcccctggtgaaccagctacaacagtttcattggtcacgcatcctgcacagaccagcccaacagttccctggacaacttccatttttttccatagtaaatcagacaccac

SEQ ID NO: 216315 - DNA, 1341 bp, Artificial Sequence
  derived and/or modified sequence
acagctgctggccctctcctggtgccattcaccctcaacttcaccatcaccaacctgcagtacgaggaggacatgcatcacccaggctccaggaagttcaacaccacggagcgggtcctgcagggtctgcttggtcccatgttcaagaacaccagtgtcggccttctgtactctggctgcagactgaccttgctcaggcctgagaagaatggggcagccactggaatggatgccatctgcagccaccgtcttgaccccaaaagccctggactcaacagagagcagctgtactgggagctgagccagctgacccatggcatcaaagagctgggcccctacaccctggacaggaacagtctctatgtcaatggtttcacccatcggagctctgtggcccccaccagcactcctgggacctccacagtggaccttgggacctcagggactccatcctccctccccagccccacaacagctgttcctctcctggtgccgttcaccctcaactttaccatcaccaatctgcagtatggggaggacatgcgtcaccctggctccaggaagttcaacaccacagagagggtcctgcagggtctgcttggtcccttgttcaagaactccagtgtcggccctctgtactctggctgcagactgatctctctcaggtctgagaaggatggggcagccactggagtggatgccatctgcacccaccaccttaaccctcaaagccctggactggacagggagcagctgtactggcagctgagccagatgaccaatggcatcaaagagctgggcccctacaccctggaccggaacagtctctacgtcaatggtttcacccatcggagctctgggctcaccaccagcaccaccggccctctcctggtgccattcacactcaacttcaccatcactaacctacagtatgaggagaacatgggtcaccctggctccaggaagttcaacatcacggagagtgttctgcagggtctgctcaagcccttgttcaagagcaccagtgttggccctctgtattctggctgcagactgaccttgctcaggcctgagaaggatggagtagccaccagagtggacgccatctgcacccaccgccctgaccccaaaatccctgggctagacagacagcagctatactgggagctgagccagctgacccacagcatcactgagctgggaccctacaccctggatagggacagtctctatgtcaatggtttcacccagcggagctctgtgcccaccaccagcactcctgggactttcacagtacagccggaaacctctgagactccatcatccctccctggccccaca

SEQ ID NO: 216316 - DNA, 291 bp, Artificial Sequence
  derived and/or modified sequence
atgactccgtgcctggaatccttttgtcaaagagcaaaggattgcaagcaaaatattcctcttcccttccttatccaggattggccattatccgagtctaagcctcagggacaggacttctggacacctcagcccctacaggcagccgcaccttctcacgagttccaacaggtggctctccatcccgcaaggacacggcttgcctcaagaccgcagggtgggagactgatgtctagtagagaggtaggtctccgtgcccctcgctgctcctgcggcaagcgtaagaggtag

SEQ ID NO: 216317 - DNA, 3447 bp, Artificial Sequence
  derived and/or modified sequence
atgcccttgttcaaaaataccagcgtgtcctccctttactccggttgccgtctgaccttactgaggcccgagaaggatggtgcggctactcgggttgacgctgtttgtacgcaccggccagaccctaagagccctgggctggatagggagaggttatattggaaattgagccaattaacccacggaatcacagaactgggaccctatacactagatcgacacagcctgtatgtaaatgggttcacccaccaatcgtcgatgaccactactcgaaccccagacacttcgaccatgcacctggccacttcccgtactccggcaagcctgtccggaccaatgacagctagccccctgctcgtcttatttacaatcaactttacgatcactaacctgagatatgaggagaacatgcatcaccctggcagtagaaagttcaataccaccgaacgagttctgcaaggcttgctgcgacccgtgtttaagaatacctcagtgggtcccctgtattcagggtgtcgactgacgcttctgagacctaagaaagatggggctgcaactaaagtggacgctatctgtacgtacagacccgatcccaagtcgcctggcctggacagagagcagctctactgggaattgagtcagctcactcactcaatcactgagctgggcccatacacactcgatcgcgatagcctctacgtgaacggatttactcaacggtccagcgtgccgacaacctccattcctgggactcccacggttgacctgggcacctccgggactcccgtgtcgaagcccggtcccagcgccgcttctcctttgttggtcttattcaccctaaacttcacaatcaccaacttgaggtatgaggagaatatgcaacaccctggctctaggaaattcaatactaccgagcgtgtgctgcagggcctgcttagatctctcttcaagtctacctcagttggcccactttactctggctgccgcctgactttgctgagacctgagaaggacggaacagccacaggtgtggacgccatctgtacgcaccaccccgaccccaagagcccaaggctggatcgggagcagttatactgggagctctcacaactgacccataacatcaccgagctgggaccttatgccctcgacaacgacagcctattcgtcaacggttttacgcacagaagttccgtgagcactacaagtacccccggtactcccacagtttatctaggggcaagcaagacaccagctagtatattcggaccaagtgcggcatcacacctgctgatactctttactctaaatttcaccatcaccaaccttagatatgaggaaaatatgtggccaggctctcggaaattcaacaccactgagcgtgtcctgcaagggctgctcagacctctgttcaagaacaccagtgtcggtccattatacagtgggtgtcggctcacactgttgcggcctgaaaaggacggggaagccacgggggtggatgctatctgtacacacaggcccgatcctaccgggcctggtttggacagagaacagctgtaccttgagctgagccagctaactcacagcataacagagcttgggccttatacccttgaccgagactccctctatgtgaatgggttcactcatagatcttcagtaccaacaacatctactggggttgtcagcgaggaaccctttacattgaatttcactatcaataatctacgctacatggccgatatgggccagcctggttcacttaagttcaacatcaccgacaacgtcatgcagcatctgctgtcacccctgttccaaagatcctctctaggggcaaggtatacaggctgcagggtgattgccctgaggagcgtgaagaacggggcagagactagggtggacctactttgtacatatctccagcccctgtctggaccaggcctgccaattaagcaggtctttcacgaactcagccagcagacccacggtatcacacgactgggtccttacagcctcgataaggacagcctgtatctcaatgggtacaacgagcctggacccgacgagccccctacaaccccgaagcctgcaaccacttttctgccacccttgtcagaggccaccaccgccatgggttatcacttgaaaactctgacgcttaattttactatttcaaatctccagtattcccccgacatggggaagggcagtgccacctttaattccactgaaggggtcctgcagcacctgttaaggcctctgtttcagaaaagtagtatgggccctttctacctcgggtgtcagcttataagcttaaggcccgagaaggatggtgccgctaccggcgttgataccacatgcacataccatcccgaccctgtcggccctggactggacattcagcagctctactgggagctctctcagctaactcatggtgttactcagctgggattctacgtgctggaccgcgacagcctgttcataaacgggtacgcacctcaaaacctctcaatcagaggtgaataccagatcaacttccacattgtcaattggaacctctccaaccctgaccctacaagctcagagtatatcacactgctccgagacatccaggataaggtgacaaccctttacaagggatcccagctgcacgacacttttaggttttgtcttgtgaccaatctgaccatggactctgtactggtgaccgtgaaagctctgttcagctctaacttggatccgagcctagttgagcaagtcttcctcgacaagacacttaatgcctcctttcattggctgggcagcacataccaactggtggatattcatgtgacagaaatggagtcaagcgtttatcaaccaactagctccagttcaactcagcacttttacttgaatttcaccataactaacctgccatatagtcaagacaaagcacagcccggtactacaaactatcagcgcaataagcggaacatcgaggatgctcttaatcagctcttccggaattcttctatcaagtcatacttcagcgactgtcaggtgagtacctttcggtctgtgcctaatagacaccacacaggggtagacagtctttgcaacttctctccactcgcacgtagagtggatcgtgtggcaatttatgaagagttcctacgcatgaccagaaacggcacccaacttcaaaacttcacactggatcggagctcagtgctggtcgacggatatagcccgaaccgtaatgagcctcttacaggcaattcagatctccccttttgggcagttattctcatcggcctcgccggattgctgggagtgattacatgtctaatttgtggagtgttggtcactacacggagacggaagaaggagggcgaatataacgtccagcagcaatgccctggttactaccaatcgcatttagatttggaggatttgcagtag

SEQ ID NO: 216318 - DNA, 1344 bp, Artificial Sequence
  derived and/or modified sequence
acagctgccggtcctctgctagtgccctttaccctgaattttaccatcacaaacttacagtacgaggaggacatgcaccaccctggatctcggaaatttaacaccaccgagcgcgtgctgcaggggctgctaggaccaatgtttaagaatacctcagtgggccttctgtactccgggtgccgcttaacccttctgcgccctgaaaagaatggcgcagcaaccgggatggacgctatctgcagccaccggctggatcccaaaagtccagggttgaatcgtgaacagctgtactgggagctgtcgcagctgacccatggcattaaagagctcgggccatacactctggaccgtaactctctgtacgtcaacgggttcactcaccgctcctctgtggctcccaccagcacaccaggaacttccaccgtggacttggggacaagcggtacaccaagttcactcccttctcctaccacagccgtgcccctgctggttcccttcacactaaactttaccatcacaaacctgcagtatggtgaagacatgagacatcctggcagtagaaagtttaacaccactgaacgggtgctgcaaggccttttggggccattgtttaagaactcctccgtgggccctctatactcaggatgccggcttataagcctaaggagtgagaaggatggcgctgccaccggcgtggacgcaatctgcacccaccacctaaatccccagagtccaggactggaccgagaacagttgtattggcaactgtctcagatgacaaacgggatcaaggagctgggcccatacacccttgaccgcaactctctctacgtcaatggcttcacccatagaagtagcggactgactactagcaccacaggccctctgctggtcccattcactctcaactttactattacaaatctccagtatgaggagaatatgggacatccaggtagccgcaagttcaatatcactgagagtgtattgcaaggattgctgaagcctcttttcaagtccacgtctgtggggcctctgtactctggctgtcggctaaccttactgagacctgagaaggacggcgtcgccaccagggttgatgctatctgtacacatcgtcccgatcctaagataccagggctggaccgccaacagctgtattgggaactttcacagctgacccattctatcactgagctaggaccctatacacttgatcgcgactcgctctacgtgaatggatttacccagaggagctcggtccccacaacaagtactccaggcaccttcaccgtgcagcccgaaacttccgaaacaccttcctctctccccggaccgacatag

SEQ ID NO: 216319 - protein, 510 aa, Artificial Sequence
  derived and/or modified sequence
MAAAALRDPAQVPVAADLLTDHEEGYVTFEDVAVYFSQEEWRLLDDAQRLLYRNVMLENFTLLASLGLASSKTHEITQLESWEEPFMPAWEVVTSAIPRGCWHGAEAEEAPEQIASVGLLSSNIQQHQKQHCGEKPLKRQEGRVPVLRSCKVHLSEKSLQSREVGKALLISSGVLKHQVTHTGEKSHRSSKSREAFHAGKRHYKCSECGKAFGQKYLLVQHQRLHAGKKTYECSECGKLFRDMSNLFIHQIVHTGERPYGCSNCGKSFSRNAHLIEHQRVHTGEKPFTCSECGKAFRHNSTLVQHHKIHTGVRPYECSECGKLFSFNSSLMKHQRIHTGERPYKCSECGKFYSHKSNLIKHWRVHTGERPYKCSDCGKFFTQCSSLMQHQKVHTGEKPFKCNECGRFFRENSTLVRHQRVHTGAKPYECRECGKFFSQSSTLMQHRKVHIGEKPFKCNECGRLFRENSSLVKHQRVHTGAKPYECRECGKFFRHNSSLFKHRRIHTGEMQ

SEQ ID NO: 216320 - DNA, 1533 bp, Artificial Sequence
  derived and/or modified sequence
atggctgcagccgcgctaagagaccctgcacaggtgcctgttgctgcagatctccttaccgatcatgaagaaggttacgtcaccttcgaggacgtggccgtctatttctcccaggaggagtggcggctgttggatgatgcacagcgcctgctgtatcgcaacgtgatgttggaaaactttacgctgctggcgagtctaggcctagcaagcagcaagactcatgagatcacacagctagaaagctgggaggagcccttcatgcctgcctgggaagtggtgacatctgctattccaaggggctgctggcacggtgcggaagcagaggaggccccagaacaaatagcctctgtcggactgctgtcctcaaatatccaacagcaccagaaacagcattgcggcgaaaagcctctcaagcgccaggaaggacgtgtcccagtcctccgttcatgcaaggtgcacctgtccgagaaatctctgcaaagtcgggaggtcggcaaggcccttctgattagttctggagtgctaaagcaccaggttactcacacaggagagaaatcgcatcgcagtagcaaatctcgtgaggcatttcacgccggaaaaagacactacaaatgttccgagtgtgggaaagcctttggccagaaatatctgctggttcagcaccagcggttacatgccggcaagaagacctacgagtgctccgagtgtggcaagctatttagggatatgtcaaatctgtttatccaccaaatcgtgcataccggggagcgcccttatggctgctctaactgcgggaaatctttcagccggaatgctcacttgatcgagcatcagcgggttcacaccggcgagaaacccttcacctgctctgaatgtgggaaggcctttagacataattctacattggtgcagcaccacaaaattcacactggcgtgcgtccctacgagtgctctgaatgcggtaagctgttttcctttaatagttctctaatgaagcatcaacggatccataccggagaacgaccctacaaatgctctgagtgcggaaagttctattcccacaagagcaacctaatcaaacattggcgagtccataccggcgagagaccctataagtgctctgattgcgggaaattcttcacacagtgctcctctctgatgcaacatcagaaggtacatacaggagaaaagccgttcaaatgcaacgagtgcggacgtttcttccgggagaactctactttagtgcgacaccagcgcgtacatacaggggccaagccttacgagtgtagagagtgcgggaagtttttcagtcaatctagcaccttaatgcagcatcggaaagtacatattggagagaaaccatttaagtgtaatgaatgcggccggctcttcagagagaattcatcactcgtaaagcaccagcgggttcataccggagccaagccctacgagtgtagggaatgcggaaagttttttaggcataactcctcactatttaagcacaggagaattcataccggggagatgcaatag

SEQ ID NO: 216321 - DNA, 1533 bp, Artificial Sequence
  derived and/or modified sequence
atggctgctgctgccctgcgggaccctgcccaggtgcctgtggccgctgacctgctgacagaccacgaggagggctacgtgacctttgaagatgtggccgtgtacttcagccaggaggagtggaggctgctggatgatgcccagaggctgctgtacagaaatgtgatgctggagaacttcaccctgctggccagcctgggcctggccagcagcaagacccatgagatcacccagctggagagctgggaggagcccttcatgcctgcctgggaggtggtgaccagcgccatcccccggggctgctggcatggagctgaggccgaggaggcccctgagcagatcgcctctgtgggcctgctgagcagcaacatccagcagcaccagaagcagcactgtggggagaagcccctgaagaggcaggagggccgggtgcctgtgctgcggagctgcaaggtgcacctgtctgagaagagcctgcagagccgggaggtgggcaaggccctgctgatcagcagcggcgtgctgaagcaccaggtgacccacactggagagaagagccacaggagcagcaagagccgggaggccttccacgccggcaagaggcactacaagtgcagtgaatgtgggaaggccttcggccagaagtacctgctggtgcagcaccagaggctgcacgccggcaagaagacctatgagtgcagtgaatgtgggaagctgttccgggacatgagcaacctcttcatccaccagatcgtgcacactggagagcggccctacggctgcagcaactgtgggaagagcttcagcagaaatgcccacctgattgagcaccagagggtgcacactggagagaagcccttcacctgcagtgaatgtgggaaggccttccgccacaacagcaccctggtgcagcaccacaagatccacactggagtgcggccctatgagtgcagtgaatgtgggaagctgttctccttcaacagcagcctgatgaagcaccagaggatccacactggagagcggccctacaagtgcagtgaatgtgggaagttctacagccacaagagcaacctgatcaagcactggagggtgcacactggagagcggccctacaagtgcagcgactgtgggaagttcttcacccagtgcagcagcctgatgcagcaccagaaggtgcacactggagagaagcccttcaagtgcaatgaatgtggccgcttcttccgggagaacagcaccctggtgcgccaccagagggtgcacactggagccaagccctatgagtgcagagaatgtgggaagttcttcagccagagcagcaccctgatgcagcacaggaaggtgcacatcggggagaagcccttcaagtgcaatgaatgtggccgcctcttccgggagaacagcagcctggtgaagcaccagagggtgcacactggagccaagccctatgagtgcagagaatgtgggaagttcttccgccacaacagcagcctcttcaagcaccggcgcatccacactggagagatgcagtag

SEQ ID NO: 216322 - DNA, 1533 bp, Artificial Sequence
  derived and/or modified sequence
atggccgccgccgccctgcgggaccccgcccaggtgcccgtggccgccgatctgctgacggaccacgaagagggctatgtcacgttcgaagacgtggctgtgtacttctctcaggaggagtggcgcttgctggatgacgctcagcggttgctttatcgcaatgtgatgctggagaatttcacactgcttgcatcgctcgggcttgcgtcgagtaagacccatgaaatcactcagttagaatcctgggaggaaccttttatgccggcctgggaggtggtgacctccgccatccctagaggctgctggcacggcgccgaagccgaggaagcaccagaacagatcgccagcgtggggttgctgagttccaacattcaacagcatcaaaaacagcactgtggggagaaaccgctcaaacgccaggaaggccgggtcccggtgctgcggtcatgcaaagtgcacttaagcgaaaaatctctgcagtcgcgagaggtgggtaaggccctactcatctcttcaggagttctaaagcaccaggtgacgcacacaggtgaaaaaagccataggagctcaaagtctagggaggccttccatgccggtaagcgacactataagtgttctgaatgcggcaaggcctttggccaaaaatatctcttggtccagcatcagcgcctccatgccggaaaaaagacgtacgagtgcagtgagtgtggcaaactttttagggacatgtccaatctgtttatccatcaaattgttcatacaggcgaacggccatatggctgctccaactgcggcaagagcttttctcggaatgcacatctgatcgagcaccaaagagtgcacacaggggagaaaccatttacctgctcggaatgcggcaaggcattcagacacaatagcaccctagtccaacatcataagattcacacaggtgttagaccttacgagtgttcggagtgcgggaaactgttctcattcaatagcagcctgatgaagcatcagagaatccacaccggggagcgaccatacaaatgcagcgagtgcggcaaattttacagccacaaaagtaatctgatcaagcattggagagtgcatacaggcgagcgcccctacaagtgcagtgactgtggcaagttttttactcagtgcagcagcctaatgcagcaccagaaagtccataccggagaaaaaccatttaagtgtaacgaatgcggcaggttttttcgtgagaacagtacgctagttagacaccagcgcgtccacacaggtgcaaagccgtacgagtgcagagagtgcggtaaattttttagtcagagttcgaccttgatgcagcacaggaaagtccatattggggaaaagccctttaagtgtaacgaatgcggccgactgtttcgcgagaattcctcactcgtcaaacatcaacgtgtgcacacaggagccaaaccctatgagtgccgcgagtgcggtaagttctttaggcacaactcaagcctgttcaagcatcggcgcattcatactggagagatgcagtag

SEQ ID NO: 216323 - DNA, 1533 bp, Artificial Sequence
  derived and/or modified sequence
atggccgcagctgcccttcgggatcctgcacaggtgccggttgccgcagacttattaacagaccacgaggaaggatacgtaactttcgaggatgtagccgtttacttttcacaggaggagtggagactcctcgatgacgcccaacgactgctgtaccgaaatgtgatgcttgaaaattttactctgctggctagtctcggcttggcttcctccaagacccatgagatcacccaactggaatcatgggaagagcctttcatgccagcctgggaggtggtcaccagcgctatcccaagaggttgctggcacggggctgaggctgaggaggccccagagcagatagccagtgtcggcctgttgagtagcaacatccaacagcatcagaagcaacactgcggcgaaaaaccactgaagaggcaggaaggacgggtacccgtgttgcgttcttgtaaggtgcacctgagcgagaagtccctgcaaagcagggaggttggaaaagcactgcttattagttccggggtccttaaacaccaggtgacccatactggtgagaaatctcacagatcttccaaaagtcgtgaggccttccacgccggaaaacggcattacaaatgtagtgaatgtggtaaagcatttggtcagaagtacttgctggtccaacatcagcggcttcatgcaggtaagaagacctacgaatgttcagaatgcggtaagctgtttcgggacatgagcaatttgttcattcatcaaatagtgcatacgggtgagagaccatacggctgcagcaactgcggaaagtccttttcccgcaatgcccatttaatcgagcatcagcgagtccacaccggagagaagccttttacctgtagcgaatgtggaaaggcttttcggcacaattccacccttgtacagcaccataagatacataccggtgtgaggccctatgaatgctctgagtgcggcaaactattctcttttaacagctcgctgatgaagcatcagcgcattcacacaggggagaggccctacaaatgctctgaatgcgggaaattctatagtcataaatctaacctgatcaagcattggagggtccacaccggtgaacgcccatacaagtgttctgattgcggaaagttttttacgcagtgttctagccttatgcagcaccaaaaagtgcacaccggggagaaacctttcaaatgcaatgagtgcgggagattctttagggagaacagtaccttggtgcgacaccagagggttcatacgggcgctaaaccgtacgagtgcagagagtgtggaaaatttttttcccagtcctcaactctgatgcagcacagaaaggtgcacatcggagaaaaaccctttaagtgcaatgagtgtggaaggctgtttagagagaactctagcctggtgaaacaccagagagtacacactggggcaaagccatacgaatgcagagaatgcgggaagttctttcgccataactccagcctgtttaagcacaggcgcatacacactggtgaaatgcagtag

SEQ ID NO: 216324 - DNA, 1533 bp, Artificial Sequence
  derived and/or modified sequence
atggccgccgccgccctgagagaccccgcccaggtgcccgtggccgccgacctgctgaccgaccacgaggagggctacgtgaccttcgaggacgtggccgtgtacttcagccaggaggagtggagactgctggacgacgcccagagactgctgtacagaaacgtgatgctggagaacttcaccctgctggccagcctgggcctggccagcagcaagacccacgagatcacccagctggagagctgggaggagcccttcatgcccgcctgggaggtggtgaccagcgccatccccagaggctgctggcacggcgccgaggccgaggaggcccccgagcagatcgccagcgtgggcctgctgagcagcaacatccagcagcaccagaagcagcactgcggcgagaagcccctgaagagacaggagggcagagtgcccgtgctgagaagctgcaaggtgcacctgagcgagaagagcctgcagagcagagaggtgggcaaggccctgctgatcagcagcggcgtgctgaagcaccaggtgacccacaccggcgagaagagccacagaagcagcaagagcagagaggccttccacgccggcaagagacactacaagtgcagcgagtgcggcaaggccttcggccagaagtacctgctggtgcagcaccagagactgcacgccggcaagaagacctacgagtgcagcgagtgcggcaagctgttcagagacatgagcaacctgttcatccaccagatcgtgcacaccggcgagagaccctacggctgcagcaactgcggcaagagcttcagcagaaacgcccacctgatcgagcaccagagagtgcacaccggcgagaagcccttcacctgcagcgagtgcggcaaggccttcagacacaacagcaccctggtgcagcaccacaagatccacaccggcgtgagaccctacgagtgcagcgagtgcggcaagctgttcagcttcaacagcagcctgatgaagcaccagagaatccacaccggcgagagaccctacaagtgcagcgagtgcggcaagttctacagccacaagagcaacctgatcaagcactggagagtgcacaccggcgagagaccctacaagtgcagcgactgcggcaagttcttcacccagtgcagcagcctgatgcagcaccagaaggtgcacaccggcgagaagcccttcaagtgcaacgagtgcggcagattcttcagagagaacagcaccctggtgagacaccagagagtgcacaccggcgccaagccctacgagtgcagagagtgcggcaagttcttcagccagagcagcaccctgatgcagcacagaaaggtgcacatcggcgagaagcccttcaagtgcaacgagtgcggcagactgttcagagagaacagcagcctggtgaagcaccagagagtgcacaccggcgccaagccctacgagtgcagagagtgcggcaagttcttcagacacaacagcagcctgttcaagcacagaagaatccacaccggcgagatgcagtag

SEQ ID NO: 216325 - DNA, 2309 bp, Artificial Sequence
  derived and/or modified sequence
gactcaggtgaactaacctgcgagaagctggttgtgcgctgaggcgaccagcgccggaaggcacggtggcgactcacgctgttctcgccgctcagaggcgggtctgaggctcggtggcggcgcccagggtggcccgggccctttcctcggtcattgtctcccctccagctctactcacaggctccgatggcggcggccgccctgagggaccccgctcaggttcctgtggctgcagacttgcttacagaccatgaggagggctatgtgacctttgaggatgtggctgtctacttctcccaggaggaatggagattgcttgatgacgctcagaggctcctctaccgcaatgtgatgctggagaactttacacttctggcctctctgggacttgcatcttccaagacccatgaaataacccagctggagtcatgggaggagcccttcatgcctgcttgggaagttgtgacttcagccataccgagaggttgttggcatggagccgaggctgaggaggctcctgagcagattgcttctgtaggactgctcagttcaaacattcagcaacaccagaagcagcactgtggagagaaacccttaaaaagacaagagggcagggtcccagttttgaggagttgcaaagttcacctatcagagaagtccttgcaaagcagggaggttgggaaggccctcctgatcagctcaggtgttctcaagcaccaggtgactcacacaggagagaagtcacataggagctccaaaagtagggaggcctttcatgctggaaaaaggcattacaaatgcagtgaatgtgggaaagcctttggtcagaaatatttacttgttcagcaccagagactacatgctgggaaaaagacgtatgaatgcagtgaatgtgggaagttatttagagatatgtccaacctttttatacaccaaatagttcacactggagaaaggccttacgggtgtagtaactgtggaaaatcctttagccgtaatgctcacctcattgaacaccagagagttcacactggagaaaagccttttacatgcagtgaatgtggaaaagctttcaggcataattccacacttgttcagcatcacaaaatccacactggagtaaggccttatgagtgcagtgaatgtggaaaattgtttagtttcaactccagcctcatgaaacatcagagaattcacactggagaaagaccttataagtgcagtgaatgtggaaaattctatagccacaagtccaaccttatcaaacattggcgtgttcatactggagaaaggccttacaagtgcagcgactgtgggaaattttttacccaatgctcaagcctcatgcaacatcaaaaagttcacactggagaaaagccttttaagtgcaatgaatgtgggagattctttagagagaattccaccctagttagacatcagagggttcacactggagcaaagccttatgagtgcagggaatgtgggaaattttttagccaaagctcaaccctcatgcaacatcgaaaagttcacattggagaaaagccttttaagtgcaatgaatgtgggagattgtttagagagaattccagccttgttaaacatcagagggttcacactggagcaaagccttatgagtgcagggaatgtgggaagttttttcgccacaactccagtctttttaaacatcgaaggattcacactggagaaatgcagtgattgtgtgaaatcctttagccagcgtttcaacctcattcaacaccagaaagttcacagtggaaaaaatcttgaaggtaacagatggaaatccgttagccacacctccagtctcattcaacactggacagtttacaatgtggacaatgtagtgaatatggaaaaaggtttcagccaaaggcctaaccctattcaacaccagaaagtttacactggagaaaggccttagggtgacaggttatgtactgtctctgaatcaatatgacctcacttaaaacagaaactctgaggatggcctttatgagggagctggcaattgaacatcattcatctaaatatgcacactggaggcaagatgagaattcctgacagattgtccttcctgagaagacagccctctgccttggagctccagagagagggagccctgtattcttggctgtacccgtcgaatggagttttgatctcgctgagtttggagttgggggaggaaaggagtggtcttggttcaaatgtgactcacttttgctgttcttgtgaatgttagatcttctttaataaatatttatttcccatacacccttatgaccatt

SEQ ID NO: 216326 - protein, 303 aa, Artificial Sequence
  derived and/or modified sequence
MAAVAVLRAFGASGPMCLRRGPWAQLPARFCSRDPAGAGRRESEPRPTSARQLDGIRNIVLSNPKKRNALSLAMLKSLQSDILHDADSNDLKVIIISAEGPVFSSGHDLKELTEEQGRDYHAEVFQTCSKVMMHIRNHPVPVIAMVNGLAAAAGCQLVASCDIAVASDKSSFATPGVNVGLFCSTPGVALARAVPRKVALEMLFTGEPISAQEALLHGLLSKVVPEAELQEETMRIARKIASLSRPVVSLGKATFYKQLPQDLGTAYYLTSQAMVDNLALRDGQEGITAFLQKRKPVWSHEPV

SEQ ID NO: 216327 - protein, 241 aa, Artificial Sequence
  derived and/or modified sequence
MAAVAVLRAFGASGPMCLRRGPWAQLPARFCSRDPAGAGRRESEPRPTSARQLDGIRSAPGRAGSSRWCRVGVRAPPLTRGGPGEPEPRLRPWGGNSPCPGPGPGSETRRNIVLSNPKKRNALSLAMLKSLQSDILHDADSNDLKVIIISAEGPVFSSGHDLKELTEEQGRDYHAEVFQTCSKVMMHIRNHPVPVIAMVNGLAAAAGCQLVASCDIAVASDKSSFATPGVNVGLFCSTPGV

SEQ ID NO: 216328 - protein, 166 aa, Artificial Sequence
  derived and/or modified sequence
MLKSLQSDILHDADSNDLKVIIISAEGPVFSSGHDLKELTEEQGRDYHAEVFQTCSKVMMHIRNHPVPVIAMVNGLAAAAGCQLVASCDIAVASDKSSFATPGVNVGLFCSTPGVALARAVPRKVALEMLFTGEPISAQEALLHGLLSKVVPEAELQEETMRIARK

SEQ ID NO: 216329 - DNA, 912 bp, Artificial Sequence
  derived and/or modified sequence
atggccgccgtggccgtgctgagagccttcggcgccagcggccccatgtgcctgagaagaggcccctgggcccagctgcccgccagattctgcagcagagaccccgccggcgccggcagaagagagagcgagcccagacccaccagcgccagacagctggacggcatcagaaacatcgtgctgagcaaccccaagaagagaaacgccctgagcctggccatgctgaagagcctgcagagcgacatcctgcacgacgccgacagcaacgacctgaaggtgatcatcatcagcgccgagggccccgtgttcagcagcggccacgacctgaaggagctgaccgaggagcagggcagagactaccacgccgaggtgttccagacctgcagcaaggtgatgatgcacatcagaaaccaccccgtgcccgtgatcgccatggtgaacggcctggccgccgccgccggctgccagctggtggccagctgcgacatcgccgtggccagcgacaagagcagcttcgccacccccggcgtgaacgtgggcctgttctgcagcacccccggcgtggccctggccagagccgtgcccagaaaggtggccctggagatgctgttcaccggcgagcccatcagcgcccaggaggccctgctgcacggcctgctgagcaaggtggtgcccgaggccgagctgcaggaggagaccatgagaatcgccagaaagatcgccagcctgagcagacccgtggtgagcctgggcaaggccaccttctacaagcagctgccccaggacctgggcaccgcctactacctgaccagccaggccatggtggacaacctggccctgagagacggccaggagggcatcaccgccttcctgcagaagagaaagcccgtgtggagccacgagcccgtgtag

SEQ ID NO: 216330 - DNA, 726 bp, Artificial Sequence
  derived and/or modified sequence
atggccgccgtggccgtgctgagagccttcggcgccagcggccccatgtgcctgagaagaggcccctgggcccagctgcccgccagattctgcagcagagaccccgccggcgccggcagaagagagagcgagcccagacccaccagcgccagacagctggacggcatcagaagcgcccccggcagagccggcagcagcagatggtgcagagtgggcgtgagagccccccccctgaccagaggcggccccggcgagcccgagcccagactgagaccctggggcggcaacagcccctgccccggccccggccccggcagcgagaccagaagaaacatcgtgctgagcaaccccaagaagagaaacgccctgagcctggccatgctgaagagcctgcagagcgacatcctgcacgacgccgacagcaacgacctgaaggtgatcatcatcagcgccgagggccccgtgttcagcagcggccacgacctgaaggagctgaccgaggagcagggcagagactaccacgccgaggtgttccagacctgcagcaaggtgatgatgcacatcagaaaccaccccgtgcccgtgatcgccatggtgaacggcctggccgccgccgccggctgccagctggtggccagctgcgacatcgccgtggccagcgacaagagcagcttcgccacccccggcgtgaacgtgggcctgttctgcagcacccccggcgtgtag

SEQ ID NO: 216331 - DNA, 501 bp, Artificial Sequence
  derived and/or modified sequence
atgctgaagagcctgcagagcgacatcctgcacgacgccgacagcaacgacctgaaggtgatcatcatcagcgccgagggccccgtgttcagcagcggccacgacctgaaggagctgaccgaggagcagggcagagactaccacgccgaggtgttccagacctgcagcaaggtgatgatgcacatcagaaaccaccccgtgcccgtgatcgccatggtgaacggcctggccgccgccgccggctgccagctggtggccagctgcgacatcgccgtggccagcgacaagagcagcttcgccacccccggcgtgaacgtgggcctgttctgcagcacccccggcgtggccctggccagagccgtgcccagaaaggtggccctggagatgctgttcaccggcgagcccatcagcgcccaggaggccctgctgcacggcctgctgagcaaggtggtgcccgaggccgagctgcaggaggagaccatgagaatcgccagaaagtag

SEQ ID NO: 216332 - DNA, 1649 bp, Artificial Sequence
  derived and/or modified sequence
cgtgccggggcggggcgtagtacggactgggcctggcctggggcgtccccgcgaagcctgggcctgtcaggcggttccgtccgggtctcggccaccgtcgagttccgtcgagttccgtcccggccctgctcacagcagcgccctcggagcgcccagcacctgcggccggccaggcagcgcgatcctgcggcgtctggccatcccgaatgctatggccgccgtcgccgtcttgcgggccttcggggcaagtgggcccatgtgtctccggcgcggcccctgggcccagctccccgcccgcttctgcagccgggacccggccggggcggggcggcgggagtcggagccgcggcccaccagcgcgcggcagctggacggcataaggaacatcgtcttgagcaatcccaagaagaggaacgcgttgtcacttgcaatgctgaagtctctccaaagtgacattcttcatgacgctgacagcaacgatctgaaagtcattatcatctcggctgaggggcctgtgttttcttctgggcatgacttaaaggagctgacagaggagcaaggccgtgattaccatgccgaagtatttcagacctgttccaaggtcatgatgcacatccggaaccaccccgttcccgtcattgccatggtcaatggcctggccgcggctgccggctgtcaactggttgccagctgcgacattgccgtggcgagcgacaagtcctcttttgccactcctggggtgaacgtcgggctcttctgttctacccctggggttgccttggcaagagcagtgcctagaaaggtggccttggagatgctctttactggtgagcccatttctgcccaggaggccctgctccacgggctgcttagcaaggtggtgccagaggcggagctgcaggaggagaccatgcggatcgctaggaagatcgcatcgctgagccgtccggtggtgtccctgggcaaagccaccttctacaagcagctgccccaggacctggggacggcttactacctcacctcccaggccatggtggacaacctggccctgcgggacgggcaggagggcatcacggccttcctccagaagagaaaacctgtctggtcacacgagccagtgtgagtggaggcagaggagtgaggcccacgggcagcgcccaggagcccaccttcccctctggcccagccaccactgcctctcagcttcaacaggtgacaggctgctttcgtgacttgatattggtgtcatagcatttggcctacattaaaagccacaatttcatggggaaaggacaaaatggagagtgactgaggtgctgacctcagtgcaaggctggtgaaccctgcagcgggccagctatggtgggaagcctggcatttggggtgctccttgcaacgtcttaagcaagcgaccccccgacatagcaaaaggtggcaacccatggaggcagaaagaaggacgccagcctgacccttatctgaaacgtcctaagcagagttaatcctggctgctcaggagaggcgacacatttcaaatctccacgagatattctccacacagaaaatcttcttgattctatagagacttaatcatgcctatggctttgaataatcttatgtgatttaaataaattaaatctttatagaga

SEQ ID NO: 216333 - DNA, 854 bp, Artificial Sequence
  derived and/or modified sequence
ccgggtctcggccaccgtcgagttccgtcgagttccgtcccggccctgctcacagcagcgccctcggagcgcccagcacctgcggccggccaggcagcgcgatcctgcggcgtctggccatcccgaatgctatggccgccgtcgccgtcttgcgggccttcggggcaagtgggcccatgtgtctccggcgcggcccctgggcccagctccccgcccgcttctgcagccgggacccggccggggcggggcggcgggagtcggagccgcggcccaccagcgcgcggcagctggacggcataaggtcagccccgggccgcgcgggctcctcgcgttggtgccgagtcggggtcagggcgccgccattgacccggggaggacccggggaaccggagccccgtttacgcccctggggagggaactccccgtgtcccggacccgggcctggcagcgagacgcgcaggaacatcgtcttgagcaatcccaagaagaggaacgcgttgtcacttgcaatgctgaagtctctccaaagtgacattcttcatgacgctgacagcaacgatctgaaagtcattatcatctcggctgaggggcctgtgttttcttctgggcatgacttaaaggagctgacagaggagcaaggccgtgattaccatgccgaagtatttcagacctgttccaaggtcatgatgcacatccggaaccaccccgttcccgtcattgccatggtcaatggcctggccgcggctgccggctgtcaactggttgccagctgcgacattgccgtggcgagcgacaagtcctcttttgccactcctggggtgaacgtcgggctcttctgttctacccctggggtt

SEQ ID NO: 216334 - DNA, 623 bp, Artificial Sequence
  derived and/or modified sequence
tagacaggaatcgcaggggtcctcacttgttttgactggtgtgtgaccctgtgattgtaaaatgttcttcacaggaacatcgtcttgagcaatcccaagaagaggaacgcgttgtcacttgcaatgctgaagtctctccaaagtgacattcttcatgacgctgacagcaacgatctgaaagtcattatcatctcggctgaggggcctgtgttttcttctgggcatgacttaaaggagctgacagaggagcaaggccgtgattaccatgccgaagtatttcagacctgttccaaggtcatgatgcacatccggaaccaccccgttcccgtcattgccatggtcaatggcctggccgcggctgccggctgtcaactggttgccagctgcgacattgccgtggcgagcgacaagtcctcttttgccactcctggggtgaacgtcgggctcttctgttctacccctggggttgccttggcaagagcagtgcctagaaaggtggccttggagatgctctttactggtgagcccatttctgcccaggaggccctgctccacgggctgcttagcaaggtggtgccagaggcggagctgcaggaggagaccatgcggatcgctaggaagat

SEQ ID NO: 216335 - DNA, 912 bp, Artificial Sequence
  derived and/or modified sequence
atggcagctgtggctgtcctacgcgctttcggcgcttccggacccatgtgcttgcgccggggcccatgggcacagctgccagccaggttctgtagtcgggatcccgccggcgctgggcgccgcgagtctgagcctcgaccaaccagcgcaaggcagctagatgggattcgcaacatagtcctgagcaatcccaaaaaacgaaatgccctctctctggccatgctgaagtccttgcagtccgatattttacatgacgccgactccaacgacctcaaagtgataatcatctccgctgagggacctgtcttcagttcagggcatgaccttaaggagctgaccgaggaacagggtcgagactatcacgcagaggtattccagacctgcagcaaagtcatgatgcatatccggaatcaccctgtccccgttattgccatggtaaatggtctcgccgcagccgccggttgtcagctggtcgcctcatgcgacatcgctgtggcctctgataagagttccttcgctactcccggcgtgaacgtaggactgttctgtagtaccccaggggttgccctggcccgcgcggtccctagaaaggtggccctcgagatgctcttcacaggagagccaatctccgctcaggaggcactcttgcacggactgctgagcaaggtcgtgccagaggctgagctacaagaagaaactatgaggattgcacgcaagatcgcctctctgtcccgtcccgtggtctctctggggaaagccacattctacaaacagttgccccaagaccttggaaccgcttattatctgaccagccaggccatggtcgataacctcgccctgagagatggtcaggagggcattacagcctttcttcagaaaaggaagcctgtgtggtcgcacgagcctgtatag

SEQ ID NO: 216336 - DNA, 726 bp, Artificial Sequence
  derived and/or modified sequence
atggcagcagttgcagttctgagagctttcggagcttctggcccaatgtgtcttaggcgaggtccctgggcccagctcccagccagattttgtagccgagacccagcgggtgccgggaggagggaatctgagccacggcccacctcggctcgtcagctcgatggcatcagatctgcccccgggcgagcaggttcatccagatggtgccgtgtgggagtgagagcgcccccactgacccggggggggccaggcgagcccgagccacgcctccgaccgtggggcggaaatagcccctgccctgggcccggcccaggtagcgaaacaaggcggaatattgtactttcaaatcccaaaaaaaggaacgccctgagccttgctatgctcaaaagcctgcagtctgatattttgcatgacgctgactctaacgatctcaaagtgatcattatttcagctgagggccccgtgtttagtagtggccatgatttgaaagaactgacagaggagcagggacgggattaccacgcagaagtttttcagacatgctcgaaggtgatgatgcacatcagaaatcacccggtcccggtgatcgcaatggttaacgggttagccgcagctgccggctgccagctcgttgcgtcatgtgacattgccgttgcttctgacaaatcttctttcgccaccccaggagtgaacgtggggctcttttgttcgacaccaggcgtttag

SEQ ID NO: 216337 - DNA, 501 bp, Artificial Sequence
  derived and/or modified sequence
atgctgaaaagcctccagtcggacatattgcacgacgctgatagcaacgacttgaaagtgattatcatctctgctgaagggcctgtattctcctcaggccacgatctgaaagagctgacagaggaacagggcagagactaccatgccgaggtcttccaaacctgtagtaaggttatgatgcatattagaaatcacccggtccccgtgattgcaatggtgaacgggctggccgcagcagccggctgccagttagtcgcaagttgtgacattgcagtggctagtgacaagagctctttcgccacacctggagttaatgtcgggctgttttgctcaacccccggcgtcgcacttgcaagagccgttcctcggaaagtggcccttgagatgctattcaccggggaaccaatttcggcacaggaggccctcctgcacggtctgctttcaaaggtagtccccgaagcggagctgcaggaggagaccatgcgcatcgcaaggaagtag

SEQ ID NO: 216338 - DNA, 912 bp, Artificial Sequence
  derived and/or modified sequence
atggctgctgtggccgtgctgcgggccttcggggccagcggccccatgtgcctgcggcggggcccctgggcccagctgcctgcccgcttctgcagccgggaccctgctggggccggccggcgggagagcgagccccggcccaccagcgcccggcagctggatggcatcagaaatattgtgctgagcaaccccaagaagagaaatgccctgagcctggccatgctgaagagcctgcagagcgacatcctgcatgatgctgacagcaatgacctgaaggtgatcatcatctctgctgagggccctgtgttcagcagcggccatgacctgaaggagctgacagaggagcagggccgggactaccacgccgaggtgttccagacctgcagcaaggtgatgatgcacatccggaaccaccctgtgcctgtgattgccatggtgaatggcctggccgctgctgctggctgccagctggtggccagctgtgacattgctgtggccagtgacaagagcagctttgccaccccaggagtgaatgtgggcctcttctgcagcaccccaggagtggccctggcccgggctgtgcccaggaaggtggccctggagatgctgttcaccggggagcccatcagcgcccaggaggccctgctgcacggcctgctgagcaaggtggtgcctgaggccgagctgcaggaggagaccatgagaattgccaggaagatcgccagcctgagcaggcctgtggtgtccctgggcaaggccaccttctacaagcagctgccccaggacctgggcacagcctactacctgaccagccaggccatggtggacaacctggccctgagagatggccaggagggcatcacagccttcctgcagaagaggaagcctgtgtggagccatgagcctgtgtag

SEQ ID NO: 216339 - DNA, 726 bp, Artificial Sequence
  derived and/or modified sequence
atggctgctgtggccgtgctgcgggccttcggggccagcggccccatgtgcctgcggcggggcccctgggcccagctgcctgcccgcttctgcagccgggaccctgctggggccggccggcgggagagcgagccccggcccaccagcgcccggcagctggatggcatccgcagcgcccctggccgggccggcagcagccgctggtgccgggtgggcgtgcgggccccacccctgacccggggcggccctggagagcctgagccccggctgcggccctggggcggcaacagcccctgccccggccctggccctggcagcgagaccaggaggaacatcgtgctgagcaaccccaagaagagaaatgccctgagcctggccatgctgaagagcctgcagagcgacatcctgcatgatgctgacagcaatgacctgaaggtgatcatcatctctgctgagggccctgtgttcagcagcggccatgacctgaaggagctgacagaggagcagggccgggactaccacgccgaggtgttccagacctgcagcaaggtgatgatgcacatccggaaccaccctgtgcctgtgattgccatggtgaatggcctggccgctgctgctggctgccagctggtggccagctgtgacattgctgtggccagtgacaagagcagctttgccaccccaggagtgaatgtgggcctcttctgcagcaccccaggagtgtag

SEQ ID NO: 216340 - DNA, 501 bp, Artificial Sequence
  derived and/or modified sequence
atgctgaagagcctgcagagcgacatcctgcatgatgctgacagcaatgacctgaaggtgatcatcatctctgctgagggccctgtgttcagcagcggccatgacctgaaggagctgacagaggagcagggccgggactaccacgccgaggtgttccagacctgcagcaaggtgatgatgcacatccggaaccaccctgtgcctgtgattgccatggtgaatggcctggccgctgctgctggctgccagctggtggccagctgtgacattgctgtggccagtgacaagagcagctttgccaccccaggagtgaatgtgggcctcttctgcagcaccccaggagtggccctggcccgggctgtgcccaggaaggtggccctggagatgctgttcaccggggagcccatcagcgcccaggaggccctgctgcacggcctgctgagcaaggtggtgcctgaggccgagctgcaggaggagaccatgagaattgccaggaagtag

SEQ ID NO: 216341 - DNA, 912 bp, Artificial Sequence
  derived and/or modified sequence
atggccgccgtggccgtgctgcgggccttcggcgccagcggccccatgtgtttgagaaggggtccttgggcgcagttgcccgcacgtttctgctctcgagaccctgctggcgcgggcagaagagagagcgagcccaggcccacatcagccaggcagctcgatggtattcgaaacattgtattatccaaccctaaaaagcggaacgcactgagtttagcaatgctgaagtctcttcagtctgacatccttcacgatgccgactcaaatgacctcaaggtgatcatcattagcgctgaaggacctgtcttcagcagtgggcacgacctgaaggagctcaccgaggaacagggccgagattatcacgccgaggtgtttcagacctgcagcaaagtgatgatgcacattcgtaaccacccggttcctgtgattgcaatggtgaacggcctagcagcagcggccggttgccagctagtggcctcctgcgatatcgcagtggcctccgataagtcctctttcgctactccgggcgtcaatgtgggtctcttctgttcaacacccggagtggctctggcgagagcagtgccaagaaaggttgctctggagatgctttttactggtgagccaatttctgcccaggaggcgctgctgcatggtttgctatcaaaggtagtacccgaggcagagttgcaagaggagacaatgcgtatcgctagaaagatagctagcctgagcaggccagtggttagccttgggaaggccacgttttataaacagctaccccaggacttggggacagcctattatctcacctctcaggcaatggtggataatctggcactgcgcgacggtcaggaaggaattaccgcttttctgcagaaacgaaagccagtgtggtctcacgaaccggtgtag

SEQ ID NO: 216342 - DNA, 726 bp, Artificial Sequence
  derived and/or modified sequence
atggccgccgtggccgtgctgcgggccttcggcgccagcggccccatgtgtctgcgcagagggccttgggcccagctacccgcaaggttttgtagtcgggatcccgccggcgccggcagaagggagagcgagcccaggcctacctcggccagacaattagatggcattagaagtgctccagggcgggcaggcagtagtagatggtgtagagtgggggtgcgcgcccctcctttgacacgtggcggccctggcgagcctgaaccacggctgcgcccttggggagggaatagcccctgcccaggacctggccctgggagtgaaacaaggagaaatattgtgctgtctaacccgaagaaacgcaatgctttgtccctggccatgcttaagtctttacaatcggacatattacatgacgccgattcaaacgatcttaaagtgattattattagtgccgaagggcccgtttttagcagcggtcacgacctgaaagagctaaccgaagaacaagggcgagattatcacgctgaagtgtttcagacatgtagcaaggtgatgatgcacatacggaatcatcctgtccctgtgatcgccatggttaacggacttgcagccgctgcaggatgtcagctggtcgcttcctgcgacatcgctgtggcatccgataaaagctctttcgccaccccaggagtcaatgtggggctcttctgctccaccccaggggtgtag

SEQ ID NO: 216343 - DNA, 501 bp, Artificial Sequence
  derived and/or modified sequence
atgctgaagagcctgcagagcgacatcctgcacgacgccgacagcaacgatctgaaagtgattatcatcagtgctgaaggccctgttttttcaagtgggcacgatctgaaagagttgaccgaagagcagggcagggattaccacgccgaggtgttccagacctgctccaaggtcatgatgcatatccggaaccacccagtgcccgttatcgccatggtgaacggtctcgcagctgccgccggatgtcagttggtcgccagctgcgatatcgctgtggccagtgacaagtcgtcctttgcaacacccggagtgaacgtgggcctgttttgttctacccctggtgtggcactcgcgagggctgtacccaggaaagttgctctcgaaatgttgttcacgggagaacccatctcagctcaggaggctttactgcatggactcctgtctaaagtcgttcccgaggcagaattacaggaggagaccatgcggatcgcacggaagtag

SEQ ID NO: 216344 - DNA, 912 bp, Artificial Sequence
  derived and/or modified sequence
atggcggctgttgcagttctccgagccttcggtgcgtcgggcccaatgtgcttgaggcggggaccgtgggcacaacttccagcacgcttttgctctagagatccagccggagccggtagaagagaatccgagccacgcccaacttcagcaaggcagttggacggtattcgcaacatagtgctcagcaacccaaaaaagcgtaatgccctttccttggctatgctaaaatccctgcagtccgacattctgcatgacgcagactccaacgacttgaaggtgatcattatctcagctgagggacccgtgttctccagtggacatgacctgaaggagctcactgaagagcagggcagagactatcacgcggaagtgtttcagacgtgttcgaaggttatgatgcacatcagaaaccatcctgtacctgttattgctatggtgaacggcctggccgctgccgcaggatgtcagctggtagctagttgtgacattgcagttgccagtgacaagtcctccttcgccacgcccggtgtgaatgtgggactgttctgctcaactcccggtgtggcgttagccagagctgtcccccgtaaggtcgcacttgagatgctcttcacaggcgagcccatttccgcccaagaggccctactgcatggcttgctttcaaaagtggttcctgaggcagaactccaggaggagaccatgcgaattgcacggaagatcgcgagcctgagtcgccctgttgtgtccctgggcaaggccaccttttacaaacagctcccgcaagacttgggtaccgcttactacctgacaagccaagcaatggtggacaacttagcacttcgagacggacaggagggcatcaccgcatttttgcagaaacggaaaccagtttggagtcacgagccagtgtag

SEQ ID NO: 216345 - DNA, 726 bp, Artificial Sequence
  derived and/or modified sequence
atggccgctgttgccgtgctacgggcattcggcgcatcagggccaatgtgcctgaggcggggtccttgggcgcagctgcccgcaagattctgtagccgcgatccggctggcgctggccgaagggagtccgagcctcggcctacctccgcaagacagctggacggcatcaggagcgcccctgggcgagccggttcaagccggtggtgtcgcgtcggagtaagggccccacctctcactagggggggacccggagagcctgagccccgtctgagaccttggggcggaaatagcccctgccctggaccaggaccaggaagcgaaacccggagaaatatcgtgttgtccaaccccaagaagaggaacgcgctaagcttggcaatgctcaaaagcctgcagtcggacattctccacgatgcagactccaacgatctcaaagtgattatcatctccgctgagggtcccgtgtttagcagtggccacgacctcaaagagttaaccgaagaacaaggcagagactatcacgccgaggtgttccagacatgtagcaaggtcatgatgcacatcagaaatcaccctgtgccggttattgctatggtgaatgggctggcagcagcagccggatgtcagttggtggccagctgtgacatcgcggtggcttctgataagagctcattcgccacacccggtgttaacgttggtctgttctgttccacacctggggtctag

SEQ ID NO: 216346 - DNA, 501 bp, Artificial Sequence
  derived and/or modified sequence
atgctgaagtcactgcaaagcgatattctccatgatgctgactccaatgatctcaaggtcatcatcatttccgcagagggacctgtgttcagtagcggtcacgatctgaaggaactgactgaggaacagggtagggattaccacgcagaagttttccagacctgttctaaagtgatgatgcacatcaggaatcatcccgtgcctgtcatcgccatggtgaatggactggccgcagctgccggttgccagcttgtggccagctgcgacattgctgtggcttctgacaaaagctcttttgccacgccaggcgtcaacgtggggttgttttgctccacccccggagttgcactggcccgtgccgttccaaggaaggtggctctggaaatgctgtttactggagaaccaatttcagctcaggaggctcttctccacggactgttatccaaggtggtccctgaagccgagctccaggaagagaccatgagaatagccaggaaatag

SEQ ID NO: 216347 - protein, 1667 aa, Artificial Sequence
  derived and/or modified sequence
MASKQTKKKEVHRINSAHGSDKSKDFYPFGSNVQSGSTEQKKGKFPLWPEWSEADINSEKWDAGKGAKEKDKTGKSPVFHFFEDPEGKIELPPSLKIYSWKRPQDILFSQTPVVVKNEITFDLFSANEHLLCSELMRWIISEIYAVWKIFNGGILSNYFKGTSGEPPLLPWKPWEHIYSLCKAVKGHMPLFNSYGKYVVKLYWMGCWRKITIDDFLPFDEDNNLLLPATTYEFELWPMLLSKAIIKLANIDIHVADRRELGEFTVIHALTGWLPEVISLHPGYMDKVWELLKEILPEFKLSDEASSESKIAVLDSKLKEPGKEGKEGKEIKDGKEVKDVKEFKPESSLTTLKAPEKSDKVPKEKADARDIGKKRSKDGEKEKFKFSLHGSRPSSEVQYSVQSLSDCSSAIQTSHMVVYATFTPLYLFENKIFSLEKMADSAEKLREYGLSHICSHPVLVTRSRSCPLVAPPKPPPLPPWKLIRQKKETVITDEAQELIVKKPERFLEISSPFLNYRMTPFTIPTEMHFVRSLIKKGIPPGSDLPSVSETDETATHSQTDLSQITKATSQGNTASQVILGKGTDEQTDFGLGDAHQSDGLNLEREIVSQTTATQEKSQEELPTTNNSVSKEIWLDFEDFCVCFQNIYIFHKPSSYCLNFQKSEFKFSEERVSYYLFVDSLKPIELLVCFSALVRWGEYGALTKDSPPIEPGLLTAETFSWKSLKPGSLVLKIHTYATKATVVRLPVGRHMLLFNAYSPVGHSIHICSMVSFVIGDEHVVLPNFEPESCRFTEQSLLIMKAIGNVIANFKDKGKLSAALKDLQTAHYPVPFHDKELTAQHFRVFHLSLWRLMKKVQITKPPPNFKFAFRAMVLDLELLNSSLEEVSLVEWLDVKYCMPTSDKEYSAEEVAAAIKIQAMWRGTYVRLLMKARIPDTKENISVADTLQKVWAVLEMNLEQYAVSLLRLMFKSKCKSLESYPCYQDEETKIAFADYTVTYQEQPPNSWFIVFRETFLVHQDMILVPKVYTTLPICILHIVNNDTMEQVPKVFQKVVPYLYTKNKKGYTFVAEAFTGDTYVAASRWKLRLIGSSAPLPCLSRDSPCNSFAIKEIRDYYIPNDKKILFRYSVKVLTPQPATIQVRTSKPDAFIKLQVLENEETMVSSTGKGQAIIPAFHFLKSEKGLSSQSSKHILSFHSASKKEQEVYVKKKAAQGIQKSPKGRAVSAIQDIGLPLVEEETTSTPTREDSSSTPLQNYKYIIQCSVLYNSWPLTESQLTFVQALKDLKKSNTKAYGERHEELINLGSPDSHTISEGQKSSVTSKTTRKGKEKSSEKEKTAKEKQAPRFEPQISTVHPQQEDPNKPYWILRLVTEHNESELFEVKKDTERADEIRAMKQAWETTEPGRAIKASQARLHYLSGFIKKTSDAESPPISESQTKPKEEVETAARGVKEPNSKNSAGSESKEMTQTGSGSAVWKKWQLTKGLRDVAKSTSSESGGVSSPGKEEREQSTRKENIQTGPRTRSPTILETSPRLIRKALEFMDLSQYVRKTDTDPLLQTDELNQQQAMQKAEEIHQFRQHRTRVLSIRNIDQEERLKLKDEVLDMYKEMQDSLDEARQKIFDIREEYRNKLLEAEHLKLETLAAQEAAMKLETEKMTPAPDTQKKKKGKKK

SEQ ID NO: 216348 - DNA, 4854 bp, Artificial Sequence
  derived and/or modified sequence
tctttgctcagagctcagccctacatagatcggcttctgccatggcctccaaacaaaccaaaaagaaagaggtgcatcgtatcaactcggcgcacggatcggataaatcgaaagatttctatccttttggcagtaatgtacaatctggttctactgaacaaaagaaggggaaattcccactctggccagagtggagtgaagctgacataaattcagaaaagtgggatgcaggcaaaggtgcaaaagaaaaggacaaaacaggaaaaagccctgtatttcatttttttgaggaccctgaaggaaagattgagttaccaccatccttgaaaatttattcctggaaacgtccacaagatattttatttagtcagactccagtagttgtgaaaaatgaaatcacgtttgacttattttcagcaaatgaacatttactctgcagcgagctgatgagatggattatcagtgaaatctatgcagtgtggaagatcttcaatggaggaattttgagcaattattttaaggggacttcaggggaacctcctcttctcccctggaagccctgggaacacatatactctctgtgcaaggctgtgaagggtcatatgcctttgttcaatagctatggaaagtatgttgtgaaactttactggatgggttgctggagaaagataacaattgatgactttttgccttttgatgaagataacaatctattgcttccagctacaacttatgaatttgaactgtggccaatgcttttgtctaaagctattatcaagctggcaaatattgacatccatgtagcagacaggagagagctgggggagttcacggttattcatgcgctcacaggatggttaccagaagtcatttctcttcacccgggatatatggacaaagtttgggagctcctgaaagaaatattgcctgagtttaagctgtcagatgaggccagctctgaaagcaaaatagcagtgttagattctaaattaaaagaaccagggaaagaagggaaggagggaaaagaaataaaggatggaaaggaagtaaaagacgtgaaggaattcaaacctgaaagttctttgacaacactaaaggctcctgagaaaagcgacaaagttccaaaggagaaagcagatgcaagagacattggaaagaagagaagcaaagatggagaaaaagaaaaattcaaattctcacttcatggttcaagaccctcatcagaagtgcagtactctgtgcagtccctatcagattgttcttctgcaatacagacctctcatatggtcgtatatgcgacatttacacctctttatttgtttgaaaacaagatcttttcattagagaagatggcagattctgctgagaaacttagagaatatgggctttcccacatctgtagccatcctgtgctggtgactagaagtaggtcttgtcctctggtagcaccaccaaaaccacctcctctacctccctggaaactcattcgtcaaaaaaaggaaactgttataacagatgaagctcaagagttaatagtaaagaagcctgaacggttccttgagatttcaagtccatttttgaattatagaatgactccatttacaattccaacagaaatgcattttgtgcgctccttaattaagaaaggaatacctccaggatctgatttaccttccgtcagtgaaactgatgaaactgcaacacatagccagacagacttgagtcaaataacaaaagctacatctcagggaaatactgcttcacaagttatacttggaaaaggcacagatgaacaaacagactttggattgggtgatgctcatcagagtgatggattaaacttggaaagagagatagtcagccagaccacagcaacacaggaaaagtcacaggaagaacttccaacaacaaataatagtgtttctaaagaaatatggttagattttgaagatttctgtgtatgctttcaaaatatatatattttccacaagccaagttcatattgccttaactttcaaaaatcagaatttaagttctcagaagaacgagtgtcctactatctatttgtagatagtctaaaacctattgaactactggtttgcttttctgcattggtacgctggggggagtatggagccttaacaaaagacagtcctcccatagagcctggacttctcacagctgaaacgttttcttggaaatccctgaaaccaggcagtcttgttctgaagattcacacatatgctaccaaggctacagtggttcgtctgcctgttgggagacacatgctactcttcaacgcatactccccagtaggacactccatacacatctgcagcatggtgtcatttgtcattggggatgaacacgttgtactgcccaactttgaaccagagagctgccgatttacggaacagtctctgttgattatgaaagctattggaaatgtgattgctaatttcaaagataagggtaaactctctgcagctttgaaggatctgcaaacagctcactaccctgtccccttccatgataaagaactaactgcacagcacttcagggtttttcatctttccttatggcgtttaatgaaaaaagttcaaataacaaaacctcctccaaacttcaaatttgcattccgggctatggttttggacttggagttactcaattcctccttggaagaggtttctttagtggaatggctggacgttaaatattgtatgcccacaagtgataaagagtattctgctgaggaagtagcagcagcaattaaaattcaagccatgtggagaggaacttacgttagattgcttatgaaagccagaataccagacacaaaagaaaatatcagtgttgcagatactcttcaaaaagtttgggctgtattggaaatgaatttagaacagtatgcagtttctctcttaagactaatgtttaaaagcaagtgcaagtctttggaatcttatccatgctatcaagatgaagaaactaagattgcttttgcagattatactgtgacttatcaagaacagccaccaaattcttggtttatagtattcagagaaacatttttggttcatcaagacatgattttggttcccaaagtatatactacacttccaatctgtatcctacacattgttaataatgacacaatggagcaagtgccaaaggtgttccaaaaagtggtgccttatctttataccaagaataagaagggatacacttttgtggcggaagcatttacaggcgacacatatgtagcagcctcacgatggaaactgcgtctcatcggttcttctgctccactgccatgcctctctcgagactctccatgcaattcctttgccataaaggaaatccgagattactacatacccaatgataagaaaattttattcaggtattcggttaaagttctaacaccacaacctgctacaatacaggtacgcacatccaaaccagatgcattcatcaagctgcaggtcctagaaaatgaagaaactatggtgagctccactggaaaaggccaagctataatcccagcatttcacttcttgaagagtgagaaaggtttgagctcccagtcttatggtgaaagacacgaggagttaattaacttaggaagcccagactcccacactattagtgagggacaaaaatcttcagtaacttccaaaacaacaaggaaaggcaaagaaaagtcttctgagaaagaaaagacagccaaagaaaaacaagcacctcgctttgagcctcagatatccactgttcaccctcaacaagaagacccaaataaaccctactggattttgaggcttctcaggctcgtttgcattaccttagcgggttcattaagaaaacatctgatgctgagagtccgcctatatctgaaagccaaactaaaccaaaagaagaagtagaaacagctgcacgtggcgtaaaagaaccaaactcaaagaattctgcaggttcagagagcaaagagatgacacaaacaggatcagggagtgcggtgtggaagaagtggcaattgaccaaaggcttgagggatgtggcaaaatccacgagtagcgaaagtggaggagtgtcttcaccagggaaagaagagcgcgagcagagcacacggaaggaaaacattcaaacaggacctcgtacacgatctccaacaattttggaaacatctccacgacttattcgaaaagcactagaatttatggatttaagtcaatatgttcggaaaacagatacagatcctctgctgcaaacagatgaattgaatcagcagcaggcaatgcaaaaggcggaagaaattcatcagtttcgacagcataggaccagagtccttagcattcgaaacattgaccaagaagagcggttgaagttaaaggatgaagtcctggatatgtataaggaaatgcaggactccttagatgaagcccgacagaaaattttcgacatccgggaagagtacagaaacaaattgctggaagctgagcacctaaagctggaaactctggctgctcaggaagcagccatgaagctggagacagaaaagatgaccccagctcctgacacacagaaaaaaaagaaaggaaagaaaaagtaaccaggggatgtccaatactaccctgcttctggagagaaaaaatctatttgtaatgatctttaactgcctgctgttaagatattaggccaaatgaaaatagaaatttctctttcttagaaatattttaatgctaacttgttagttttcctcagaaagctagtatttgaagccatttgagtttaagatgctctaatttcaataaaatagcttccaaatatttaataaaatatgtttgacactct

SEQ ID NO: 216349 - DNA, 5325 bp, Artificial Sequence
  derived and/or modified sequence
gcaacgcagacgcggagccgagcgcgcccgcaggctctttgctcagagctcagccctacatagatcggcttctgccatggcctccaaacaaaccaaaaagaaagaggtgcatcgtatcaactcggcgcacggatcggataaatcgaaagatttctatccttttggcagtaatgtacaatctggttctactgaacaaaagaaggggaaattcccactctggccagagtggagtgaagctgacataaattcagaaaagtgggatgcaggcaaaggtgcaaaagaaaaggacaaaacaggaaaaagccctgtatttcatttttttgaggaccctgaaggaaagattgagttaccaccatccttgaaaatttattcctggaaacgtccacaagatattttatttagtcagactccagtagttgtgaaaaatgaaatcacgtttgacttattttcagcaaatgaacatttactctgcagcgagctgatgagatggattatcagtgaaatctatgcagtgtggaagatcttcaatggaggaattttgagcaattattttaaggggacttcaggggaacctcctcttctcccctggaagccctgggaacacatatactctctgtgcaaggctgtgaagggtcatatgcctttgttcaatagctatggaaagtatgttgtgaaactttactggatgggttgctggagaaagataacaattgatgactttttgccttttgatgaagataacaatctattgcttccagctacaacttatgaatttgaactgtggccaatgcttttgtctaaagctattatcaagctggcaaatattgacatccatgtagcagacaggagagagctgggggagttcacggttattcatgcgctcacaggatggttaccagaagtcatttctcttcacccgggatatatggacaaagtttgggagctcctgaaagaaatattgcctgagtttaagctgtcagatgaggccagctctgaaagcaaaatagcagtgttagattctaaattaaaagaaccagggaaagaagggaaggagggaaaagaaataaaggatggaaaggaagtaaaagacgtgaaggaattcaaacctgaaagttctttgacaacactaaaggctcctgagaaaagcgacaaagttccaaaggagaaagcagatgcaagagacattggaaagaagagaagcaaagatggagaaaaagaaaaattcaaattctcacttcatggttcaagaccctcatcagaagtgcagtactctgtgcagtccctatcagattgttcttctgcaatacagacctctcatatggtcgtatatgcgacatttacacctctttatttgtttgaaaacaagatcttttcattagagaagatggcagattctgctgagaaacttagagaatatgggctttcccacatctgtagccatcctgtgctggtgactagaagtaggtcttgtcctctggtagcaccaccaaaaccacctcctctacctccctggaaactcattcgtcaaaaaaaggaaactgttataacagatgaagctcaagagttaatagtaaagaagcctgaacggttccttgagatttcaagtccatttttgaattatagaatgactccatttacaattccaacagaaatgcattttgtgcgctccttaattaagaaaggaatacctccaggatctgatttaccttccgtcagtgaaactgatgaaactgcaacacatagccagacagacttgagtcaaataacaaaagctacatctcagggaaatactgcttcacaagttatacttggaaaaggcacagatgaacaaacagactttggattgggtgatgctcatcagagtgatggattaaacttggaaagagagatagtcagccagaccacagcaacacaggaaaagtcacaggaagaacttccaacaacaaataatagtgtttctaaagaaatatggttagattttgaagatttctgtgtatgctttcaaaatatatatattttccacaagccaagttcatattgccttaactttcaaaaatcagaatttaagttctcagaagaacgagtgtcctactatctatttgtagatagtctaaaacctattgaactactggtttgcttttctgcattggtacgctggggggagtatggagccttaacaaaagacagtcctcccatagagcctggacttctcacagctgaaacgttttcttggaaatccctgaaaccaggcagtcttgttctgaagattcacacatatgctaccaaggctacagtggttcgtctgcctgttgggagacacatgctactcttcaacgcatactccccagtaggacactccatacacatctgcagcatggtgtcatttgtcattggggatgaacacgttgtactgcccaactttgaaccagagagctgccgatttacggaacagtctctgttgattatgaaagctattggaaatgtgattgctaatttcaaagataagggtaaactctctgcagctttgaaggatctgcaaacagctcactaccctgtccccttccatgataaagaactaactgcacagcacttcagggtttttcatctttccttatggcgtttaatgaaaaaagttcaaataacaaaacctcctccaaacttcaaatttgcattccgggctatggttttggacttggagttactcaattcctccttggaagaggtttctttagtggaatggctggacgttaaatattgtatgcccacaagtgataaagagtattctgctgaggaagtagcagcagcaattaaaattcaagccatgtggagaggaacttacgttagattgcttatgaaagccagaataccagacacaaaagaaaatatcagtgttgcagatactcttcaaaaagtttgggctgtattggaaatgaatttagaacagtatgcagtttctctcttaagactaatgtttaaaagcaagtgcaagtctttggaatcttatccatgctatcaagatgaagaaactaagattgcttttgcagattatactgtgacttatcaagaacagccaccaaattcttggtttatagtattcagagaaacatttttggttcatcaagacatgattttggttcccaaagtatatactacacttccaatctgtatcctacacattgttaataatgacacaatggagcaagtgccaaaggtgttccaaaaagtggtgccttatctttataccaagaataagaagggatacacttttgtggcggaagcatttacaggcgacacatatgtagcagcctcacgatggaaactgcgtctcatcggttcttctgctccactgccatgcctctctcgagactctccatgcaattcctttgccataaaggaaatccgagattactacatacccaatgataagaaaattttattcaggtattcggttaaagttctaacaccacaacctgctacaatacaggtacgcacatccaaaccagatgcattcatcaagctgcaggtcctagaaaatgaagaaactatggtgagctccactggaaaaggccaagctataatcccagcatttcacttcttgaagagtgagaaaggtttgagctcccagtctagcaagcacattctttcatttcactctgcatccaagaaagagcaagaagtgtatgttaagaagaaagctgctcagggaattcagaaatcccccaagggtagagctgtaagtgcaatacaagacattggtctaccccttgtggaggaggaaactaccagtacacccactagagaagacagttccagcacaccactgcagaattacaagtatattatacagtgttcggtgttgtataacagttggcctctcactgaaagccagctgacatttgttcaagcactgaaagacttaaagaaaagtaataccaaagcttatggtgaaagacacgaggagttaattaacttaggaagcccagactcccacactattagtgagggacaaaaatcttcagtaacttccaaaacaacaaggaaaggcaaagaaaagtcttctgagaaagaaaagacagccaaagaaaaacaagcacctcgctttgagcctcagatatccactgttcaccctcaacaagaagacccaaataaaccctactggattttgaggttggtcactgaacacaatgaatcagaattatttgaagtgaaaaaggatacagaaagggcagatgaaatccgagccatgaaacaagcctgggagacaactgagccaggaagagcaatcaaggcttctcaggctcgtttgcattaccttagcgggttcattaagaaaacatctgatgctgagagtccgcctatatctgaaagccaaactaaaccaaaagaagaagtagaaacagctgcacgtggcgtaaaagaaccaaactcaaagaattctgcaggttcagagagcaaagagatgacacaaacaggatcagggagtgcggtgtggaagaagtggcaattgaccaaaggcttgagggatgtggcaaaatccacgagtagcgaaagtggaggagtgtcttcaccagggaaagaagagcgcgagcagagcacacggaaggaaaacattcaaacaggacctcgtacacgatctccaacaattttggaaacatctccacgacttattcgaaaagcactagaatttatggatttaagtcaatatgttcggaaaacagatacagatcctctgctgcaaacagatgaattgaatcagcagcaggcaatgcaaaaggcggaagaaattcatcagtttcgacagcataggaccagagtccttagcattcgaaacattgaccaagaagagcggttgaagttaaaggatgaagtcctggatatgtataaggaaatgcaggactccttagatgaagcccgacagaaaattttcgacatccgggaagagtacagaaacaaattgctggaagctgagcacctaaagctggaaactctggctgctcaggaagcagccatgaagctggagacagaaaagatgaccccagctcctgacacacagaaaaaaaagaaaggaaagaaaaagtaaccaggggatgtccaatactaccctgcttctggagagaaaaaatctatttgtaatgatctttaactgcctgctgttaagatattaggccaaatgaaaatagaaatttctctttcttagaaatattttaatgctaacttgttagttttcctcagaaagctagtatttgaagccatttgagtttaagatgctctaatttcaataaaatagcttccaaatatttaataaaatatgtttgacactctaaa

SEQ ID NO: 216350 - DNA, 2142 bp, Artificial Sequence
  derived and/or modified sequence
accgacgagcagaccgacttcggcctgggcgacgcccaccagagcgacggcctgaacctggagagagagatcgtgagccagaccaccgccacccaggagaagagccaggaggagctgcccaccaccaacaacagcgtgagcaaggagatctggctggacttcgaggacttctgcgtgtgcttccagaacatctacatcttccacaagcccagcagctactgcctgaacttccagaagagcgagttcaagttcagcgaggagagagtgagctactacctgttcgtggacagcctgaagcccatcgagctgctggtgtgcttcagcgccctggtgagatggggcgagtacggcgccctgaccaaggacagcccccccatcgagcccggcctgctgaccgccgagaccttcagctggaagagcctgaagcccggcagcctggtgctgaagatccacacctacgccaccaaggccaccgtggtgagactgcccgtgggcagacacatgctgctgttcaacgcctacagccccgtgggccacagcatccacatctgcagcatggtgagcttcgtgatcggcgacgagcacgtggtgctgcccaacttcgagcccgagagctgcagattcaccgagcagagcctgctgatcatgaaggccatcggcaacgtgatcgccaacttcaaggacaagggcaagctgagcgccgccctgaaggacctgcagaccgcccactaccccgtgcccttccacgacaaggagctgaccgcccagcacttcagagtgttccacctgagcctgtggagactgatgaagaaggtgcagatcaccaagcccccccccaacttcaagttcgccttcagagccatggtgctggacctggagctgctgaacagcagcctggaggaggtgagcctggtggagtggctggacgtgaagtactgcatgcccaccagcgacaaggagtacagcgccgaggaggtggccgccgccatcaagatccaggccatgtggagaggcacctacgtgagactgctgatgaaggccagaatccccgacaccaaggagaacatcagcgtggccgacaccctgcagaaggtgtgggccgtgctggagatgaacctggagcagtacgccgtgagcctgctgagactgatgttcaagagcaagtgcaagagcctggagagctacccctgctaccaggacgaggagaccaagatcgccttcgccgactacaccgtgacctaccaggagcagccccccaacagctggttcatcgtgttcagagagaccttcctggtgcaccaggacatgatcctggtgcccaaggtgtacaccaccctgcccatctgcatcctgcacatcgtgaacaacgacaccatggagcaggtgcccaaggtgttccagaaggtggtgccctacctgtacaccaagaacaagaagggctacaccttcgtggccgaggccttcaccggcgacacctacgtggccgccagcagatggaagctgagactgatcggcagcagcgcccccctgccctgcctgagcagagacagcccctgcaacagcttcgccatcaaggagatcagagactactacatccccaacgacaagaagatcctgttcagatacagcgtgaaggtgctgaccccccagcccgccaccatccaggtgagaaccagcaagcccgacgccttcatcaagctgcaggtgctggagaacgaggagaccatggtgagcagcaccggcaagggccaggccatcatccccgccttccacttcctgaagagcgagaagggcctgagcagccagagctacggcgagagacacgaggagctgatcaacctgggcagccccgacagccacaccatcagcgagggccagaagagcagcgtgaccagcaagaccaccagaaagggcaaggagaagagcagcgagaaggagaagaccgccaaggagaagcaggcccccagattcgagccccagatcagcaccgtgcacccccagcaggaggaccccaacaagccctactggatcctgagactgctgagactggtgtgcatcaccctggccggcagcctgagaaagcacctgatgctgagagtgagactgtacctgaaggccaagctgaaccagaagaagaagtag

SEQ ID NO: 216351 - DNA, 5004 bp, Artificial Sequence
  derived and/or modified sequence
atggccagcaagcagaccaagaagaaggaggtgcacagaatcaacagcgcccacggcagcgacaagagcaaggacttctaccccttcggcagcaacgtgcagagcggcagcaccgagcagaagaagggcaagttccccctgtggcccgagtggagcgaggccgacatcaacagcgagaagtgggacgccggcaagggcgccaaggagaaggacaagaccggcaagagccccgtgttccacttcttcgaggaccccgagggcaagatcgagctgccccccagcctgaagatctacagctggaagagaccccaggacatcctgttcagccagacccccgtggtggtgaagaacgagatcaccttcgacctgttcagcgccaacgagcacctgctgtgcagcgagctgatgagatggatcatcagcgagatctacgccgtgtggaagatcttcaacggcggcatcctgagcaactacttcaagggcaccagcggcgagccccccctgctgccctggaagccctgggagcacatctacagcctgtgcaaggccgtgaagggccacatgcccctgttcaacagctacggcaagtacgtggtgaagctgtactggatgggctgctggagaaagatcaccatcgacgacttcctgcccttcgacgaggacaacaacctgctgctgcccgccaccacctacgagttcgagctgtggcccatgctgctgagcaaggccatcatcaagctggccaacatcgacatccacgtggccgacagaagagagctgggcgagttcaccgtgatccacgccctgaccggctggctgcccgaggtgatcagcctgcaccccggctacatggacaaggtgtgggagctgctgaaggagatcctgcccgagttcaagctgagcgacgaggccagcagcgagagcaagatcgccgtgctggacagcaagctgaaggagcccggcaaggagggcaaggagggcaaggagatcaaggacggcaaggaggtgaaggacgtgaaggagttcaagcccgagagcagcctgaccaccctgaaggcccccgagaagagcgacaaggtgcccaaggagaaggccgacgccagagacatcggcaagaagagaagcaaggacggcgagaaggagaagttcaagttcagcctgcacggcagcagacccagcagcgaggtgcagtacagcgtgcagagcctgagcgactgcagcagcgccatccagaccagccacatggtggtgtacgccaccttcacccccctgtacctgttcgagaacaagatcttcagcctggagaagatggccgacagcgccgagaagctgagagagtacggcctgagccacatctgcagccaccccgtgctggtgaccagaagcagaagctgccccctggtggccccccccaagcccccccccctgcccccctggaagctgatcagacagaagaaggagaccgtgatcaccgacgaggcccaggagctgatcgtgaagaagcccgagagattcctggagatcagcagccccttcctgaactacagaatgacccccttcaccatccccaccgagatgcacttcgtgagaagcctgatcaagaagggcatcccccccggcagcgacctgcccagcgtgagcgagaccgacgagaccgccacccacagccagaccgacctgagccagatcaccaaggccaccagccagggcaacaccgccagccaggtgatcctgggcaagggcaccgacgagcagaccgacttcggcctgggcgacgcccaccagagcgacggcctgaacctggagagagagatcgtgagccagaccaccgccacccaggagaagagccaggaggagctgcccaccaccaacaacagcgtgagcaaggagatctggctggacttcgaggacttctgcgtgtgcttccagaacatctacatcttccacaagcccagcagctactgcctgaacttccagaagagcgagttcaagttcagcgaggagagagtgagctactacctgttcgtggacagcctgaagcccatcgagctgctggtgtgcttcagcgccctggtgagatggggcgagtacggcgccctgaccaaggacagcccccccatcgagcccggcctgctgaccgccgagaccttcagctggaagagcctgaagcccggcagcctggtgctgaagatccacacctacgccaccaaggccaccgtggtgagactgcccgtgggcagacacatgctgctgttcaacgcctacagccccgtgggccacagcatccacatctgcagcatggtgagcttcgtgatcggcgacgagcacgtggtgctgcccaacttcgagcccgagagctgcagattcaccgagcagagcctgctgatcatgaaggccatcggcaacgtgatcgccaacttcaaggacaagggcaagctgagcgccgccctgaaggacctgcagaccgcccactaccccgtgcccttccacgacaaggagctgaccgcccagcacttcagagtgttccacctgagcctgtggagactgatgaagaaggtgcagatcaccaagcccccccccaacttcaagttcgccttcagagccatggtgctggacctggagctgctgaacagcagcctggaggaggtgagcctggtggagtggctggacgtgaagtactgcatgcccaccagcgacaaggagtacagcgccgaggaggtggccgccgccatcaagatccaggccatgtggagaggcacctacgtgagactgctgatgaaggccagaatccccgacaccaaggagaacatcagcgtggccgacaccctgcagaaggtgtgggccgtgctggagatgaacctggagcagtacgccgtgagcctgctgagactgatgttcaagagcaagtgcaagagcctggagagctacccctgctaccaggacgaggagaccaagatcgccttcgccgactacaccgtgacctaccaggagcagccccccaacagctggttcatcgtgttcagagagaccttcctggtgcaccaggacatgatcctggtgcccaaggtgtacaccaccctgcccatctgcatcctgcacatcgtgaacaacgacaccatggagcaggtgcccaaggtgttccagaaggtggtgccctacctgtacaccaagaacaagaagggctacaccttcgtggccgaggccttcaccggcgacacctacgtggccgccagcagatggaagctgagactgatcggcagcagcgcccccctgccctgcctgagcagagacagcccctgcaacagcttcgccatcaaggagatcagagactactacatccccaacgacaagaagatcctgttcagatacagcgtgaaggtgctgaccccccagcccgccaccatccaggtgagaaccagcaagcccgacgccttcatcaagctgcaggtgctggagaacgaggagaccatggtgagcagcaccggcaagggccaggccatcatccccgccttccacttcctgaagagcgagaagggcctgagcagccagagcagcaagcacatcctgagcttccacagcgccagcaagaaggagcaggaggtgtacgtgaagaagaaggccgcccagggcatccagaagagccccaagggcagagccgtgagcgccatccaggacatcggcctgcccctggtggaggaggagaccaccagcacccccaccagagaggacagcagcagcacccccctgcagaactacaagtacatcatccagtgcagcgtgctgtacaacagctggcccctgaccgagagccagctgaccttcgtgcaggccctgaaggacctgaagaagagcaacaccaaggcctacggcgagagacacgaggagctgatcaacctgggcagccccgacagccacaccatcagcgagggccagaagagcagcgtgaccagcaagaccaccagaaagggcaaggagaagagcagcgagaaggagaagaccgccaaggagaagcaggcccccagattcgagccccagatcagcaccgtgcacccccagcaggaggaccccaacaagccctactggatcctgagactggtgaccgagcacaacgagagcgagctgttcgaggtgaagaaggacaccgagagagccgacgagatcagagccatgaagcaggcctgggagaccaccgagcccggcagagccatcaaggccagccaggccagactgcactacctgagcggcttcatcaagaagaccagcgacgccgagagcccccccatcagcgagagccagaccaagcccaaggaggaggtggagaccgccgccagaggcgtgaaggagcccaacagcaagaacagcgccggcagcgagagcaaggagatgacccagaccggcagcggcagcgccgtgtggaagaagtggcagctgaccaagggcctgagagacgtggccaagagcaccagcagcgagagcggcggcgtgagcagccccggcaaggaggagagagagcagagcaccagaaaggagaacatccagaccggccccagaaccagaagccccaccatcctggagaccagccccagactgatcagaaaggccctggagttcatggacctgagccagtacgtgagaaagaccgacaccgaccccctgctgcagaccgacgagctgaaccagcagcaggccatgcagaaggccgaggagatccaccagttcagacagcacagaaccagagtgctgagcatcagaaacatcgaccaggaggagagactgaagctgaaggacgaggtgctggacatgtacaaggagatgcaggacagcctggacgaggccagacagaagatcttcgacatcagagaggagtacagaaacaagctgctggaggccgagcacctgaagctggagaccctggccgcccaggaggccgccatgaagctggagaccgagaagatgacccccgcccccgacacccagaagaagaagaagggcaagaagaagtag

SEQ ID NO: 216352 - DNA, 2142 bp, Artificial Sequence
  derived and/or modified sequence
actgacgagcagaccgattttggcttgggggatgcccatcagagcgatggactcaacctggagcgagagatcgtaagtcaaaccacggctacacaggaaaaaagccaggaggaactccctactaccaacaattccgtatctaaggagatctggctggattttgaggacttttgtgtatgctttcagaatatatacatttttcacaagccatcctcttactgtctgaactttcaaaaatccgaattcaagttttctgaagagcgggtttcctattatttgtttgtcgactccctgaagccgatcgaactgctggtgtgtttttcggccctggtgcggtggggagaatacggtgcgctgacgaaagactcaccacctatcgagcctggcctcctgaccgcagaaaccttctcatggaagtccttaaagccaggtagtctggtcctaaagattcacacgtacgctaccaaggcaacagttgtccgcctgcctgttggacgccacatgctcctgtttaacgcctattctcccgtaggccactctatccatatatgttccatggttagctttgtgattggggacgaacatgtcgtcttacccaattttgaaccagaaagctgcagatttactgagcaatcacttctgataatgaaagctatcggcaacgttatcgccaacttcaaagacaagggaaaactgagtgccgctttaaaggatctgcaaacagcccactaccctgtcccttttcatgataaggaactcacagcccagcatttcagggtgttccaccttagcctgtggaggctaatgaaaaaagtacagatcaccaaaccacctccaaattttaaatttgcgttcagagcaatggtcctcgatctggagttacttaacagcagcttagaggaggtatctcttgtcgaatggctggatgtgaaatactgcatgcccacctcagataaggaatactcagcggaggaggtggcagctgccatcaaaattcaggccatgtggcggggcacgtacgtacgcctgctgatgaaagctcgaatcccagataccaaagaaaatatctctgtcgccgatacgctgcagaaggtctgggctgtgctggaaatgaatctcgaacaatatgctgtctcactgctgagactcatgttcaagagcaagtgcaaaagtctggaaagttatccttgttatcaggacgaagagactaagatcgcgttcgctgattacactgtaacgtaccaggaacaacctcccaactcttggtttatcgtgttccgcgagacattcctggtccaccaggatatgatcctagtgcctaaagtgtacacgaccctgccgatatgcatccttcacattgtgaataacgacaccatggaacaggtgcccaaggtattccaaaaggtggttccatacctctacacaaaaaacaaaaagggatatacttttgtggccgaggcctttactggcgacacctacgtggccgccagcaggtggaagctcagactgatcggatcaagcgccccgctaccatgtttaagcagagactcaccatgtaatagtttcgcaatcaaagaaataagagattactacatcccgaatgataagaaaatcctcttcaggtactctgtgaaggttttgacaccacagcctgctacaattcaggtgagaacaagcaagccagatgccttcattaagttacaggttcttgagaacgaggagaccatggtgagtagtacggggaaaggccaggccattataccagcctttcacttcctgaaatcagagaaggggctttccagtcaaagctatggagagcgtcatgaggagctcattaacctgggatcgcccgattctcacaccatcagtgaggggcaaaagtcctcagttacctccaagaccacacggaagggcaaggagaagtctagcgagaaggaaaagactgcaaaagagaagcaggcgcccagatttgaaccccagatctctacagtccatcctcagcaggaggaccctaacaaaccctattggatcctaaggctccttcgcctggtttgtataaccttagccggtagcctcagaaaacatctgatgctgcgagtgcgattgtatctgaaagccaagctgaaccagaaaaaaaagtag

SEQ ID NO: 216353 - DNA, 5004 bp, Artificial Sequence
  derived and/or modified sequence
atggcaagcaagcaaaccaagaaaaaggaggtgcacaggatcaattcagcacatggctccgataagagtaaagatttctacccctttggcagtaatgtccagtcggggagcaccgaacagaagaaaggcaagtttcccctgtggccagagtggagtgaggctgacattaactccgaaaagtgggacgccggtaagggtgcaaaggagaaagataaaacaggtaaatctcctgtatttcacttttttgaggatcctgagggcaaaatcgaactgcccccgtcccttaaaatctactcttggaagcgaccacaggatattctcttttctcagacaccagtggtggtgaaaaacgagatcaccttcgacttattctctgctaatgaacacttactgtgttctgagctcatgcgctggattatctcagagatctacgccgtgtggaaaatctttaacggcggaatactgtccaactacttcaagggcacgtcaggagaacctcccctcttaccgtggaagccctgggaacacatctacagcctgtgcaaagcggtaaagggacacatgcctttgttcaattcctatggtaagtatgtcgttaaattgtattggatgggatgttggcggaaaatcactattgacgacttcttgcccttcgatgaggacaataacctgctgcttcccgcaacgacatacgagtttgagctctggccaatgctcttgtcgaaagccatcatcaagctggctaatatagatatccacgtggcagaccgccgtgaacttggggaattcaccgtgatccatgccttgactggttggcttcctgaagtgatcagtttgcatccggggtacatggacaaagtatgggaacttctcaaggagattctgcccgaatttaagcttagtgatgaggcctctagcgaaagcaaaatcgcggtgcttgactccaaattgaaggagcccggtaaggaggggaaagagggtaaggagattaaagacggcaaggaagtgaaagatgtcaaagagtttaaaccggaatcatccctgactactctgaaagctccagagaagtctgataaagtgcctaaggagaaagccgacgcccgagatatcggcaagaagaggtctaaggacggtgagaaggagaaattcaaatttagcctccatggttcccgcccctcctcagaggtgcagtactcagttcagtcattgtctgactgtagttccgccatccagaccagtcatatggtggtgtacgctacctttacacccctctacttgtttgagaacaagatttttagcttggagaagatggccgattcagcagagaagctcagggaatatgggctgtcacatatatgctcccaccccgtgctggtaacacgaagtcgaagctgtccactggtggcacctcccaagccaccaccactgcccccatggaaacttatacggcaaaaaaaagaaactgtgattactgatgaggcgcaggaattgatcgtgaaaaaaccggagcgctttttagagatttcttccccattccttaattaccggatgacacccttcacgattcccacggagatgcatttcgtgcggtctttaatcaagaagggaatccccccgggatccgacctgccatcagtgtcagaaaccgatgagacagctacacactcccaaaccgacctgtcacagattacaaaagctacgagccaggggaatacggcatctcaggtcattctgggcaagggtaccgacgagcagacagactttgggctgggggatgcccatcagtcagacgggctgaatcttgagcgagagattgttagtcagactacggccacccaagagaagtctcaggaggaattacctacaaccaacaacagtgtctccaaggaaatatggctagatttcgaggacttttgtgtgtgttttcagaacatatacatctttcataaacccagcagctactgtttgaactttcagaagagtgagtttaagttcagtgaagagcgcgtctcatattatctcttcgtggacagtctgaaaccaatcgagctgctggtatgtttctcagctttagtgcggtggggagaatacggggctttaacaaaggactctccacctattgaaccgggactgctgaccgctgagacattcagttggaagagtctgaagcccggaagcttggtcctcaaaatccacacctatgctacaaaggcaacagttgttagactccccgtggggcgccatatgttgctgtttaacgcttattccccagtcggccacagtatccacatctgttcgatggtttccttcgttatcggggatgaacacgtagtgctgcctaattttgagcccgagtcttgccgctttactgagcagtcactcctgatcatgaaggccattggcaatgtaattgcaaatttcaaggataagggaaaactgagtgccgctctcaaggacctgcagacagcccattatcctgtgcccttccatgacaaagagctcactgcccagcatttccgtgtgttccacttatcactgtggaggctgatgaagaaggtccaaataacaaaaccaccgcccaatttcaaatttgcctttcgcgctatggtgctggacctcgagttgcttaatagtagcctcgaggaggtctccctggtggaatggcttgatgtgaaatactgcatgcctacatcagataaggaatacagcgcagaagaagtcgccgcggccattaagattcaggccatgtggagaggaacgtacgttaggctgttgatgaaggcccggatacccgatactaaggagaatatcagcgtagccgacacactgcagaaggtctgggctgtgctcgagatgaacctggaacaatacgctgtctctctgttgcggttgatgttcaagagtaaatgcaaatctctggagtcatatccttgttaccaggacgaagagactaagatcgcatttgctgactacacagttacctatcaagaacagccccctaacagttggttcatcgtgttcagggagactttccttgtgcatcaggacatgattctggttcccaaggtgtatacgacgctgcctatatgtattctgcacattgtaaacaatgatacgatggagcaagtcccgaaggtcttccagaaagtcgtgccttacctatataccaagaataaaaaggggtacacctttgtggctgaggctttcactggtgacacgtacgtcgcagcgtcccggtggaagttaagactaatcggttctagtgcccctctcccctgtctgtctcgcgattccccctgcaactcattcgcgataaaggaaataagagattattatattcccaacgacaaaaagattttgtttaggtactctgttaaggtgctcacacctcaacccgccaccattcaagtgcgtacgagtaaacctgacgcctttatcaaactgcaggtattagaaaatgaagaaaccatggtgtcgtccaccggcaagggtcaggccatcatccctgcatttcacttcctgaaatcagagaaaggactctcatcacagagctctaaacacatcctatcattccatagtgcaagcaaaaaagagcaggaagtttatgtaaaaaaaaaggcggcacagggcatacagaagagcccaaagggaagagccgtgagtgccattcaggatattggcttacccctggtggaagaggaaactacttcaacacctacgagagaagacagctctagcactcctctgcaaaactacaaatacattattcagtgtagcgtgctttacaactcctggcctctgaccgaatcacagctgactttcgtgcaagccctgaaggacctaaagaagagcaacactaaagcttacggagaaaggcatgaggagctaatcaatctgggcagtcccgacagccatacaatcagtgaggggcagaagagctcagtcacctctaagactacacggaaaggcaaggagaaaagttctgaaaaagaaaaaacagcaaaggagaagcaagccccccgctttgagccacaaatttctactgtccatccccaacaagaggatcctaataaaccttactggattttgcggctggtcaccgagcacaacgagtcggagctctttgaagtgaaaaaggacaccgaacgcgctgacgagattcgcgcgatgaagcaggcgtgggaaacaactgaaccaggaagggccatcaaagcttctcaagcgcgcctccactacttatcagggtttatcaaaaagactagcgacgcagaatcccccccaatctctgagtcacagactaaaccaaaggaagaagtggagacggctgctcgcggcgtgaaagagcccaacagcaagaacagtgctggctcagaaagcaaagagatgacccagacaggaagcggctctgccgtatggaaaaaatggcaactgactaaggggctcagagatgttgccaagagcaccagctcagagagcggtggggtgagctcccctgggaaggaggaacgtgagcaatccacaaggaaggagaatatacagacaggacctcggacccgttcccccactatcctagaaacgtctccccgacttatcagaaaagctctcgagtttatggatctttcccaatatgtgcgcaagactgacacagatccgctgttacagactgatgaactaaaccaacagcaagctatgcagaaggctgaagaaattcaccagttcaggcagcacaggactcgggtgctgtctatccgcaacatcgatcaggaagaaagattgaaactgaaggacgaggtactggacatgtacaaggagatgcaggattctctggacgaggccagacaaaaaatattcgacattagggaggagtaccgaaacaaactgctggaggcagaacacctaaagctagaaactctggctgctcaggaggcagccatgaaactcgaaaccgagaagatgaccccagctcctgacacccagaagaaaaaaaagggcaaaaaaaaatag

SEQ ID NO: 216354 - DNA, 2142 bp, Artificial Sequence
  derived and/or modified sequence
acagatgagcagacagactttggcctgggagatgcccaccagagtgatggcctgaacctggagcgggagatcgtgtcccagaccacagccacccaggagaagagccaggaggagctgcccaccaccaacaacagcgtgtccaaggagatctggctggactttgaggacttctgtgtgtgcttccagaacatctacatcttccacaagcccagcagctactgcctgaacttccagaagtctgagttcaagttcagcgaggagcgggtgtcctactacctgtttgtggacagcctgaagcccatcgagctgctggtgtgcttcagcgccctggtgcgctggggcgagtatggagccctgaccaaggacagcccccccatcgagcccggcctgctgacagctgagaccttctcctggaagagcctgaagccaggcagcctggtgctgaagatccacacctacgccaccaaggccaccgtggtgcggctgcctgtgggccgccacatgctgctcttcaatgcctacagccctgtgggccacagcatccacatctgcagcatggtgtcctttgtgattggagatgaacatgtggtgctgcccaactttgagcctgagagctgccgcttcacagagcagagcctgctgatcatgaaggccatcggaaatgtgattgccaacttcaaggacaagggcaagctgtctgctgccctgaaggacctgcagacagcccactaccctgtgcccttccatgacaaggagctgacagcccagcacttccgggtcttccacctgagcctgtggaggctgatgaagaaggtgcagatcaccaagcccccacccaacttcaagtttgccttccgggccatggtgctggacctggagctgctgaacagcagcctggaggaggtgtccctggtggagtggctggatgtgaagtactgcatgcccaccagtgacaaggagtacagcgctgaggaggtggccgccgccatcaagatccaggccatgtggaggggcacctacgtgcggctgctgatgaaggcccgcatcccagacaccaaggagaacatctctgtggccgacaccctgcagaaggtgtgggccgtgctggagatgaacctggagcagtatgctgtgtccctgctgcggctgatgttcaagagcaagtgcaagagcctggagagctacccctgctaccaggatgaggagaccaagatcgcctttgctgactacacagtgacctaccaggagcagccccccaacagctggttcatcgtgttccgggagaccttcctggtgcaccaggacatgatcctggtgcccaaggtgtacaccaccctgcccatctgcatcctgcacatcgtgaacaatgacaccatggagcaggtgcccaaggtgttccagaaggtggtgccctacctgtacaccaagaacaagaagggctacacctttgtggccgaggccttcaccggggacacctacgtggccgccagccgctggaagctgcggctcatcggcagcagcgcccccctgccctgcctgagccgggacagcccctgcaacagctttgccatcaaggagatccgggactactacatccccaatgacaagaagatcctcttccgctacagcgtgaaggtgctgaccccccagcctgccaccatccaggtgaggaccagcaagccagatgccttcatcaagctgcaggtgctggagaatgaggagaccatggtgagcagcacaggcaagggccaggccatcatcccagccttccacttcctgaagtctgagaagggcctgagcagccagagctatggagagagacatgaggagctgatcaacctgggcagcccagacagccacaccatcagcgagggccagaagagctctgtgaccagcaagaccaccaggaagggcaaggagaagagcagcgagaaggagaagacagccaaggagaagcaggcccccaggtttgagccccagatcagcacagtgcacccccagcaggaggaccccaacaagccctactggatcctgcggctgctgcggctggtgtgcatcaccctggccggcagcctgaggaagcacctgatgctgcgggtgcggctgtacctgaaggccaagctgaaccagaagaagaagtag

SEQ ID NO: 216355 - DNA, 5004 bp, Artificial Sequence
  derived and/or modified sequence
atggccagcaagcagaccaagaagaaggaggtgcaccgcatcaacagcgcccacggcagtgacaagagcaaggacttctaccccttcggcagcaatgtgcagagcggcagcacagagcagaagaagggcaagttccccctgtggccagagtggagcgaggccgacatcaacagcgagaagtgggatgctggaaaaggagccaaggagaaggacaagacaggcaagagccctgtgttccacttctttgaagatcctgagggcaagattgagctgccccccagcctgaagatctacagctggaagaggccccaggacatcctcttcagccagacccctgtggtggtgaagaatgagatcacctttgacctcttcagcgccaatgagcacctgctgtgcagcgagctgatgcgctggatcatcagcgagatctatgctgtgtggaagatcttcaatggaggcatcctgagcaactacttcaagggcaccagcggggagccccccctgctgccctggaagccctgggagcacatctacagcctgtgcaaggctgtgaagggccacatgcccctcttcaacagctatggcaagtatgtggtgaagctgtactggatgggctgctggaggaagatcaccattgatgacttcctgccctttgatgaggacaacaacctgctgctgcctgccaccacctatgaatttgagctgtggcccatgctgctgagcaaggccatcatcaagctggccaacatcgacatccacgtggccgacagaagagagctgggggagttcaccgtcatccacgccctgaccggctggctgcctgaggtgatcagcctgcaccctggctacatggacaaggtgtgggagctgctgaaggagatcctgcctgagttcaagctgagtgatgaggccagcagcgagagcaagattgctgtgctggacagcaagctgaaggagcccgggaaggagggcaaggagggcaaggagatcaaggatggcaaggaggtgaaggatgtgaaggagttcaagccagagagcagcctgaccaccctgaaggcccctgagaagagtgacaaggtgcccaaggagaaggcagatgcccgggacatcggcaagaagaggagcaaggatggagagaaggagaagttcaagttcagcctgcacggcagccggcccagcagcgaggtgcagtacagcgtgcagagcctgagtgactgcagcagcgccatccagaccagccacatggtggtgtatgccaccttcacccccctgtacctgtttgagaacaagatcttcagcctggagaagatggctgacagcgctgagaagctgcgggagtatggcctgagccacatctgcagccaccctgtgctggtgaccaggagccgcagctgccccctggtggccccacccaagcccccacccctgcccccctggaagctgatccggcagaagaaggagaccgtcatcacagatgaggcccaggagctgattgtgaagaagccagagcgcttcctggagatcagcagccccttcctgaactacaggatgacccccttcaccatccccacagagatgcactttgtgcgcagcctcatcaagaagggcatccccccaggcagtgacctgcccagcgtgtctgaaacagatgaaacagccacccacagccagacagacctgagccagatcaccaaggccaccagccagggcaacacagccagccaggtgatcctgggcaagggcacagatgagcagacagactttggcctgggagatgcccaccagagtgatggcctgaacctggagcgggagatcgtgtcccagaccacagccacccaggagaagagccaggaggagctgcccaccaccaacaacagcgtgtccaaggagatctggctggactttgaggacttctgtgtgtgcttccagaacatctacatcttccacaagcccagcagctactgcctgaacttccagaagtctgagttcaagttcagcgaggagcgggtgtcctactacctgtttgtggacagcctgaagcccatcgagctgctggtgtgcttcagcgccctggtgcgctggggcgagtatggagccctgaccaaggacagcccccccatcgagcccggcctgctgacagctgagaccttctcctggaagagcctgaagccaggcagcctggtgctgaagatccacacctacgccaccaaggccaccgtggtgcggctgcctgtgggccgccacatgctgctcttcaatgcctacagccctgtgggccacagcatccacatctgcagcatggtgtcctttgtgattggagatgagcacgtggtgctgcccaactttgagcctgagagctgccgcttcacagagcagagcctgctgatcatgaaggccatcggaaatgtcatcgccaacttcaaggacaagggcaagctgtctgctgccctgaaggacctgcagacagcccactaccctgtgcccttccatgacaaggagctgacagcccagcacttccgggtcttccacctgagcctgtggaggctgatgaagaaggtgcagatcaccaagcccccacccaacttcaagtttgccttccgggccatggtgctggacctggagctgctgaacagcagcctggaggaggtgtccctggtggagtggctggatgtgaagtactgcatgcccaccagtgacaaggagtacagcgctgaggaggtggccgccgccatcaagatccaggccatgtggaggggcacctacgtgcggctgctgatgaaggcccgcatcccagacaccaaggagaacatctctgtggccgacaccctgcagaaggtgtgggccgtgctggagatgaacctggagcagtatgctgtgtccctgctgcggctgatgttcaagagcaagtgcaagagcctggagagctacccctgctaccaggatgaggagaccaagatcgcctttgctgactacacagtgacctaccaggagcagccccccaacagctggttcatcgtgttccgggagaccttcctggtgcaccaggacatgatcctggtgcccaaggtgtacaccaccctgcccatctgcatcctgcacatcgtgaacaatgacaccatggagcaggtgcccaaggtgttccagaaggtggtgccctacctgtacaccaagaacaagaagggctacacctttgtggccgaggccttcaccggggacacctacgtggccgccagccgctggaagctgcggctgattggcagcagcgcccccctgccctgcctgagccgggacagcccctgcaacagctttgccatcaaggagatccgggactactacatccccaatgacaagaagatcctcttccgctacagcgtgaaggtgctgaccccccagcctgccaccatccaggtgaggaccagcaagccagatgccttcatcaagctgcaggtgctggagaatgaggagaccatggtgagcagcacaggcaagggccaggccatcatcccagccttccacttcctgaagtctgagaagggcctgagcagccagagcagcaagcacatcctgtccttccacagcgccagcaagaaggagcaggaggtgtatgtgaagaagaaggccgcccagggcatccagaagagccccaagggccgggctgtgtctgccatccaggacatcggcctgcccctggtggaggaggagaccaccagcacccccacccgggaggacagcagcagcacccccctgcagaactacaagtacatcatccagtgcagcgtgctgtacaacagctggcccctgacagagagccagctgacctttgtgcaggccctgaaggacctgaagaagagcaacaccaaggcctatggagagagacatgaggagctgatcaacctgggcagcccagacagccacaccatcagcgagggccagaagagctctgtgaccagcaagaccaccaggaagggcaaggagaagagcagcgagaaggagaagacagccaaggagaagcaggcccccaggtttgagccccagatcagcacagtgcacccccagcaggaggaccccaacaagccctactggatcctgcggctggtgacagagcacaatgaaagtgagctgtttgaggtgaagaaggacacagagcgggcagatgagatccgggccatgaagcaggcctgggagaccacagagcccggccgggccatcaaggccagccaggcccggctgcactacctgagcggcttcatcaagaagaccagtgatgctgagagcccccccatcagcgagagccagaccaagcccaaggaggaggtggagacagctgcccggggcgtgaaggagcccaacagcaagaacagcgctggcagcgagagcaaggagatgacccagacaggcagcggcagcgctgtgtggaagaagtggcagctgaccaagggcctgagagatgtggccaagagcaccagcagcgagagcggcggcgtgagcagccctgggaaggaggagcgggagcagagcaccaggaaggagaacatccagacaggccccaggaccaggagccccaccatcctggagaccagccccaggctcatcaggaaggccctggagttcatggacctgagccagtatgtgaggaagacagacacagaccccctgctgcagacagatgagctgaaccagcagcaggccatgcagaaggccgaggagatccaccagttccggcagcacaggaccagggtgctgagcatccggaacatcgaccaggaggagcggctgaagctgaaggatgaggtgctggacatgtacaaggagatgcaggacagcctggatgaggcccggcagaagatctttgacatccgggaggagtacagaaacaagctgctggaggccgagcacctgaagctggagaccctggccgcccaggaggccgccatgaagctggagacagagaagatgaccccagccccagacacccagaagaagaagaagggcaagaagaagtag

SEQ ID NO: 216356 - DNA, 2142 bp, Artificial Sequence
  derived and/or modified sequence
accgacgagcagaccgacttcggcctgggcgacgcccaccagagcgacggcctgaatttggagagggagattgtctcgcagactacagccacccaggaaaaatcacaagaagaactgccaacgacaaataactccgtcagcaaggagatctggctcgacttcgaggacttttgtgtctgcttccagaacatatatatttttcacaaaccaagttcatactgtctcaattttcaaaagtcagagttcaagtttagcgaagagagggtgtcttattatctgttcgtggattctctgaaaccaatcgaactgcttgtttgtttttccgccctcgtgcggtggggagagtatggagccctgacgaaggattctccacctattgaacccgggttgttgacagcagagacattttcatggaaatctctgaagccggggagtctggttctcaaaatccatacctacgccaccaaggccacagttgtgcgcctcccagtgggccgccacatgctgctctttaatgcatatagcccagtgggacatagtatacacatctgctctatggtgagtttcgtgatcggcgatgaacacgtcgtcctgccaaacttcgaaccagagagctgtcgctttaccgagcagtctcttctgattatgaaggctatcgggaacgttattgctaatttcaaagacaaaggaaaactgtctgccgccctgaaagatctgcagaccgcccattaccctgtcccattccacgacaaagagctgacggctcagcacttccgcgtattccacctttcgctgtggagactgatgaaaaaagtccaaatcactaaaccacctcctaactttaagtttgcctttagggctatggttctcgatctggaacttctaaactccagtctggaggaagtgagccttgtggaatggctcgatgtgaaatattgcatgccaacctccgataaggagtactccgcggaagaagttgcagccgccatcaagatccaggcaatgtggcggggcacatatgtgcgtcttctgatgaaggctcgcatcccagataccaaagagaatatctcagtggcagatactctccaaaaggtgtgggcagtgctcgagatgaacctggagcagtacgcagtgagcttgctccgactaatgtttaagtctaagtgtaaatccctggaatcctatccctgctaccaggacgaagagaccaaaatcgcttttgccgactacactgtgacataccaagagcaacccccaaattcttggttcattgtgttcagggaaacgttccttgtacaccaggacatgattctggtccctaaagtgtacaccacactgccaatttgcatcttgcacatagtgaataatgacacaatggaacaggttccgaaagttttccaaaaggtcgtgccttatttgtataccaaaaacaagaaaggatacactttcgtggctgaggctttcacaggggatacctacgtggcagcgagcagatggaagcttcggctgattgggtcttccgcccctctgccttgcctgtcaagggacagcccatgtaactcgtttgccataaaggaaattagggactattacatccccaacgataagaagatattgttcagatactctgtgaaggtgctgaccccacagcccgccacgatacaagtgagaacatccaagccagacgctttcatcaagctacaggtgttggagaatgaagagaccatggtctcgagcacagggaagggtcaggccattatccctgcttttcattttctgaagtccgaaaaaggactttccagccagagctacggtgaacgccacgaagaattgatcaacctggggtccccagattctcatactattagtgagggacagaaaagctctgtgacaagtaaaacaaccaggaaaggaaaagaaaagagctcagagaaagaaaaaacagccaaggaaaaacaggcccctagattcgagccgcagatctctacggtgcatcctcagcaagaggacccaaataaaccctattggattctccggttgctgcgcctagtctgtattaccctcgcgggcagcctgcgcaagcatcttatgttgcgcgttcgtctgtacctaaaagccaagttgaaccagaagaagaaatag

SEQ ID NO: 216357 - DNA, 5004 bp, Artificial Sequence
  derived and/or modified sequence
atggccagcaagcagaccaagaagaaggaggtgcaccggatcaactccgcccacggctcggacaagtccaaagacttttatccttttggctccaacgtgcaatccggctcaacagagcagaagaagggcaaatttccactgtggccagaatggagcgaagccgacataaattccgagaaatgggacgcgggaaagggtgcaaaggagaaagacaaaacaggaaagtctccggtgttccacttcttcgaagatcctgaaggcaaaattgaattgccaccctccctgaaaatatattcatggaaaagaccgcaggacattctttttagccagaccccagtggtcgtgaagaatgagatcaccttcgacctgttctccgccaatgaacatctgctttgcagcgagttgatgcgctggatcatatcagaaatatacgctgtgtggaagatctttaacgggggaatactctccaattatttcaaaggaacttccggcgagcccccccttttaccgtggaagccttgggagcacatctactcactgtgcaaagccgttaaggggcatatgccactcttcaatagttacggaaagtatgtggtaaaactgtactggatgggctgctggcgtaaaatcactatagacgacttcttgccattcgacgaggacaacaacctcctgctgcccgccactacctacgagttcgagctttggccaatgttgctgagcaaagctataattaaactggccaacatcgacattcatgtagccgatagacgtgagcttggagagtttactgtgatacacgctctgacaggttggctacccgaggtgatcagtctgcatccaggttatatggacaaggtctgggagctcctgaaagaaattttacctgaattcaagctgtccgatgaagcctcctcagaatcgaaaattgccgtattagattctaaattgaaagaacctggcaaggaggggaaggaaggtaaagaaataaaagatggcaaagaggttaaggacgtgaaagaattcaagcctgagtcttcactgactactctgaaggcgcctgagaagagcgataaggtgcccaaggaaaaagccgacgccagagatattggaaaaaagcgctcaaaagatggcgagaaggagaagtttaaattctctctgcacggaagtaggcctagttcagaggtccagtactcagtgcagagcctctctgattgttcaagtgccattcaaacttcccatatggtagtttacgctacattcacgcccttgtacttattcgagaacaaaatctttagcttagaaaagatggcggactcagctgagaagctcagagagtatggcctgagccatatttgctcacacccggtgctggtgacccgttcccggagctgtcccctggtggccccccctaagccaccgccgctcccaccgtggaaactgatcagacagaaaaaggaaaccgtcattaccgacgaggcccaggaactcatcgtgaaaaaacccgaacggttcttggagatttcaagtcccttcctgaactatcgcatgacccccttcacgatccctacagagatgcacttcgtgcgctcccttattaagaagggcatccctcctggttccgacctcccaagcgtgagcgaaacggacgagacagcaacgcactcacagacggatctttcgcaaattactaaggcgacttcccagggcaacacagcctcacaggtgattttaggaaaaggcaccgacgagcagaccgacttcggtcttggggatgctcaccagtctgacgggttgaaccttgagcgcgagattgtgtcccagactacagcaacccaggagaaaagtcaggaggagttaccaaccaccaacaattccgtaagcaaggagatctggttagatttcgaagatttttgcgtgtgcttccagaatatatacattttccataagccttcatcctattgtctgaatttccagaaatcagagtttaagttttcagaagagcgagttagttattacctgttcgtggatagcctgaaacctatcgaactactcgtgtgcttcagtgctctcgtgagatggggtgaatatggcgcattgaccaaggatagccctccgatcgagcccgggctactgactgccgaaactttctcctggaagtccctgaagcccgggagtctggtccttaagatacacacctacgctacgaaggccactgtggtgcggctaccggtaggaagacacatgttgcttttcaatgcctactctcctgtcggccactcaatccatatctgctcaatggtttccttcgtaattggcgacgagcacgtggtgcttcctaactttgaacccgagtcatgccgattcacggaacaaagtttgctgatcatgaaggcaatcggcaacgtcattgctaatttcaaagataaggggaagctgtcagccgcactgaaagatttgcagacagctcattatcccgtgcctttccacgacaaagagctaacggcccagcattttcgtgtcttccacctttccctttggagactcatgaagaaagtgcaaatcaccaagccacctccaaactttaagtttgcgtttcgggcgatggtgctggacttggaactactcaattcatcactagaagaagtcagtctggtagagtggctcgatgttaagtattgcatgcccacctccgacaaagagtattcggccgaggaagtagccgcagcgatcaagattcaggccatgtggaggggaacctatgtgaggctgcttatgaaggcaaggatccccgatacgaaggaaaatatatccgttgccgacacactgcaaaaggtgtgggctgtgctggagatgaacctcgaacagtatgccgtgtcattgctaaggctcatgtttaagagcaagtgcaaaagtctggaatcttacccatgttatcaggacgaggagacaaaaatcgcatttgccgactacacagtcacataccaagagcagcccccaaacagctggttcatcgtgtttagggagacctttttagtgcaccaggacatgatactggtgcccaaggtgtataccacgttgcctatctgcatcctgcacattgtcaataacgacactatggaacaagtccctaaagtgttccagaaggtggtaccctacttatataccaagaataaaaagggatataccttcgtggctgaggcctttactggagacacatatgttgctgcatcaagatggaagttgaggctgatagggtcctctgcccccctgccgtgtctaagccgagatagcccctgcaattctttcgccatcaaagagatcagggactactacatccccaacgataaaaagatcctgttccgctattccgtgaaggtcttgactccgcagccggcaactatccaggtgcggacctctaaacccgatgctttcataaagctccaggtactggaaaatgaggagacaatggtgtcgagtacagggaagggacaagccatcatccccgccttccactttttgaaatctgagaaaggactgtcaagccagtccagtaaacacatcttaagtttccatagcgcatccaaaaaggaacaggaagtgtacgtgaagaagaaagccgcccaggggattcagaagtctcccaagggtcgggccgtgagtgctattcaggatatcgggctgccacttgtcgaagaagaaaccaccagtacccccactcgtgaagattcttcaagtacaccactgcagaattataagtacatcatccaatgttctgttctatacaattcatggcccctgaccgagagccaactgacattcgtccaggccctgaaagacctgaaaaagtccaacacaaaagcttatggcgagcgccatgaggagttgatcaacctcggctccccagacagccatactatttctgaggggcagaagagctccgtgacttccaagaccactcgaaaaggcaaggagaagagtagcgaaaaggagaagaccgccaaggagaaacaggcccctaggtttgaaccacagatcagcaccgtgcacccacaacaagaggatcctaacaaaccttactggattctgcgcctcgtgacagaacataatgagagcgaacttttcgaggtaaaaaaagatactgagagagccgacgagatccgtgcgatgaagcaggcatgggagactacagaacctgggcgggccattaaagcctcacaggcccgcctgcactatctctccgggtttatcaaaaaaacatccgacgcagagtccccaccaattagtgaatcccagaccaaaccgaaggaagaggtcgagactgcagcgcgaggggttaaagaaccaaattcgaaaaacagtgcagggtcggagtctaaagagatgacccagactggaagcggaagcgctgtgtggaaaaagtggcaactgactaaagggctgcgggacgttgcgaaaagtacgtccagcgaatcaggtggtgtgagtagccctggtaaggaggagagagagcaatccacccgcaaagaaaacatccaaaccggccccagaacaagaagcccaactattttggagacgtccccgaggctaatccgtaaggctttggaattcatggacctatcacagtacgtgaggaagaccgataccgatccgctgctgcagaccgatgagcttaatcagcagcaggcaatgcagaaagctgaggagattcatcagtttcgacagcaccgcaccagagtcctctctattcggaacatagatcaagaggagcgcctgaaactgaaagacgaggtgctggatatgtacaaagagatgcaggatagcctcgacgaagctaggcagaaaattttcgacatccgggaggaatacaggaacaagcttctggaggccgagcacctgaagttagaaaccctggccgcccaagaagcagcaatgaaactggagaccgagaaaatgactcccgctccagacactcaaaagaaaaaaaagggcaagaaaaagtag

SEQ ID NO: 216358 - DNA, 2142 bp, Artificial Sequence
  derived and/or modified sequence
accgacgaacagaccgactttggcctgggcgatgcccaccaatccgatggcctgaacctggaacgggagatcgtttcgcagaccaccgccacccaggaaaagagccaggaggagttgcctactactaacaattcagtgagtaaggagatctggctcgatttcgaggacttttgcgtttgttttcaaaacatctacattttccataagccatcttcctactgcctcaattttcagaagagcgagttcaagttctccgaggaacgcgtgagctattatctcttcgtggacagtctgaaacccatcgagctcctcgtttgcttttcagcactcgtgaggtggggggagtacggtgcactaactaaggattcccctccgattgagcctggcttgcttacagctgaaacatttagctggaagagcctgaagcccggttctctcgtcctgaagatccacacctatgcgactaaggcgactgtagtgcggctgccggtaggccgacacatgctgctgtttaatgcttactctcccgtcggacactcgatccacatctgcagcatggtatcctttgtgattggagacgagcatgtggtattaccaaacttcgagcctgaatcgtgtcggtttacggagcagagtttgctgatcatgaaggcaattggcaatgtgatcgctaactttaaagataaaggcaagctctccgccgcactcaaggatctgcagacagctcactaccccgttccatttcatgacaaagagctcacagcacagcatttcagggtgtttcacctgtccctgtggcgactaatgaaaaaggtgcagatcacaaaaccccctcctaactttaaattcgcttttcgcgcaatggtgcttgacctcgagctccttaatagcagtttagaggaagtttctctcgttgaatggctagatgtgaagtactgcatgccaacctccgacaaggagtattctgcggaagaagttgctgcggcaatcaaaattcaagctatgtggagaggaacttacgttaggcttctcatgaaagctcggattcccgatactaaggaaaacatctctgttgcagacactctacagaaggtgtgggccgtgctggagatgaatcttgaacagtacgctgtaagtctgctgcgcctgatgttcaagtcgaaatgtaaaagcctcgagtcttatccctgctaccaggacgaggagacaaagattgcttttgctgattataccgtaacctaccaggaacagcctccaaacagttggttcatagtttttcgggagaccttcctggtccaccaggatatgatactcgtgcccaaagtatatactacgctcccaatctgtattttgcacatagtgaataatgacaccatggagcaagtgccgaaggttttccagaaggtggtgccatacctgtacactaagaataagaagggatacaccttcgtcgcggaagctttcactggcgacacttacgtagccgcaagcagatggaagttacgactgatcggatcatctgccccactaccttgtttgtccagagatagcccctgcaattctttcgcaattaaggagatcagagattactacatcccaaacgacaaaaaaatcttgttccggtactccgtcaaggtcttgaccccacaaccggctaccatccaagtcagaacctccaaacccgatgcatttatcaagctccaggtcctggaaaatgaagagaccatggtctccagtaccggcaaaggacaggctattatccccgctttccactttttgaagtccgagaaaggactgtcatcacagtcctacggagagcgccatgaggagcttatcaatctggggagccctgatagtcacaccatcagcgagggccagaagagcagcgtgactagtaagacgactaggaaaggcaaggaaaagagtagtgagaaagaaaagacagcaaaggaaaaacaggctccccgattcgaacctcagattagcacagtgcacccacagcaagaggacccaaataagccgtattggattctgcggctcctgcggcttgtgtgtattacacttgcaggaagtctgcggaaacatctcatgttgcgagtgcggctgtacctgaaggctaagctgaatcagaagaagaaatag

SEQ ID NO: 216359 - DNA, 5004 bp, Artificial Sequence
  derived and/or modified sequence
atggccagtaagcagaccaaaaaaaaagaggtccaccgcatcaacagcgcccacgggagtgataaatccaaggatttctacccattcggctcaaatgtgcagagtggttcaactgagcagaaaaaggggaaattccctttgtggcctgaatggtctgaggcagatattaactctgagaaatgggatgcaggtaagggggcaaaggagaaggataaaacagggaaatcgcccgtttttcactttttcgaggaccccgaggggaagatagaactccccccaagcctgaaaatctacagttggaagaggcctcaagacatccttttctcccagacaccagtggtcgtgaagaatgaaattacttttgacttgttctcagccaatgagcacctcttgtgtagtgaactgatgcgttggatcatcagcgagatttatgctgtgtggaaaatcttcaacggcggaatactttctaactatttcaaaggcactagcggcgaaccgccactgctgccgtggaaaccctgggagcatatctactccttgtgtaaagccgtgaaaggtcacatgccactatttaattcctacggaaaatatgtggtgaagctctactggatgggttgttggagaaagattacaattgacgactttctcccattcgacgaagataataacttgctgcttcctgcaactacatatgagtttgaactatggccaatgttactcagtaaagccattattaaattggccaacatagatatccacgttgctgatagaagagaactcggagagtttaccgttatacacgctcttaccggttggctgccagaggtgatttcccttcaccctggctacatggacaaagtgtgggaattactgaaagaaattctccctgaatttaaattgtcagatgaggcctcgtctgagtccaaaattgcagttttagatagcaaactgaaggagccgggaaaggagggtaaggaaggtaaggaaatcaaagatggaaaagaggtaaaagacgttaaggaatttaagccagagtcatccctgaccactcttaaggctcctgagaaatcagataaggtcccaaaggagaaagctgacgccagggacattggtaagaaaagaagcaaagatggtgagaaggagaagtttaagttcagcctacacggaagtaggccttcctctgaagttcagtacagtgtccagtctctgtcggactgctcgagtgcgatccaaacctcccatatggtggtgtacgctaccttcactcctctctatttgttcgagaataagatcttcagcctggaaaagatggcagattccgccgagaaacttagagaatacggactatcacacatatgctcccaccctgtgttggtgacccgaagtcggagctgtcctctcgtggcaccacctaagcccccaccgttacctccttggaagctcatccgccagaagaaggagactgtgataaccgatgaagctcaagagttgatcgtcaagaagcccgaacggttcctggagatatcttcacctttcctgaactaccggatgactccctttaccatccctacagagatgcatttcgtaagatcactgattaagaagggcattccacccggaagtgatctgccttctgtctccgagacggatgagacggcaacacattctcagaccgacttgtcccagattacgaaagcaactagccagggcaacaccgcatcccaggtgatattgggcaagggtacagacgagcagaccgatttcgggctcggggatgcccaccagagcgacggtctcaatcttgagcgcgagatagtcagccagaccaccgccacacaggagaagagccaggaggaactccccacaaccaacaattccgtttctaaggaaatctggctggacttcgaagacttctgcgtgtgtttccagaatatctacatattccacaaacctagttcctactgtcttaatttccagaagtctgagtttaagttctcagaggaacgggtgtcgtactacttattcgtagactctctgaagcccatcgaactgctggtttgcttctcagctcttgtaagatggggcgaatacggagcgcttacgaaggacagcccacctatcgaaccagggttgctgactgccgagaccttcagttggaaaagcctgaagcccggttccctggttctgaagatccacacgtatgctacaaaagcgacagtggtgcgcctcccagtcggacgacacatgttgctatttaatgcctactctcccgtggggcattcgattcatatctgctccatggttagctttgtcatcggggacgaacatgtagtcctgcctaacttcgagcccgaatcctgtcggttcaccgagcaatctctccttattatgaaggcaattggtaatgtgatagcaaactttaaagataaaggaaagctctccgccgctctgaaagacctccagacggcccattaccctgtgcccttccatgacaaagagctgacagctcaacactttagagtgtttcacctaagtttgtggcgcttgatgaagaaagtgcagatcactaagccacctcccaatttcaaattcgcctttagggctatggttctggatctggaactgctgaactcgagcttggaagaggtgtccctcgtggagtggctcgacgtgaagtattgtatgcctacctctgacaaagaatattccgctgaagaggtcgccgcagcaattaagatccaggcaatgtggaggggaacttacgtgaggctgctaatgaaagctaggattcccgatactaaagagaacatttcggttgctgacacattgcaaaaggtctgggcggtgctggaaatgaacctagagcagtatgcagtgagcctgctccgcttgatgtttaagtctaaatgcaaatccctggagtcctacccctgttatcaggatgaagaaaccaaaatagctttcgcagattacactgtcacgtatcaggaacaacctcccaactcctggttcattgtgttccgtgaaacctttttagtccatcaggacatgatcctggtccccaaagtgtacaccaccctcccaatttgtattcttcatattgttaacaatgatactatggagcaggttccgaaggtattccagaaggtggtaccctacctgtacactaagaataagaagggatatacgttcgtggccgaagccttcacgggagacacttacgtcgccgcttcccgctggaaattgcggcttatcggaagtagcgcccctctcccctgcctgtctagagacagtccatgcaatagtttcgccatcaaagaaatacgggactattacataccgaacgataaaaaaattctcttcaggtactcagtgaaggtcctgactccacagcccgctacgattcaggttcggacgtcgaagcccgatgcattcataaaactgcaagtcctggagaatgaggaaaccatggtttccagcaccggtaaaggccaggcaatcatccccgctttccatttcctcaaatccgaaaaaggtctttcaagtcagtccagcaagcacattctttccttccacagcgctagtaaaaaagaacaggaagtttacgtaaagaagaaagcagcccagggtattcaaaaaagccccaaaggaagagctgtttcagccatccaggacattggactgcccctggtcgaggaggagactacatctacccctactcgtgaggattcatcatctacgcccctccaaaactataagtacattatacaatgcagcgtgctgtataattcctggcccctgactgagtcccagttaacctttgtgcaggctctgaaagacctgaaaaaatcgaataccaaggcttacggagagcggcacgaagagctaattaacctcgggtcaccagatagccatacaatttctgaaggccaaaagagcagcgtgaccagtaagactacacggaaaggaaaagaaaagtcctccgagaaggagaaaaccgccaaagaaaaacaggccccaagatttgagccacagatatcaacagttcaccctcagcaggaagatccaaacaagccctattggatcctgagactggtgaccgagcacaatgagtccgagttatttgaggtgaaaaaggacactgagcgggctgacgagataagagctatgaagcaagcgtgggaaaccacagaaccaggcagggcaatcaaggctagccaggcacggcttcactacctgtctggatttatcaagaagacctctgatgccgagagtccccctatcagcgaatcccagacaaaacctaaggaggaagtcgaaaccgcagctaggggggtaaaagagcccaactctaagaactctgctgggtccgaatcgaaggagatgacacaaaccggctctgggagcgctgtctggaaaaagtggcagctcaccaaggggctccgggacgtcgcaaagagcacgtcttccgaaagcgggggtgtgagctctcctggaaaggaggagcgggagcagagtaccaggaaggaaaacatacagaccggccctcggacacggagcccaacaatcctcgagacctctccccgactgattcgaaaggccctagagtttatggacctgtctcagtatgtgagaaagactgataccgaccccttgcttcagactgatgagctcaatcagcagcaggcgatgcaaaaggccgaggaaatacaccagttccgccaacaccggactcgggtcctgagcatccgaaatatagaccaagaggagcgcctgaaactgaaagatgaggtcctggatatgtacaaggagatgcaagacagcctcgatgaagcgcgtcagaaaatcttcgatatccgagaggaataccgcaacaaactgctcgaagccgaacaccttaaactcgagacactcgccgcacaagaagcggctatgaaattagagaccgaaaaaatgactccagctcccgacacccagaagaaaaagaaggggaagaaaaagtag

SEQ ID NO: 216360 - protein, 395 aa, Artificial Sequence
  derived and/or modified sequence
MRNIMYFGGTCQSPALPALVRPPAPPLQPSLDIKPFLPFPLDTAAAVNLFPNFNAMDPIQKAVINHTFGVPLPHRRKQIISCNICQLRFNSDSQAAAHYKGTKHAKKLKALEAMKNKQKSVTAKDSAKTTFTSITTNTINTSSDKTDGTAGTPAISTTTTVEIRKSSVMTTEITSKVEKSPTTATGNSSCPSTETEEEKAKRLLYCSLCKVAVNSASQLEAHNSGTKHKTMLEARNGSGTIKAFPRAGVKGKGPVNKGNTGLQNKTFHCEICDVHVNSETQLKQHISSRRHKDRAAGKPPKPKYSPYNKLQKTAHPLGVKLVFSKEPSKPLAPRILPNPLAAAAAAAAVAVSSPFSLRTAPAATLFQTSALPPALLRPAPGPIRTAHTPVLFAPY

SEQ ID NO: 216361 - DNA, 1188 bp, Artificial Sequence
  derived and/or modified sequence
atgagaaacatcatgtacttcggcggcacctgccagagccccgccctgcccgccctggtgagaccccccgccccccccctgcagcccagcctggacatcaagcccttcctgcccttccccctggacaccgccgccgccgtgaacctgttccccaacttcaacgccatggaccccatccagaaggccgtgatcaaccacaccttcggcgtgcccctgccccacagaagaaagcagatcatcagctgcaacatctgccagctgagattcaacagcgacagccaggccgccgcccactacaagggcaccaagcacgccaagaagctgaaggccctggaggccatgaagaacaagcagaagagcgtgaccgccaaggacagcgccaagaccaccttcaccagcatcaccaccaacaccatcaacaccagcagcgacaagaccgacggcaccgccggcacccccgccatcagcaccaccaccaccgtggagatcagaaagagcagcgtgatgaccaccgagatcaccagcaaggtggagaagagccccaccaccgccaccggcaacagcagctgccccagcaccgagaccgaggaggagaaggccaagagactgctgtactgcagcctgtgcaaggtggccgtgaacagcgccagccagctggaggcccacaacagcggcaccaagcacaagaccatgctggaggccagaaacggcagcggcaccatcaaggccttccccagagccggcgtgaagggcaagggccccgtgaacaagggcaacaccggcctgcagaacaagaccttccactgcgagatctgcgacgtgcacgtgaacagcgagacccagctgaagcagcacatcagcagcagaagacacaaggacagagccgccggcaagccccccaagcccaagtacagcccctacaacaagctgcagaagaccgcccaccccctgggcgtgaagctggtgttcagcaaggagcccagcaagcccctggcccccagaatcctgcccaaccccctggccgccgccgccgccgccgccgccgtggccgtgagcagccccttcagcctgagaaccgcccccgccgccaccctgttccagaccagcgccctgccccccgccctgctgagacccgcccccggccccatcagaaccgcccacacccccgtgctgttcgccccctactag

SEQ ID NO: 216362 - DNA, 1188 bp, Artificial Sequence
  derived and/or modified sequence
atgcgcaacataatgtacttcggaggaacttgccaaagccctgcgttacctgcccttgtaaggccacctgcgccaccgctgcaaccctccttggacattaaaccttttctgccattcccactcgacaccgcagccgccgtcaatctgttcccaaattttaatgcaatggatcctattcagaaagccgtgatcaaccacaccttcggagtgcctcttcctcaccggcgaaagcagattatctcatgtaatatatgtcagctgagattcaacagtgatagtcaggcagccgcccactataaaggcaccaagcacgcaaagaaactgaaggctctggaggccatgaagaacaaacagaagagtgtaactgcaaaggatagcgccaagacgactttcacatccatcacaaccaacacaatcaacacttcatccgataagacagacggaactgcaggaacgcccgctatcagcacgacaactactgttgagatacgcaagagctctgtgatgacaaccgaaattaccagcaaggtcgagaaatccccaactaccgcaacgggaaatagttcatgtccatctaccgagacagaggaagaaaaggcaaagaggctgttgtattgtagcctttgcaaggttgctgtcaattctgcctctcagctggaggcacataacagcggcactaagcacaagactatgctggaagctaggaatggctccggaactattaaagctttccccagggctggagtaaaggggaaggggcccgtcaacaagggtaacactggtctccagaataagacctttcattgcgagatctgcgatgtccacgtaaacagtgagacacagctcaaacaacatatttcttctaggagacataaagatagggcagcagggaagcctcctaagccaaagtattctccctataacaaactgcagaaaactgcccacccgctgggagtgaaattggtgtttagcaaggaacctagtaagcccttggcacctcgaatccttccaaaccccttggcagccgccgcagctgccgctgctgtcgccgtgtcttccccgttttccctccggacggcaccagcagctactctctttcagactagcgctctgccaccagccctgttacgaccagcacctggccctatcaggacagcacataccccagttctttttgccccttattag

SEQ ID NO: 216363 - DNA, 1188 bp, Artificial Sequence
  derived and/or modified sequence
atgaggaacatcatgtactttggaggcacctgccagagccctgccctgcctgccctggtgcggcccccagccccacccctgcagcccagcctggacatcaagcccttcctgcccttccccctggacacagctgctgctgtgaacctcttccccaacttcaatgccatggaccccatccagaaggccgtcatcaaccacaccttcggcgtgcccctgccccacaggaggaagcagatcatcagctgcaacatctgccagctgcgcttcaacagcgacagccaggccgccgcccactacaagggcaccaagcacgccaagaagctgaaggccctggaggccatgaagaacaagcagaagtctgtgacagccaaggacagcgccaagaccaccttcaccagcatcaccaccaacaccatcaacaccagcagtgacaagacagatggaacagctggcaccccagccatcagcaccaccaccaccgtggagatcaggaagagctctgtgatgaccacagagatcaccagcaaggtggagaagagccccaccacagccactggaaacagcagctgccccagcacagaaacagaggaggagaaggccaagaggctgctgtactgcagcctgtgcaaggtggccgtgaacagcgccagccagctggaggcccacaacagcggcaccaagcacaagaccatgctggaggccagaaatggcagcggcaccatcaaggccttccccagggctggggtgaagggcaagggccctgtgaacaagggcaacacaggcctgcagaacaagaccttccactgtgagatctgtgatgtgcacgtgaacagcgagacccagctgaagcagcacatcagcagcagaagacacaaggacagagctgctgggaagccacccaagcccaagtacagcccctacaacaagctgcagaagacagcccaccccctgggcgtgaagctggtgttcagcaaggagcccagcaagcccctggccccccgcatcctgcccaaccccctggccgctgctgctgctgctgctgctgtggccgtgagcagccccttcagcctgaggacagccccagctgccaccctcttccagaccagcgccctgcccccagccctgctgcggcctgcccctggccccatcagaacagcccacacccctgtgctgtttgccccctactag

SEQ ID NO: 216364 - DNA, 1188 bp, Artificial Sequence
  derived and/or modified sequence
atgcggaacatcatgtacttcggcggcacctgccagagccccgccctccctgctctcgtgcggccaccagcacctcccctccaacccagcttggatatcaagccctttctgccttttccattggacaccgctgctgccgtcaatctattcccgaatttcaacgccatggacccaatccaaaaggcggtgatcaaccacacattcggggtgcctctgccgcacaggaggaaacaaattatatcgtgcaacatttgccagcttaggtttaattctgactcacaagcagccgcacactataaagggaccaagcatgcaaagaaactaaaggcactcgaagctatgaagaataagcaaaagtctgtgaccgctaaggacagtgccaaaacaacattcaccagtatcactaccaatactattaacacctcttcagacaagacagatgggacagccggcacccctgccatttccacgacaacaactgtggagatccgcaaatcctccgtgatgacaactgagatcacctcgaaagtggaaaaaagcccgactactgcgaccggaaattcatcctgtccttcaacggagaccgaagaggaaaaggcaaaacgccttttgtattgttcgttatgcaaggtcgccgtgaattccgccagccagctggaagcccacaactcaggaaccaagcacaaaaccatgctcgaagcgcggaacggaagtggcaccatcaaggcctttccccgagccggggtaaaggggaaaggccctgtgaataagggtaatactggcctccaaaataaaactttccattgcgagatctgcgatgtccacgttaattccgagacgcagttgaagcagcatatttccagtaggcgccacaaagaccgtgccgcgggcaaaccgccaaagcccaagtatagtccatataataagctgcagaagactgctcaccctctcggtgtgaaactggtgttctctaaggaaccttctaaaccccttgcgccccggatcctcccaaatcccctcgctgccgctgccgctgctgctgcagtcgccgtctctagtccatttagtctccggacggcgcctgcggcgacactttttcagacttccgccttgccaccagccctcctgaggcccgcccctggtccaatacgcactgcacacacaccagtgttgtttgccccttattag

SEQ ID NO: 216365 - DNA, 1188 bp, Artificial Sequence
  derived and/or modified sequence
atgcgaaatataatgtatttcgggggtacctgtcagagcccagcgctgcccgcactagtccgcccacccgcaccgcctttacaacctagtctcgacattaagccctttttaccatttcctcttgacaccgccgcagcagttaatttgtttcctaattttaatgcaatggaccccatccagaaagctgtgattaaccatactttcggggtcccactccctcacaggagaaagcagattatcagctgtaatatctgccagctgcggtttaatagtgactcacaggccgctgcgcactataaggggacaaaacacgctaagaagttgaaagctctggaggccatgaagaacaagcaaaaaagtgtaaccgctaaagacagtgctaagaccacgttcacgtctataaccaccaacactataaatactagctccgacaagacagatggtacagcaggcactcccgctattagcacaacaacgaccgtggagataagaaagagctcagtaatgactaccgagattacgtcaaaagtggaaaagtccccaaccacggccacaggaaactcttcttgtccgagcacagaaacagaagaggagaaggccaagagactactgtactgctccctctgcaaggttgccgttaactctgctagccagctcgaggcacacaactccggaactaagcataaaacaatgcttgaagcgcgaaatgggagcggtaccatcaaagccttccctcgagctggcgtgaagggaaaagggccagtcaacaaggggaacaccgggcttcaaaataaaacgtttcattgcgaaatttgcgatgttcatgttaattccgagacccagctgaagcaacatattagttcacggaggcacaaggacagagccgcaggcaagccacctaagccaaaatactccccatataataaacttcagaagaccgcccatccattaggggtgaagctggtgttcagtaaggagcccagtaagcctcttgctccaagaatcctgccaaatccgttagctgccgctgcggcagctgccgctgtcgccgtgtcaagtcctttttccctgcggacggctcccgcagctaccctcttccagactagcgcgctgccccctgctctgctgcggcctgcccctgggccaatccgcaccgcacacacccccgtgctcttcgcaccttactag

SEQ ID NO: 216366 - DNA, 4498 bp, Artificial Sequence
  derived and/or modified sequence
acagtggtgaatttctcctgtgtgttcctgtgtggatcccgacactcttctcgctttaagagagcctcccgcgcccctcactccgccccttcccaagtctctgggctcgtcaaagcttcccgagagccatggttggtccaggcaggcagtcggagcacctcgtggagcggctgctaacccagggtggggtggggtggggtggaggggtctgcttgtagtactctcagtcctgatgtcacaggcgcggcaaggacatcgcaaggaggagtcggattacagtaaggatgggcagtgcagcaggcagcccgagcgcactctccagccgccggggatcttagccctggaaaggcagcctgcaaggcgctcatcccgcggaggaggcacgctctcggcgctcactgctctccacgccggggacatttccaccgaatgtagcatgaaagggctctgctctacgtgccagccttgggtgagagctgatgctgaagacaccgcggtgggattccagctgtctgattaatgagaaacataatgtattttggtggtacatgccagagtcctgctctcccggcccttgtccgtccaccagcccctcctttgcaaccatcgctggatattaaaccatttcttccctttcctcttgacactgcagctgcagtcaacctcttccccaatttcaatgcgatggacccgattcagaaagctgtaataaaccatacattcggggttcctcttccccaccgaagaaagcaaatcatatcatgcaacatttgccagttgagatttaattctgatagccaggctgcggcccactacaaaggcacgaaacatgccaagaagctcaaagcactggaagccatgaaaaataagcagaaatctgtaactgccaaggacagcgcaaagactaccttcacctccatcactaccaataccatcaataccagctctgacaaaacagacggtactgcagggacaccagcaatatcaacgacgacaactgtggaaatccgcaaaagcagtgttatgacaactgagatcacctctaaagtggaaaaaagcccaacgacagccactggcaatagctcatgtccttctactgagaccgaggaagaaaaggcaaaacggcttctttactgttcgctatgcaaggttgctgtcaactctgcctcgcagctggaggcgcacaacagtggtactaagcacaaaaccatgttagaagcccggaatggaagtggcactatcaaagcctttcctagggcaggagtgaaaggcaaaggacctgttaataaaggaaacacaggcctccaaaataaaacatttcactgtgaaatctgtgatgtgcacgtcaactcggaaacgcaacttaaacagcacattagcagtagaaggcacaaagacagagctgctgggaagcccccgaaacctaaatacagtccttacaacaaactacagaagacagcacatccactgggggtaaaattagtattttcaaaagaaccttcaaagccattggctccacgaattctaccaaatcctctagcagctgcagcagccgcagcagcagtggcagtgagttcccccttcagtcttcgaactgctccagcagcaacactgttccagacttccgcgcttcctccggcactcctgcggccagctcctggacccattcggaccgcccacactcctgtgctgtttgctccttactaaattccaaataggagtaattgtactgcaataatttttcaaaaaacaaaaaacaaaacaaacaaaagagaactatgcagtgtttatttatagtttaaagtatatctgaagagccaggacttttgatagtgaattgaaaaggttataaaaaagtgggggaggtttgggggtgggagggagggagtggtattttctccaaattaaagcattcctcttgaacgctgattgttttagaagtgatctccagcattgatttgtagtggtatctagaccttctgaagcctctgtgactgtgcttttgggcacctatttccctctgcattgtctgtcctgctttatgaaacaactatacattgtctaagggcattaactggttccaatgtatataaaataatttactctgtagattaaaatcgtacaaaaaaaaaggaaaaaaacaaaaacaaaagcaacactgtgaatagtactacccgtgctggtcctcttgctatgacggcaattactgggtatttatcccaacaaaagtagatacagtagatgtcttgtaaaacaatagtgctgtgtctcaatctatgccactaggttttaaagaattgcaaaggtagaatgaacaactatttcataccaataagcagtcaaaaaataaacatacaccggatggtgtcatggaggtctccctggtcagcattctcccctcctgtctagcttgaagatataacagggctaagcttagagatgggggaggcattaataaaggtgatttcttataaagtagtaacttcccaccctgaagatatattgctggaaacagggaagtgtttataatgaacctatatctgaaagcagagaaacccatgcatcatgagtgttaagaaagaaatcaatacaactcttctatttcaaggatgaagaatcataacctagaatgataatgcaaagtaaagatctttcatttagtacatatccagtaaaaacggagaatgttgcatctctgcagtatcccctttatatcataccagtagggttgtttcttaggcaaaggtttctgctttaagtatgatggtagaattaagcattagctatttttatgggtttttcttgttttttagattacctgctgacatgatataaacaattaatatatatttaaatgttaataacaacaggaaatatgaatctgagttaattgcacaccaatgacatagtgttaaaaaatactggtaagttccactcgacaattatttctccagtggagttgtgaaatactgagagcctttgatattcaccatcaggctgaaagaagttgatgttttacctttaaaacaagatttatcaggggtatatataaatatatgtatattgtatatatgttagaaagattaagagaataagttataaaaagaaaaaatctatataaaataattatataaccatccagtgttacatgttatcattaaattggtaacaaatggcataaaaatagctgtgcctttaatttgtgataaaggctatttgctttttcccatagaaagctgacatatacctatcaaaatggtggggtttgatgcagccagtctgttgcattaataagagcaatgacactgaaacttagaataatgacaaaacatacatgatttaggtttagagaaaaaactatttttgaaaaggttttctaaagactatttaaaaatatagggaaggattgggtgtggccttcctgaaactgctctcaaagtgttgtaacccttggagaggtataaagaatcaagaggaaaccatttgagacataggtatttagcatttatcattttatatttaagaaacaccatagcgtgcttggtgctcaacattaaacatggttttttggagttcttctccaccatctagctatagaaatttgtcatataaatgaatctttaaagcagttggctttatatatcctttgttaaccaaccaaaacaaaaacaaaaaaaaagaaggaaagaaggaaggaaggaaggaagaatggaaggaaggaaggaagaaaggagggaaggaaggaaggaaaggagatggggaagggaagaaaaggaaggaaggaagaaaggaagataatgtgttccatcagtattctggtagaaagaatttcaaaccatgcttctctggttaaatatattgattagcattaaaatttgttttgaaagtatctggtgattttgcatttaccagcatctctattctctagttttagcaagtgtttcctttttcacctacagaccctggtagttcagccaggtggatagttgcccataagtctgttgtttggggctctgtctgtatcccatgtgaccagcttctaaccattttgaactttagtttcccttttctgctatgtcaaatattttgattttccataatcatcctgagtccctatccaacaacctttacaactgatacagcctcactttctgttagataacttagtgttaattaaagcagtctcactaaaacgtgcttttgctgttctttcccattttcaccaaagtgaatgagccagtccactaaaaatcagggcctatgggatacacagtgtcctgggtcacaaggcattactgtctttaatgatttgctgggaacaaacgaatcagccatattttctccatcagccatataagaaatctcagaaatacctggatcccttctgcctcacttcgctatggaaccatttttgtttaaatggtcttttaaattggagttgtaagcatcagttgtcttttattcactacctaataaaggatgaagcctaaccacagaa

SEQ ID NO: 216367 - protein, 278 aa, Artificial Sequence
  derived and/or modified sequence
MEPRAADGCFLGDVGFWVERTPVHEAAQRGESLQLQQLIESGACVNQVTVDSITPLHAASLQGQARCVQLLLAAGAQVDARNIDGSTPLCDACASGSIECVKLLLSYGAKVNPPLYTASPLHEACMSGSSECVRLLIDVGANLEAHDCHFGTPLHVACAREHLDCVKVLLNAGANVNAAKLHETALHHAAKVKNVDLIEMLIEFGGNIYARDNRGKKPSDYTWSSSAPAKCFEYYEKTPLTLSQLCRVNLRKATGVRGLEKIAKLNIPPRLIDYLSYN

SEQ ID NO: 216368 - DNA, 837 bp, Artificial Sequence
  derived and/or modified sequence
atggagccaagggcagccgatggatgctttttgggtgacgtgggtttttgggtcgagagaacacctgtgcatgaggctgcgcagcggggcgagagcctccaactacagcaactcatcgaaagcggggcttgcgtaaatcaagttaccgtggactctattacaccgttacacgctgcatccctccagggtcaggcccgatgtgtacagttattgctcgccgctggcgctcaggtggatgctcggaacatagatgggtcaacacctctgtgtgatgcctgtgctagcggaagtatagagtgtgtcaaactcttgctcagttacggagccaaagtcaacccccctctctacacagcatcacctctgcacgaggcgtgtatgagcggctcatctgaatgcgtgcgtctcctgatagacgttggggctaatttagaggcccacgattgtcactttggcactcctctacatgttgcatgcgccagggagcatcttgactgcgtgaaggtgctgctgaacgctggcgccaatgttaatgcggccaagctccacgagacagcactccaccatgctgccaaggtcaaaaatgtagacctcatcgaaatgctgatcgagtttggcggaaatatttatgccagggataatagaggaaaaaaaccctctgattatacatggtcttcttccgctcctgcgaagtgtttcgagtactacgagaaaacgcccctgaccctgagccagctctgcagagtcaatctgcgcaaagccacaggagttcggggcctcgagaaaattgcaaagctgaacatcccaccccgcctgattgactacctcagctataactag

SEQ ID NO: 216369 - DNA, 837 bp, Artificial Sequence
  derived and/or modified sequence
atggagcccagggctgctgatggctgcttcctgggagatgtgggcttctgggtggagaggacccctgtgcatgaggccgcccagagaggagagagcctgcagctgcagcagctgattgaaagtggggcctgtgtgaaccaggtgacagtggacagcatcacccccctgcacgccgccagcctgcagggccaggcccgctgtgtgcagctgctgctggccgccggggcccaggtggatgccagaaatattgatggcagcacccccctgtgtgatgcctgtgccagcggcagcattgaatgtgtgaagctgctgctgtcctatggagccaaggtgaacccccccctgtacacagccagccccctgcacgaggcctgcatgagcggcagcagtgaatgtgtgcggctgctgattgatgtgggcgccaacctggaggcccatgactgccacttcggcacccccctgcacgtggcctgtgcccgggagcacctggactgtgtgaaggtgctgctgaatgctggggccaacgtgaatgctgccaagctgcacgagacagccctgcaccacgccgccaaggtgaagaatgtggacctgattgagatgctgattgaatttggaggcaacatctatgcccgggacaacagaggcaagaagcccagcgactacacctggagcagcagcgccccagccaagtgctttgagtactatgagaagacccccctgaccctgagccagctgtgccgggtgaacctgaggaaggccaccggggtgcggggcctggagaagatcgccaagctgaacatccccccccggctgattgactacctgagctacaactag

SEQ ID NO: 216370 - DNA, 837 bp, Artificial Sequence
  derived and/or modified sequence
atggagccccgggccgccgacggctgcttcctgggcgacgtgggcttctgggtcgaaagaacacctgttcacgaggccgcgcagcgaggcgaaagtctgcagctgcagcagttaattgaaagtggtgcgtgtgttaaccaggtgaccgtggattccatcacaccactccacgcagcttcactgcaaggccaagcgcgatgcgtacagctcttgttagccgcgggagcccaagtagacgctaggaacatcgatggtagcactccactgtgcgatgcctgtgccagcgggtccattgaatgtgttaagctcctgctctcgtacggtgctaaggttaacccccctctgtacactgcttcaccactacatgaagcatgcatgtcaggatcctccgagtgcgtgcgcttgttgatcgatgtgggagccaacttggaggcacatgattgtcattttggcactccactgcacgtggcctgcgcccgagagcatttggactgcgtcaaagtactactcaatgccggcgctaacgtgaatgctgctaagttgcatgagacggctctccatcacgccgctaaggtgaagaatgtagatcttatcgaaatgctcatcgaatttggcggcaacatctatgctcgggacaatcgcggaaaaaaaccctcagactacacctggagttcatcggcccctgctaaatgtttcgagtactatgagaaaactcccctgaccttgtcccagctctgtagagtgaacttgagaaaagcgaccggagttagggggctggagaaaattgcaaaattaaacattccacccagactcatcgattacctttcctataattag

SEQ ID NO: 216371 - DNA, 837 bp, Artificial Sequence
  derived and/or modified sequence
atggagcccagagctgccgacggttgtttcctcggggatgtggggttctgggttgagaggactccagtgcacgaagccgcacagagaggcgaatctctccagctgcagcagctgatagagagtggggcttgcgtgaatcaggtcaccgttgattccatcacccctctgcatgctgcctccctgcagggccaggcacgctgcgtgcagctcctgctggctgcgggagcccaggtcgacgccaggaatatcgacggtagtactccactgtgcgacgcctgtgcgtctgggagtattgagtgtgtgaagctcctcctgtcgtatggtgctaaagtcaatcccccattgtacaccgcctcacccctccacgaggcgtgcatgagtggatcttccgaatgcgtgcggctattgatcgatgttggagctaatctcgaagctcacgactgccacttcgggactcccctccatgtcgcttgcgccagagagcacctggattgtgttaaggtgcttctgaacgctggcgcaaacgtgaacgcagcaaagcttcacgagaccgctctgcaccatgcggctaaggtgaagaacgtcgatctgatcgagatgctgatcgaattcgggggtaacatctacgcgcgagacaatcggggaaagaagccctctgattacacttggagtagcagtgcgcctgctaaatgttttgaatactacgagaaaacaccgctgacactctcgcagctttgcagggtaaatctgcgtaaggctaccggtgtgaggggtctggaaaagattgcgaagctgaacatcccaccaaggctgatagattatctgtcgtacaactag

SEQ ID NO: 216372 - DNA, 2699 bp, Artificial Sequence
  derived and/or modified sequence
gtcgccgcgcggccgccggtgagccgcatggagccccgggcggcggacggctgcttcctgggcgacgtgggtttctgggtggagcggacccctgtgcacgaggcagcccagcggggtgagagcctgcagctgcaacagctgatcgagagcggcgcctgcgtgaaccaggtcaccgtggactccatcacgcccctgcacgcagccagtctgcagggccaggcgcggtgtgtgcagctgctgctggcggctggggcccaggtggatgctcgcaacatcgacggcagcaccccgctctgcgatgcctgcgcctcgggcagcatcgagtgtgtgaagctcttgctgtcctacggggccaaggtcaaccctcccctgtacacagcgtcccccctgcacgaggcctgcatgagcgggagttccgaatgtgtgaggcttcttattgacgtcggggccaatctggaagcgcacgattgccattttgggacccctctgcacgttgcctgtgcccgggagcatctggactgtgtcaaagtgctgctcaatgcaggggccaacgtgaatgcggcaaagcttcatgagactgcccttcaccacgcggccaaggtcaagaatgttgacctcatcgagatgcttatcgagtttggcggcaacatctacgcccgggacaaccgcgggaagaagccgtctgactacacgtggagcagcagcgctcccgccaagtgcttcgagtactacgaaaagacacctctgactctgtcacagctctgcagggtgaacttgaggaaggccactggcgtccgagggctggagaagattgccaagttaaacatcccgccccggctcattgattacctctcctacaactgaattgcaggtggggtccggaccgtggctgcccccgttgtgcccagcattgcccgggtgagggctctgcctgttcctctgaagcagcgtgattgctgtagatagaacaacgctccttcgagtcccttcctgcgatcctgtttaggcttctctcctggatcctggataatgtttccagggtgttgggaaggcctgcgtctcaggtcacagttgtgggtgtggccctgcgctgttctacagaacctaccctctcaatgggcatgggcccaaccatccagttttcctcttttacggaccatcctcaaaggcactctcaggacagacggcgtggggagcacagaggaggctggcagagctggggactgagggcattgttgctgattctcactcaccggggcagcctgccgcagatgcacaggccccaggtgcaggccaccacctccgggtcggcaccaggactgccctcggtgctcatagggaatggctgggcccacggaaggtcggcctgggatgtggcctgggactgctgctctgctggctgctgtgtggatgcttttcctggagcactttccaaggcatcccccagccccaagcctgcgcgcatctgtcactcagggactttctatgggtctttgtgggggaaggccctggctttgtattccccacaagtagcactgagtttcttaggaaatttgtcttcagtattaggtctccaactcttgtaaaaagtttatatgtaggataaaaaccttttagaggacacgtaggcggtaccactaaggttttggtaatgagccattcaaaccgacagcagtgtgaaggtgtgtcaaggtgtatattctcgtggctcggcattctcagtgcaaaggcctgtttggagactctgtgggaattgtttttcatctgtttctatggttgtcaaatgaattcttcacccaccctacagtttgctaactccttgaagctatcaaattagtaagaccatctatcacatccagcattgtcccagtgctttgagttggacgggaatgggactctgcagccaaggcaggataagaaaatcttgcaatcccgtcctgcagtgatagaaacaggtcgttctgcattataagccataggtggagcattcggtagcgtattcagactgcatgggccggcctaggagtctttgccttcataaattttaagaaccccgcccacaacagggagttaaactggaggactttgcatgattagttcagggatgagtggtttctggggcatctgaggtcaggagtttgaaaccagcctggccaacttgatgaaaccccatctctacccattctggagaacaggtcacgcctgtcctggagacagtgtgccgggaaaagggaacgtggtactcactggatgcacccaggccggcccgagcctcccaccgcagacagtgtggaacagagtgagcctgagctgcccaaggcgatgccctttgtgctgtatgactggaggcctctccgcgtgggtacttgggggtggggccacaaatctggcgaaaaacttcatgctggccgccgtgaggttttactccagcgttcccgccattgtcatggcgggtcttcgtcctaaactgagaagaaaagcattcctgtttgatcaccgccttagttaccagttctggatcagtcagtgtttctgcatggaataacaaccattaaaaaaagcactgggttctgccctttcatctttgtaagagattcttgcctctagcaatgacaacctgtgatgtctcacagtagagcacttagcgcagaatcaggtccccacggctgttgctcaataaaagtggcggaataaagtgc

SEQ ID NO: 216373 - DNA, 837 bp, Artificial Sequence
  derived and/or modified sequence
atggagcccagagccgccgacggctgcttcctgggcgacgtgggcttctgggtggagagaacccccgtgcacgaggccgcccagagaggcgagagcctgcagctgcagcagctgatcgagagcggcgcctgcgtgaaccaggtgaccgtggacagcatcacccccctgcacgccgccagcctgcagggccaggccagatgcgtgcagctgctgctggccgccggcgcccaggtggacgccagaaacatcgacggcagcacccccctgtgcgacgcctgcgccagcggcagcatcgagtgcgtgaagctgctgctgagctacggcgccaaggtgaacccccccctgtacaccgccagccccctgcacgaggcctgcatgagcggcagcagcgagtgcgtgagactgctgatcgacgtgggcgccaacctggaggcccacgactgccacttcggcacccccctgcacgtggcctgcgccagagagcacctggactgcgtgaaggtgctgctgaacgccggcgccaacgtgaacgccgccaagctgcacgagaccgccctgcaccacgccgccaaggtgaagaacgtggacctgatcgagatgctgatcgagttcggcggcaacatctacgccagagacaacagaggcaagaagcccagcgactacacctggagcagcagcgcccccgccaagtgcttcgagtactacgagaagacccccctgaccctgagccagctgtgcagagtgaacctgagaaaggccaccggcgtgagaggcctggagaagatcgccaagctgaacatcccccccagactgatcgactacctgagctacaactag

SEQ ID NO: 216374 - protein, 723 aa, Artificial Sequence
  derived and/or modified sequence
MSLLKERKPKKPHYIPRPPGKPFKYKCFQCPFTCNEKSHLFNHMKYGLCKNSITLVSEQDRVPKCPKSNSLDPKQTNQPDATAKPASSKSVANGLSAFDSKLQHSSAREDIKENLELQARGTHRCLGQKPALHRASPCKSPAPEAALGAQPALEGAARPSAFVPVGEHRLKGPDNAEAPETLALHNPTAKAVSFHTKSAFHTPGYPWKAGSPFLPPEFPHKISSTKGLGAISPYMHPTIPEYPPHFYTEHGLATIYSPYLLAGSSPECDAPLLSVYGTQDPRHFLPHPGPIPKHLAPSPATYDHYRFFQQYPSNLPIPYGFYRPESAFSSYGLRLPPVTGLTRDQSSHLLEEATLVYPASSPSRLNPSDPNRKHVEFESPIPEAKDSSKAGQRDTEGSKMSPRAGSAATGSPGRPSPTDFMQTSQTCEGLYDLSNKAASSALGRLYPPEQSLTAFRPVKKSTECLPAQAAETTAESPVSLNVVNGDPPAPTGSASLVSEAAPSSPDDSSGMGPLNLSKKSEINLAATHEPTYQGSPQAETASFSELQDLPLNLSVKDPCNTQAPRPAFPGRPRAAEPAAAVPQKTGTEGSEDGPSHPETKPGSLDGDGAPPTGPGEEAPDACAVDSSEEQKQTAAVALCQLAAYSPRNIRVGDGDAAAPEPACRQDTPTLSSMESQEAQCDLRPKGQKRTSLRDAGKSQQGAKKAKLQDTARVFTLRRRARVS

SEQ ID NO: 216375 - protein, 316 aa, Artificial Sequence
  derived and/or modified sequence
MSPRAGSAATGSPGRPSPTDFMQTSQTCEGLYDLSNKAASSALGRLYPPEQSLTAFRPVKKSTECLPAQAAETTAESPVSLNVVNGDPPAPTGSASLVSEAAPSSPDDSSGKSEINLAATHEPTYQGSPQAETASFSELQDLPLNLSVKDPCNTQAPRPAFPGRPRAAEPAAAVPQKTGTEGSEDGPSHPETKPGSLDGDGAPPTGPGEEAPDACAVDSSEEQKQTAAVALCQLAAYSPRNIRVGDGDAAAPEPACRQDTPTLSSMESQEAQCDLRPKGQKRTSLRDAGKSQQGAKKAKLQDTARVFTLRRRARVS

SEQ ID NO: 216376 - DNA, 2172 bp, Artificial Sequence
  derived and/or modified sequence
atgagcctgctgaaggagagaaagcccaagaagccccactacatccccagaccccccggcaagcccttcaagtacaagtgcttccagtgccccttcacctgcaacgagaagagccacctgttcaaccacatgaagtacggcctgtgcaagaacagcatcaccctggtgagcgagcaggacagagtgcccaagtgccccaagagcaacagcctggaccccaagcagaccaaccagcccgacgccaccgccaagcccgccagcagcaagagcgtggccaacggcctgagcgccttcgacagcaagctgcagcacagcagcgccagagaggacatcaaggagaacctggagctgcaggccagaggcacccacagatgcctgggccagaagcccgccctgcacagagccagcccctgcaagagccccgcccccgaggccgccctgggcgcccagcccgccctggagggcgccgccagacccagcgccttcgtgcccgtgggcgagcacagactgaagggccccgacaacgccgaggcccccgagaccctggccctgcacaaccccaccgccaaggccgtgagcttccacaccaagagcgccttccacacccccggctacccctggaaggccggcagccccttcctgccccccgagttcccccacaagatcagcagcaccaagggcctgggcgccatcagcccctacatgcaccccaccatccccgagtaccccccccacttctacaccgagcacggcctggccaccatctacagcccctacctgctggccggcagcagccccgagtgcgacgcccccctgctgagcgtgtacggcacccaggaccccagacacttcctgccccaccccggccccatccccaagcacctggcccccagccccgccacctacgaccactacagattcttccagcagtaccccagcaacctgcccatcccctacggcttctacagacccgagagcgccttcagcagctacggcctgagactgccccccgtgaccggcctgaccagagaccagagcagccacctgctggaggaggccaccctggtgtaccccgccagcagccccagcagactgaaccccagcgaccccaacagaaagcacgtggagttcgagagccccatccccgaggccaaggacagcagcaaggccggccagagagacaccgagggcagcaagatgagccccagagccggcagcgccgccaccggcagccccggcagacccagccccaccgacttcatgcagaccagccagacctgcgagggcctgtacgacctgagcaacaaggccgccagcagcgccctgggcagactgtacccccccgagcagagcctgaccgccttcagacccgtgaagaagagcaccgagtgcctgcccgcccaggccgccgagaccaccgccgagagccccgtgagcctgaacgtggtgaacggcgacccccccgcccccaccggcagcgccagcctggtgagcgaggccgcccccagcagccccgacgacagcagcggcatgggccccctgaacctgagcaagaagagcgagatcaacctggccgccacccacgagcccacctaccagggcagcccccaggccgagaccgccagcttcagcgagctgcaggacctgcccctgaacctgagcgtgaaggacccctgcaacacccaggcccccagacccgccttccccggcagacccagagccgccgagcccgccgccgccgtgccccagaagaccggcaccgagggcagcgaggacggccccagccaccccgagaccaagcccggcagcctggacggcgacggcgccccccccaccggccccggcgaggaggcccccgacgcctgcgccgtggacagcagcgaggagcagaagcagaccgccgccgtggccctgtgccagctggccgcctacagccccagaaacatcagagtgggcgacggcgacgccgccgcccccgagcccgcctgcagacaggacacccccaccctgagcagcatggagagccaggaggcccagtgcgacctgagacccaagggccagaagagaaccagcctgagagacgccggcaagagccagcagggcgccaagaaggccaagctgcaggacaccgccagagtgttcaccctgagaagaagagccagagtgagctag

SEQ ID NO: 216377 - DNA, 951 bp, Artificial Sequence
  derived and/or modified sequence
atgagccccagagccggcagcgccgccaccggcagccccggcagacccagccccaccgacttcatgcagaccagccagacctgcgagggcctgtacgacctgagcaacaaggccgccagcagcgccctgggcagactgtacccccccgagcagagcctgaccgccttcagacccgtgaagaagagcaccgagtgcctgcccgcccaggccgccgagaccaccgccgagagccccgtgagcctgaacgtggtgaacggcgacccccccgcccccaccggcagcgccagcctggtgagcgaggccgcccccagcagccccgacgacagcagcggcaagagcgagatcaacctggccgccacccacgagcccacctaccagggcagcccccaggccgagaccgccagcttcagcgagctgcaggacctgcccctgaacctgagcgtgaaggacccctgcaacacccaggcccccagacccgccttccccggcagacccagagccgccgagcccgccgccgccgtgccccagaagaccggcaccgagggcagcgaggacggccccagccaccccgagaccaagcccggcagcctggacggcgacggcgccccccccaccggccccggcgaggaggcccccgacgcctgcgccgtggacagcagcgaggagcagaagcagaccgccgccgtggccctgtgccagctggccgcctacagccccagaaacatcagagtgggcgacggcgacgccgccgcccccgagcccgcctgcagacaggacacccccaccctgagcagcatggagagccaggaggcccagtgcgacctgagacccaagggccagaagagaaccagcctgagagacgccggcaagagccagcagggcgccaagaaggccaagctgcaggacaccgccagagtgttcaccctgagaagaagagccagagtgagctag

SEQ ID NO: 216378 - DNA, 2172 bp, Artificial Sequence
  derived and/or modified sequence
atgtctctgctaaaagaacgaaagcctaagaaaccacattacatacctagacctccaggaaagccatttaaatacaaatgcttccagtgtccatttacgtgcaatgagaagtctcatctcttcaaccatatgaagtatggactttgtaaaaactcaatcactttagtctccgaacaggatcgggtaccgaaatgccccaagagcaactccctcgaccccaaacagactaatcagccagatgcaaccgcaaaacccgctagttctaaatccgtcgctaacggtttgtcggcttttgactctaagctgcagcacagctccgctagggaagacattaaggagaatttggagctgcaggccagagggacacaccggtgtctcggacagaaaccggcgctgcacagggcatcaccatgcaagtcacctgccccagaagccgctctgggcgctcagccagctttggaaggagccgctcgaccatctgcatttgtgcccgtgggggagcacagactgaaaggccctgataatgccgaagcccctgagacgctggccctgcataatcctacagcaaaggccgtgtccttccataccaagtctgcattccacactcccgggtacccttggaaagcaggaagtcccttcctacctccggagttccctcataaaatttctagcacgaagggacttggagcaatctcaccatacatgcatccaaccattccggagtacccaccccacttctatactgaacatggcctcgccaccatctattctccctatctgttggccggttcttctcctgagtgcgacgcccctctgctgtctgtatatggcacacaagaccctcgccacttcctgccacaccccggcccaatcccgaagcacctggccccatcccccgccacttacgaccactaccggttttttcagcagtacccctctaatttacctatcccatatgggttttacaggcctgaatcagcatttagctcctatggactccggctgccacctgtcacaggactcacgcgggaccagtcttcccacttgctggaggaggccacactcgtatatcccgccagcagcccttccaggctgaacccttccgaccccaaccggaagcatgtggaattcgagagcccaattcctgaggctaaagatagcagcaaggctggtcagagggatacagagggcagcaaaatgtccccacgcgctgggtctgccgccactgggtctcccggacgccccagtccaacagatttcatgcaaacttcccagacctgcgagggactatatgatcttagtaataaagccgcgtccagcgcgctaggccgcctgtaccctcctgaacagtccctgactgcgttccggccagttaagaagagtaccgagtgcctgcctgcacaagccgccgagactaccgccgaatcaccagtgagcctgaatgtcgtgaacggagaccccccagcaccgacggggtctgcttccctggtgagcgaggccgcaccctcctctcctgatgatagcagtgggatgggccctctgaacctctccaaaaaatcagaaatcaacctggcggcaactcatgagccaacttaccaggggagtccacaggcggaaactgcctccttcagtgaactgcaggacctgccattaaacctgtcagtgaaagacccgtgcaacacccaggcacctaggccagcctttcccggcagacctagggctgccgagcccgccgccgccgtgcctcagaagaccggcaccgagggaagcgaggacggcccctctcaccctgagacaaagcctggttccctagacggggatggcgcaccacccaccggacccggcgaggaagcacccgatgcttgtgccgtggactcaagtgaggaacagaaacagacggctgctgtcgcactgtgtcagcttgctgcctattccccaaggaacatacgggttggtgacggtgatgccgctgcgccggagcccgcctgcagacaggacacccccaccctctcttcaatggaatctcaggaggctcagtgtgaccttcggcctaaggggcaaaaaaggacgtccctccgtgacgctgggaagtcacagcagggcgccaagaaggccaagctccaagacaccgccagagtgttcaccctccggcgccgggccagagtctcgtag

SEQ ID NO: 216379 - DNA, 951 bp, Artificial Sequence
  derived and/or modified sequence
atgtcacccagagccggttccgcagctacagggagtccaggccgaccatcccccactgacttcatgcagactagccagacatgtgaaggactttatgatctgtccaataaagccgcaagtagcgcgctaggtaggctgtacccccctgagcagtcactgacggctttccggcccgtaaagaagagcactgagtgtttgcccgctcaggcggccgagaccacagccgaaagtccagtatcgcttaacgtcgtaaacggcgatccgccggctcccacaggttccgcctccctggtgtcggaagcagccccttcctcacccgatgatagctccggaaaatccgagatcaacctcgcagctactcacgagcccacataccaggggtcgccccaggccgaaaccgcaagttttagcgaactgcaggatttacctctcaacttatcagtaaaggacccgtgcaatacacaggcaccgagacccgccttcccagggagacctagggccgctgaacccgcagctgcagtgcctcagaagaccggcaccgaggggagcgaagatgggcccagccaccccgaaaccaaaccaggtagcctggatggcgacggtgctcccccgacaggacctggggaggaggcaccagatgcctgtgctgtggatagtagcgaggaacaaaaacaaaccgccgccgtggccttgtgccagcttgccgcctattctcctcgaaacattagggtcggtgatggtgatgcagccgctccagaacctgcctgccggcaggacactcccaccctgtcaagtatggagagccaggaagcccaatgtgatttaagacccaaaggccagaagcgaacctcactgagagatgctggaaaatcacaacagggtgctaagaaagccaagctgcaggacacagcgagggtgtttactctgaggcgtagggctagagtcagctag

SEQ ID NO: 216380 - DNA, 2172 bp, Artificial Sequence
  derived and/or modified sequence
atgagcctgctgaaggagaggaagcccaagaagccccactacatcccccggcccccaggcaagcccttcaagtacaagtgcttccagtgccccttcacctgcaatgagaagagccacctgttcaaccacatgaagtatggcctgtgcaagaacagcatcaccctggtgtctgagcaggacagagtgcccaagtgccccaagagcaacagcctggaccccaagcagaccaaccagccagatgccacagccaagccagccagcagcaagtctgtggccaacggcctgagcgcctttgacagcaagctgcagcacagcagcgcccgggaggacatcaaggagaacctggagctgcaggcccggggcacccaccgctgcctgggccagaagccagccctgcaccgggccagcccctgcaagagccctgcccctgaggccgccctgggcgcccagcctgccctggagggcgccgcccggcccagcgcctttgtgcctgtgggggagcaccggctgaagggccctgacaatgctgaggcccctgagaccctggccctgcacaaccccacagccaaggctgtgtccttccacaccaagagcgccttccacaccccaggctacccctggaaggccggcagccccttcctgcccccagagttcccccacaagatcagcagcaccaagggcctgggcgccatcagcccctacatgcaccccaccatccctgagtacccaccccacttctacacagagcacggcctggccaccatctacagcccctacctgctggccggcagcagcccagaatgtgatgcccccctgctgtctgtgtatggcacccaggaccccaggcacttcctgccccaccctggccccatccccaagcacctggcccccagccctgccacctatgaccactaccgcttcttccagcagtaccccagcaacctgcccatcccctacggcttctacagacctgagagcgccttcagcagctatggcctgcggctgccccctgtgacaggcctgacccgggaccagagcagccacctgctggaggaggccaccctggtgtacccagccagcagccccagccggctgaaccccagcgaccccaacaggaagcacgtggagtttgagagccccatccctgaggccaaggacagcagcaaggccggccagagggacacagagggcagcaagatgagcccccgggccggcagcgctgccaccggcagccctggccggcccagccccacagacttcatgcagaccagccagacctgtgagggcctgtatgacctgagcaacaaggccgccagcagcgccctgggccgcctgtacccacctgagcagagcctgacagccttccggcctgtgaagaagagcacagaatgtctgcctgcccaggccgctgagaccacagctgagagccctgtgtccctgaatgtggtgaatggagaccccccagcccccactggaagtgccagcctggtgtctgaggccgcccccagcagcccagatgacagcagcggcatgggccccctgaacctgagcaagaagtctgagatcaacctggccgccacccatgagcccacctaccagggcagcccccaggccgagacagccagcttcagcgagctgcaggacctgcccctgaacctgtctgtgaaggacccctgcaacacccaggcccccaggcctgccttccctggccggcccagggctgctgagcctgctgctgctgtgccccagaagacaggaacagagggctctgaagatggccccagccaccctgagaccaagccaggcagcctggatggagatggagccccacccaccggccctggagaggaggccccagatgcctgtgctgtggacagcagcgaggagcagaagcagacagctgctgtggccctgtgccagctggccgcctacagccccaggaacatccgggtgggagatggagatgctgctgcccctgagcccgcctgccggcaggacacccccaccctgagctccatggagagccaggaggcccagtgtgacctgcggcccaagggccagaagaggaccagcctgagagatgctgggaagagccagcagggcgccaagaaggccaagctgcaggacacagcccgggtcttcaccctgcggcggcgggcccgggtgtcctag

SEQ ID NO: 216381 - DNA, 951 bp, Artificial Sequence
  derived and/or modified sequence
atgagccccagggctggcagcgctgccaccggcagccctggccggcccagccccacagacttcatgcagaccagccagacctgtgagggcctgtatgacctgagcaacaaggccgccagcagcgccctgggccgcctgtacccacctgagcagagcctgacagccttccggcctgtgaagaagagcacagagtgcctgcctgcccaggccgctgagaccacagctgagagccctgtgtccctgaatgtggtgaatggagaccccccagcccccaccggcagcgccagcctggtgtctgaggccgcccccagcagcccagatgacagcagcggcaagtctgagatcaacctggccgccacccatgagcccacctaccagggcagcccccaggccgagacagccagcttcagcgagctgcaggacctgcccctgaacctgtctgtgaaggacccctgcaacacccaggcccccaggcctgccttccctggccggcccagggctgctgagcctgctgctgctgtgccccagaagacaggaacagagggctctgaagatggccccagccaccctgagaccaagccaggcagcctggatggagatggagcccccccaactggacctggagaggaggccccagatgcctgtgctgtggacagcagcgaggagcagaagcagacagctgctgtggccctgtgccagctggccgcctacagccccaggaacatccgggtgggagatggagatgctgctgcccctgagcccgcctgccggcaggacacccccaccctgagctccatggagagccaggaggcccagtgtgacctgcggcccaagggccagaagaggaccagcctgagagatgctgggaagagccagcagggcgccaagaaggccaagctgcaggacacagcccgggtcttcaccctgcggcggcgggcccgggtgtcctag

SEQ ID NO: 216382 - DNA, 2172 bp, Artificial Sequence
  derived and/or modified sequence
atgagcctgctgaaggagcggaagcccaagaagccccactacatcccccgacccccaggcaagcccttcaagtataagtgctttcagtgcccattcacttgcaatgaaaagtctcacctgtttaaccatatgaagtatgggctgtgtaagaattccattacccttgtttctgaacaggacagggtgcctaaatgtcctaagtccaactccctggaccctaagcagacaaatcaacccgatgcaacagctaaacccgctagttcgaaatccgtggcaaatggcctctccgcttttgattcaaagctccagcatagctccgcacgggaagacattaaggaaaatctagaactgcaggctcgcgggacccaccgttgtctcggacagaaacccgctctgcacagggcttccccctgcaagtctccagctcccgaggctgctttgggcgctcaacctgccctcgagggagccgcgcgaccgtctgcttttgtgccggttggggagcaccgattgaaggggccagataacgccgaagcaccagaaacactggctctccataatcctacagcaaaggccgtttctttccacacgaaaagcgccttccacacacctggctatccttggaaagccggcagtccctttctaccaccggaatttccacacaagatttctagtacaaaaggtttaggggcaattagtccgtatatgcaccctacaatacctgagtatcccccccatttctatactgagcatgggctagcgaccatatactccccctaccttctggcgggatcgtctcctgagtgtgatgccccccttttgagcgtatacggcacccaggatcccaggcactttctccctcaccctgggcctatcccaaaacacttggcgcctagcccggctacgtatgatcattatcggttcttccagcaatatccatccaatctgcctattccctacggattttacagaccagaatcggctttcagcagttatgggctcaggctcccgcccgtcacggggctgaccagggaccaatcctcccacctgctggaagaggccactctggtctatcccgctagctcccctagcaggttgaatccaagcgaccccaacaggaagcatgtcgagttcgaaagccctatccccgaagctaaagatagctcaaaggctgggcagcgagataccgagggatcaaaaatgagtccaagagctggcagtgcggccacaggttctcctgggagaccaagccctacagactttatgcaaacctcccagacttgcgagggtctgtatgatctgagcaataaagccgcttcctctgccctgggtcggctgtacccccccgagcagagcctcacagccttcagaccagtaaaaaagtctaccgaatgtctgcctgcccaggctgccgagactacggctgagagtccagttagtctaaatgtggttaacggggaccctcctgctcctactggaagcgcaagcctcgtctctgaggcagccccgagttctcccgatgattcaagtggcatggggccactaaacctttccaaaaagtccgaaatcaacctggccgccacccacgaacccacataccaaggaagccctcaagctgagactgcgtccttctcagagctgcaagacttgccactaaacctgtccgtaaaagatccctgcaacacacaagccccccgccccgcctttcccggtcgcccacgggctgctgagcctgccgccgcagttcctcaaaaaacaggaacggagggatcagaggatggtccttcacaccccgagacgaagccaggaagtctagacggggacggcgcccctccaaccggccccggggaagaggctcctgacgcttgtgccgtcgatagctcggaggagcaaaaacagacagcagctgtcgctctgtgtcagcttgcagcctacagccccaggaacatcagagtgggggatggtgacgccgccgcccctgagcccgcatgccgccaagacactccaactcttagcagtatggaatctcaggaagcccaatgcgacctgcgccccaagggccagaaacggacgtccctgagagatgccggcaagtcccagcaaggtgccaagaaggccaaactccaggataccgccagagtttttacactacggaggcgggcgcgtgtaagctag

SEQ ID NO: 216383 - DNA, 951 bp, Artificial Sequence
  derived and/or modified sequence
atgagcccccgggccggcagcgccgccaccggcagccccggccggccctctcctaccgactttatgcagacctcccagacttgtgaggggctctatgatctatccaacaaagccgcttcatcagccctgggccgcctgtatccacctgagcagagcctcaccgcgttccgccccgtcaagaagtccacagagtgtctgccagctcaggcggctgaaacaacagccgaaagcccagttagcctgaacgtggtaaatggggacccccccgcgcctaccggtagcgccagcttggttagtgaagccgccccttcctctcctgatgactcaagcgggaaaagcgaaattaacttagctgctacacatgagcctacgtaccaggggtcaccccaagctgagactgcttccttttccgaactccaggacttgcctctgaacctgagtgtgaaggatccttgtaacactcaggctccacgccccgcatttccaggacggcctagagctgccgagccagcagccgcggtgcctcagaaaacaggcaccgaaggatccgaagacggcccttcccaccccgaaaccaagcccggttccctggacggcgatggtgcccctcccaccggccccggggaggaagcacctgacgcctgtgccgtagatagcagtgaagagcagaaacaaactgcagctgtggcactgtgtcagttggccgcttatagccctcggaacattcgtgtgggggatggcgacgcagcagcgcctgaacctgcatgcagacaagacacacctaccctgtcctccatggagtcgcaagaggcacaatgcgatctgaggcccaaagggcagaaacggacttcactccgcgacgctggcaagtcacagcaaggagcaaagaaagccaaactacaggatactgctagggtgttcaccttacgcaggagagccagagttagctag

SEQ ID NO: 216384 - DNA, 2172 bp, Artificial Sequence
  derived and/or modified sequence
atgtctttgctgaaagagcgaaaaccgaagaagcctcactatatcccccgacctccaggcaaaccttttaagtacaaatgttttcagtgtcctttcacatgcaacgaaaagtcccacctgtttaaccatatgaagtatggactgtgcaagaactcaatcactcttgtgtccgagcaggatcgagtccccaaatgtcctaaaagcaactcacttgacccgaagcagactaatcagcccgacgccacagcgaaacctgcttcctctaagtctgtggctaacggactgagtgcatttgactccaaactccaacactcaagcgccagggaggacattaaggaaaatctggagctgcaggcgagaggcactcaccggtgcctaggacagaagcctgccctacaccgagcctctccttgtaaatcaccggcacctgaggcagctctgggcgcacaacctgcgctagagggcgctgctcgaccgagcgcctttgtacccgtgggggaacacagacttaagggtcctgacaatgcggaagctcccgaaaccctcgctctccacaacccaacggcaaaggcagtcagctttcacacgaaaagtgcctttcatacaccaggctacccgtggaaggctggtagtccattcctgcctcctgagtttccgcacaaaatctcttcaacaaaggggttgggcgcaatctcgccctatatgcatccgaccattcccgagtatccccctcacttttataccgaacacggcttggccaccatctacagcccatacctgttggcaggctctagccccgagtgcgatgctccactcttatcagtgtatggcacgcaagatccgaggcattttcttccgcaccctgggccaatccccaagcaccttgcgccttcgcctgccacctacgaccactacagatttttccagcagtaccctagcaatctgcccattccttatggtttttacaggcccgagagcgctttcagctcttatggcctcaggctgccccctgttactggcctaaccagggaccagtctagtcacctgctggaagaagcaacgttagtctaccccgcaagctctccatcccgtctgaacccttcagacccaaacagaaagcatgttgagttcgaatccccaattccagaggccaaagatagctcaaaagctgggcagagagacaccgaaggcagcaaaatgtctccccgagccggtagcgcggcaactgggtctcctggtaggccctctccaacggacttcatgcagacttcccagacttgcgaaggactctatgatctgagcaataaggctgcgagttctgctctgggcagactgtatccccctgaacagtctctgaccgccttcagaccagtaaagaagtcaacggagtgtctccccgcacaagctgctgaaacaactgccgagtcaccggtgagcctgaacgtggtgaatggagaccctcctgctccgaccgggagcgcctccctggtgagtgaggcggcaccaagcagccccgatgattcatcaggcatgggtcctctcaatctgtctaaaaaatcagaaatcaacctagctgccacacacgagcccacatatcaaggatcccctcaggctgagactgctagcttctccgaattgcaagacctacccttgaatctgagtgtgaaagatccctgcaatactcaagctccgagacctgccttcccgggtagacctagagccgcagagcctgccgctgcggtcccacagaagaccggtacagagggctcggaggatggcccatcacatccggagactaagcccggttctctcgacggagatggagcgcctcctaccggccctggggaagaagcccctgatgcctgcgcagtagactcctcagaggagcaaaagcaaaccgccgctgtggccctatgtcagctggccgcttatagcccgcgaaatattcgcgtgggagatggtgacgccgcagcgccagaacccgcatgtcgtcaggatacgcccacactttcatccatggaatctcaggaggcacagtgtgatttgcggcctaaaggccagaagcggaccagcctgagagacgccggaaagtctcagcagggagctaagaaggcaaaactgcaggacactgctcgcgtgttcacactgcgacgcagggccagagtctcctag

SEQ ID NO: 216385 - DNA, 951 bp, Artificial Sequence
  derived and/or modified sequence
atgagcccgcgagcgggttctgccgctacggggagccctggccgtccgagtcctactgactttatgcagacatctcagacttgtgagggcctgtacgatttgagcaacaaggctgcttcatctgcacttgggcgtctgtacccaccggaacaaagtctgacggcttttcgccctgtgaagaagtccaccgaatgcttgcccgcacaggctgcagaaaccaccgccgaatctccagtgtctttaaacgttgtgaatggtgaccctcccgcaccgacaggcagtgcgtccctagtaagcgaagctgctccctcctccccagacgactcttctggtaagtctgagatcaacttggccgctacgcacgagccaacctaccagggatctcctcaggccgaaactgccagcttctccgagctccaggacttaccactgaacctatccgttaaagacccttgcaatactcaagccccaagaccagctttcccaggtcgcccaagagccgcagagccagccgcagctgtcccacagaagacaggcaccgaggggagtgaagatggtccctcccaccctgaaacaaagcctggctccctcgacggggacggcgctccacctactggccctggagaggaagctcctgacgcttgtgccgtggattcgagtgaagagcagaagcagaccgctgccgtcgccttgtgccagttggctgcctatagcccgcgaaacattcgtgtcggtgacggggatgccgctgcgcctgaacctgcctgcagacaggataccccgaccctctcgtctatggaaagccaggaggctcagtgcgacctgcggccaaaaggacagaagagaaccagtctgcgagacgctggcaaatcccagcagggcgctaagaaagctaaactccaagataccgcacgtgtgtttactctccggagacgcgcacgcgtttcttag

SEQ ID NO: 216386 - DNA, 3190 bp, Artificial Sequence
  derived and/or modified sequence
acttaaatccctcccactggaacagcaggctccagtttcacccagcaagcgtgagaacaggtactgcttcctgagcaccgccagccaccggcaccaagaccggccacatcccagcactgcccacctctgctcccagccgccagatgacggaggctctcgccagaccctcagcacgcagagctggcttctgatagaagtgatcgggaaagaaagcaaagcgggaggtgcctctttagaaaccacgaagtgcacgcggcgtcgacagtgatcacgccacctggacagccagagtccaaggcataaggaggaaaatgagtctcctcaaagagcggaagccaaaaaagccacattacatccccaggcctccaggaaagcccttcaagtataaatgtttccaatgtccctttacttgcaatgagaagtcacatctttttaatcacatgaagtatggtctttgtaaaaactcgattactttagtatcagagcaggatcgagttcccaagtgccctaaatctaactcactagaccccaagcaaaccaaccagcccgatgccacggcgaagccagcctcttccaagtctgtcgcaaatggactctctgccttcgactcgaagcttcagcacagctctgccagggaagacatcaaggaaaacctggagctgcaagcccggggaacccacaggtgcctgggacagaagccagccctccacagggcatcaccctgcaagagcccagctccggaagccgccctcggtgcccagcctgctctggaaggcgcagctcggccttctgcatttgttccagtcggcgagcacagactcaaggggccagacaacgccgaggcgcccgagacactggctttacacaaccccactgccaaggccgtgtctttccacaccaagtcggccttccacactcctggctacccctggaaagccggctcacctttccttccaccagagtttccacataaaatctcatctacaaaggggcttggggccatttccccttacatgcaccccacaatcccagagtacccgcctcacttttacacagagcacgggctggccaccatctactcgccttacctgctggctgggagctcgcctgagtgtgacgcacccctgctgtcagtctacggaacccaagacccgagacacttcctgcctcacccggggccgatccctaagcacctggctccatctccagccacatacgatcactacaggtttttccagcaatatccctctaacctgccgattccttacggattttacaggccagagtctgcattttcctcctatggtctcagactcccacctgtcactggcctcacccgagatcagagctctcacctgcttgaagaagccaccctggtctatccagcctcgagtccttccaggttaaacccttcggaccccaacagaaaacacgtcgagttcgaaagtccaattcctgaggctaaagactcctccaaggctgggcagagagacacggaagggtccaaaatgagcccccgcgcagggagtgcagccacgggctccccagggaggccgagccccaccgacttcatgcagacgagccagacctgcgaaggcctgtacgacctctccaacaaggcagcctccagcgcactgggaagactctacccgccagagcaaagcctcacagccttcaggcctgttaagaaaagcacagaatgcctacctgcccaggctgctgagaccacagcagagtctccagtaagcctcaatgttgtgaacggagaccctcctgctccgaccggaagcgcctctctcgtctcggaggccgcgccttccagtccggacgacagctccgggatgggccccctcaacctctccaagaaatcagagataaacctggcagccacccacgaacccacgtaccaaggcagcccccaggcggaaaccgccagcttctcagagctgcaggaccttccactcaatctctcggtgaaggacccctgtaacacccaggctccgaggcctgccttccccggtcgaccacgagctgcagaacctgctgctgctgttccacagaagactgggacagaaggttctgaggatgggcccagccaccctgagaccaagccaggcagcctcgacggtgacggggccccacccacaggccccggcgaggaggctccagacgcatgcgcggtggacagcagcgaggagcagaagcagacggcagccgtggccctgtgccagctggcggcctacagccccaggaacatccgggtgggcgatggggatgctgcggccccggaacctgcctgccggcaagacacacccacactgagctccatggagagccaagaggcccagtgtgacctcagacccaaaggacaaaagaggacaagtctaagggatgctggaaaatcccagcaaggagctaagaaggcgaagctgcaggacacggccagagtgttcacactacgaaggagggcccgggtgtcctaacgccgggttcacacgtgtgttcacagagctacggccacacacacgccttccaaggtggcaagctacaacacctctgaactggcactttcacatttttacaaatgcagctgctgcttctcaaaaaaacaaacaaacaaacaaacaaaaaaccctccaattcagtttttataaatattaagcatgaatattaaaaggtgcttctacttttggttgtaaaaacacctgaatgactctaagactgatatgtattttcaagtctaagctgtcttacagaagatcttttataaatgtttccttataaatatctcaccattacaacaaattgttttaactgtttttctattagctctagctgcatatttgatgtaaatgacaattactgaaaaaatgtcagaaaaaacattttcagtactaacattaaagtgccatatgtaaaaaagaaaaatgtgatttgtataactaaataacacacaaacatcaagaggctatttatacaaataatttatttccactagggaaagtgcattactggtgaaggtattatcaatttattctacttgcttataatgttacagtgaatgttctggcttactctgcctcactttccattccccaaaatgatgtgtatgttgctaattttccaataaactcatatgaaccataaggaaacataaaatgcaaataaacataaatctatgttatccttt

SEQ ID NO: 216387 - DNA, 2459 bp, Artificial Sequence
  derived and/or modified sequence
acttaaatccctcccactggaacagcaggctccagtttcacccagcaagcgtgagaacaggtactgcttcctgagcaccgccagccaccggcaccaagaccggccacatcccagcactgcccacctctgctcccagccgccagatgacggaggctctcgccagaccctcagcacgcagagctggcttctgatagaagtgatcgggaaagaaagcaaagcgggaggtgcctctttagaaaccacgaagtgcacgcggcgtcgacagtgatcacgccacctggacagccagagtccaaggcataaggaggaaaatgagtctcctcaaagagcggaagccaaaaaagccacattacatccccaggcctccaggaaagcccttcaagtataaatgtttccaatgtccctttacttgcaatgagaagtcacatctttttaatcacatgaagtatggtctttgtaaaaactcgattactttagtatcagagcaggatcgagttcccaagtgccctaaatctaactcactagaccccaagcaaaccaaccagcccgatgccacggcgaagccagcctcttccaagtctgtcgcaaatggactctctgccttcgactcgaagcttcagcacagctctgccagggaagacatcaaggaaaacctggagctgcaagcccggggaacccacaggtgcctgggacagaagccagccctccacagggcatcaccctgcaagagcccagctccggaagccgccctcggtgcccagcctgctctggaaggcgcagctcggccttctgcatttgttccagtcggcgagcacagactcaaggggccagacaacgccgaggcgcccgagacactggctttacacaaccccactgccaaggccgtgtctttccacaccaagtcggccttccacactcctggctacccctggaaagccggctcacctttccttccaccagagtttccacataaaatctcatctacaaaggggcttggggccatttccccttacatgcaccccacaatcccagagtacccgcctcacttttacacagagcacgggctggccaccatctactcgccttacctgctggctgggagctcgcctgagtgtgacgcacccctgctgtcagtctacggaacccaagacccgagacacttcctgcctcacccggggccgatccctaagcacctggctccatctccagccacatacgatcactacaggtttttccagcaatatccctctaacctgccgattccttacggattttacaggccagagtctgcattttcctcctatggtctcagactcccacctgtcactggcctcacccgagatcagagctctcacctgcttgaagaagccaccctggtctatccagcctcgagtccttccaggttaaacccttcggaccccaacagaaaacacgtcgagttcgaaagtccaattcctgaggctaaagactcctccaaggctgggcagagagacacggaagggtccaaaatgagcccccgcgcagggagtgcagccacgggctccccagggaggccgagccccaccgacttcatgcagacgagccagacctgcgaaggcctgtacgacctctccaacaaggcagcctccagcgcactgggaagactctacccgccagagcaaagcctcacagccttcaggcctgttaagaaaagcacagaatgcctacctgcccaggctgctgagaccacagcagagtctccagtaagcctcaatgttgtgaacggagaccctcctgctccgaccggaagcgcctctctcgtctcggaggccgcgccttccagtccggacgacagctccgggaaatcagagataaacctggcagccacccacgaacccacgtaccaaggcagcccccaggcggaaaccgccagcttctcagagctgcaggaccttccactcaatctctcggtgaaggacccctgtaacacccaggctccgaggcctgccttccccggtcgaccacgagctgcagaacctgctgctgctgttccacagaagactgggacagaaggttctgaggatgggcccagccaccctgagaccaagccaggcagcctcgacggtgacggggccccacccacaggccccggcgaggaggctccagacgcatgcgcggtggacagcagcgaggagcagaagcagacggcagccgtggccctgtgccagctggcggcctacagccccaggaacatccgggtgggcgatggggatgctgcggccccggaacctgcctgccggcaagacacacccacactgagctccatggagagccaagaggcccagtgtgacctcagacccaaaggacaaaagaggacaagtctaagggatgctggaaaatcccagcaaggagctaagaaggcgaagctgcaggacacggccagagtgttcacactacgaaggagggcccgggtgtcctaa

SEQ ID NO: 216388 - protein, 1317 aa, Artificial Sequence
  derived and/or modified sequence
MASVKVAVRVRPMNRREKDLEAKFIIQMEKSKTTITNLKIPEGGTGDSGRERTKTFTYDFSFYSADTKSPDYVSQEMVFKTLGTDVVKSAFEGYNACVFAYGQTGSGKSYTMMGNSGDSGLIPRICEGLFSRINETTRWDEASFRTEVSYLEIYNERVRDLLRRKSSKTFNLRVREHPKEGPYVEDLSKHLVQNYGDVEELMDAGNINRTTAATGMNDVSSRSHAIFTIKFTQAKFDSEMPCETVSKIHLVDLAGSERADATGATGVRLKEGGNINKSLVTLGNVISALADLSQDAANTLAKKKQVFVPYRDSVLTWLLKDSLGGNSKTIMIATISPADVNYGETLSTLRYANRAKNIINKPTINEDANVKLIRELRAEIARLKTLLAQGNQIALLDSPTALSMEEKLQQNEARVQELTKEWTNKWNETQNILKEQTLALRKEGIGVVLDSELPHLIGIDDDLLSTGIILYHLKEGQTYVGRDDASTEQDIVLHGLDLESEHCIFENIGGTVTLIPLSGSQCSVNGVQIVEATHLNQGAVILLGRTNMFRFNHPKEAAKLREKRKSGLLSSFSLSMTDLSKSRENLSAVMLYNPGLEFERQQREELEKLESKRKLIEEMEEKQKSDKAELERMQQEVETQRKETEIVQLQIRKQEESLKRRSFHIENKLKDLLAEKEKFEEERLREQQEIELQKKRQEEETFLRVQEELQRLKELNNNEKAEKFQIFQELDQLQKEKDEQYAKLELEKKRLEEQEKEQVMLVAHLEEQLREKQEMIQLLRRGEVQWVEEEKRDLEGIRESLLRVKEARAGGDEDGEELEKAQLRFFEFKRRQLVKLVNLEKDLVQQKDILKKEVQEEQEILECLKCEHDKESRLLEKHDESVTDVTEVPQDFEKIKPVEYRLQYKERQLQYLLQNHLPTLLEEKQRAFEILDRGPLSLDNTLYQVEKEMEEKEEQLAQYQANANQLQKLQATFEFTANIARQEEKVRKKEKEILESREKQQREALERALARLERRHSALQRHSTLGMEIEEQRQKLASLNSGSREQSGLQASLEAEQEALEKDQERLEYEIQQLKQKIYEVDGVQKDHHGTLEGKVASSSLPVSAEKSHLVPLMDARINAYIEEEVQRRLQDLHRVISEGCSTSADTMKDNEKLHNGTIQRKLKYERMVSRSLGANPDDLKDPIKISIPRYVLCGQGKDAHFEFEVKITVLDETWTVFRRYSRFREMHKTLKLKYAELAALEFPPKKLFGNKDERVIAERRSHLEKYLRDFFSVMLQSATSPLHINKVGLTLSKHTICEFSPFFKKGVFDYSSHGTG

SEQ ID NO: 216389 - protein, 1161 aa, Artificial Sequence
  derived and/or modified sequence
MASVKVAVRVRPMNRREKDLEAKFIIQMEKSKTTITNLKIPEGGTGDSGRERTKTFTYDFSFYSADTKSPDYVSQEMVFKTLGTDVVKSAFEGYNACVFAYGQTGSGKSYTMMGNSGDSGLIPRICEGLFSRINETTRWDEASFRTEVSYLEIYNERVRDLLRRKSSKTFNLRVREHPKEGPYVEDLSKHLVQNYGDVEELMDAGNINRTTAATGMNDVSSRSHAIFTIKFTQAKFDSEMPCETVSKIHLVDLAGSERADATGATGVRLKEGGNINKSLVTLGNVISALADLSQDAANTLAKKKQVFVPYRDSVLTWLLKDSLGGNSKTIMIATISPADVNYGETLSTLRYANRAKNIINKPTINEDANVKLIRELRAEIARLKTLLAQGNQIALLDSPTALSMEEKLQQNEARVQELTKEWTNKWNETQNILKEQTLALRKEGIGVVLDSELPHLIGIDDDLLSTGIILYHLKEGQTYVGRDDASTEQDIVLHGLDLESEHCIFENIGGTVTLIPLSGSQCSVNGVQIVEATHLNQGAVILLGRTNMFRFNHPKEAAKLREKRKSGLLSSFSLSMTDLSKSRENLSAVMLYNPGLEFERQQREELEKLESKRKLIEEMEEKQKSDKAELERMQQEVETQRKETEIVQLQIRKQEESLKRRSFHIENKLKDLLAEKEKFEEERLKDLVQQKDILKKEVQEEQEILECLKCEHDKESRLLEKHDESVTDVTEVPQDFEKIKPVEYRLQYKERQLQYLLQNHLPTLLEEKQRAFEILDRGPLSLDNTLYQVEKEMEEKEEQLAQYQANANQLQKLQATFEFTANIARQEEKVRKKEKEILESREKQQREALERALARLERRHSALQRHSTLGMEIEEQRQKLASLNSGSREQSGLQASLEAEQEALEKDQERLEYEIQQLKQKIYEVDGVQKDHHGTLEGKVASSSLPVSAEKSHLVPLMDARINAYIEEEVQRRLQDLHRVISEGCSTSADTMKDNEKLHNGTIQRKLKYERMVSRSLGANPDDLKDPIKISIPRYVLCGQGKDAHFEFEVKITVLDETWTVFRRYSRFREMHKTLKLKYAELAALEFPPKKLFGNKDERVIAERRSHLEKYLRDFFSVMLQSATSPLHINKVGLTLSKHTICEFSPFFKKGVFDYSSHGTG

SEQ ID NO: 216390 - DNA, 3954 bp, Artificial Sequence
  derived and/or modified sequence
atggccagcgtgaaggtggccgtgagagtgagacccatgaacagaagagagaaggacctggaggccaagttcatcatccagatggagaagagcaagaccaccatcaccaacctgaagatccccgagggcggcaccggcgacagcggcagagagagaaccaagaccttcacctacgacttcagcttctacagcgccgacaccaagagccccgactacgtgagccaggagatggtgttcaagaccctgggcaccgacgtggtgaagagcgccttcgagggctacaacgcctgcgtgttcgcctacggccagaccggcagcggcaagagctacaccatgatgggcaacagcggcgacagcggcctgatccccagaatctgcgagggcctgttcagcagaatcaacgagaccaccagatgggacgaggccagcttcagaaccgaggtgagctacctggagatctacaacgagagagtgagagacctgctgagaagaaagagcagcaagaccttcaacctgagagtgagagagcaccccaaggagggcccctacgtggaggacctgagcaagcacctggtgcagaactacggcgacgtggaggagctgatggacgccggcaacatcaacagaaccaccgccgccaccggcatgaacgacgtgagcagcagaagccacgccatcttcaccatcaagttcacccaggccaagttcgacagcgagatgccctgcgagaccgtgagcaagatccacctggtggacctggccggcagcgagagagccgacgccaccggcgccaccggcgtgagactgaaggagggcggcaacatcaacaagagcctggtgaccctgggcaacgtgatcagcgccctggccgacctgagccaggacgccgccaacaccctggccaagaagaagcaggtgttcgtgccctacagagacagcgtgctgacctggctgctgaaggacagcctgggcggcaacagcaagaccatcatgatcgccaccatcagccccgccgacgtgaactacggcgagaccctgagcaccctgagatacgccaacagagccaagaacatcatcaacaagcccaccatcaacgaggacgccaacgtgaagctgatcagagagctgagagccgagatcgccagactgaagaccctgctggcccagggcaaccagatcgccctgctggacagccccaccgccctgagcatggaggagaagctgcagcagaacgaggccagagtgcaggagctgaccaaggagtggaccaacaagtggaacgagacccagaacatcctgaaggagcagaccctggccctgagaaaggagggcatcggcgtggtgctggacagcgagctgccccacctgatcggcatcgacgacgacctgctgagcaccggcatcatcctgtaccacctgaaggagggccagacctacgtgggcagagacgacgccagcaccgagcaggacatcgtgctgcacggcctggacctggagagcgagcactgcatcttcgagaacatcggcggcaccgtgaccctgatccccctgagcggcagccagtgcagcgtgaacggcgtgcagatcgtggaggccacccacctgaaccagggcgccgtgatcctgctgggcagaaccaacatgttcagattcaaccaccccaaggaggccgccaagctgagagagaagagaaagagcggcctgctgagcagcttcagcctgagcatgaccgacctgagcaagagcagagagaacctgagcgccgtgatgctgtacaaccccggcctggagttcgagagacagcagagagaggagctggagaagctggagagcaagagaaagctgatcgaggagatggaggagaagcagaagagcgacaaggccgagctggagagaatgcagcaggaggtggagacccagagaaaggagaccgagatcgtgcagctgcagatcagaaagcaggaggagagcctgaagagaagaagcttccacatcgagaacaagctgaaggacctgctggccgagaaggagaagttcgaggaggagagactgagagagcagcaggagatcgagctgcagaagaagagacaggaggaggagaccttcctgagagtgcaggaggagctgcagagactgaaggagctgaacaacaacgagaaggccgagaagttccagatcttccaggagctggaccagctgcagaaggagaaggacgagcagtacgccaagctggagctggagaagaagagactggaggagcaggagaaggagcaggtgatgctggtggcccacctggaggagcagctgagagagaagcaggagatgatccagctgctgagaagaggcgaggtgcagtgggtggaggaggagaagagagacctggagggcatcagagagagcctgctgagagtgaaggaggccagagccggcggcgacgaggacggcgaggagctggagaaggcccagctgagattcttcgagttcaagagaagacagctggtgaagctggtgaacctggagaaggacctggtgcagcagaaggacatcctgaagaaggaggtgcaggaggagcaggagatcctggagtgcctgaagtgcgagcacgacaaggagagcagactgctggagaagcacgacgagagcgtgaccgacgtgaccgaggtgccccaggacttcgagaagatcaagcccgtggagtacagactgcagtacaaggagagacagctgcagtacctgctgcagaaccacctgcccaccctgctggaggagaagcagagagccttcgagatcctggacagaggccccctgagcctggacaacaccctgtaccaggtggagaaggagatggaggagaaggaggagcagctggcccagtaccaggccaacgccaaccagctgcagaagctgcaggccaccttcgagttcaccgccaacatcgccagacaggaggagaaggtgagaaagaaggagaaggagatcctggagagcagagagaagcagcagagagaggccctggagagagccctggccagactggagagaagacacagcgccctgcagagacacagcaccctgggcatggagatcgaggagcagagacagaagctggccagcctgaacagcggcagcagagagcagagcggcctgcaggccagcctggaggccgagcaggaggccctggagaaggaccaggagagactggagtacgagatccagcagctgaagcagaagatctacgaggtggacggcgtgcagaaggaccaccacggcaccctggagggcaaggtggccagcagcagcctgcccgtgagcgccgagaagagccacctggtgcccctgatggacgccagaatcaacgcctacatcgaggaggaggtgcagagaagactgcaggacctgcacagagtgatcagcgagggctgcagcaccagcgccgacaccatgaaggacaacgagaagctgcacaacggcaccatccagagaaagctgaagtacgagagaatggtgagcagaagcctgggcgccaaccccgacgacctgaaggaccccatcaagatcagcatccccagatacgtgctgtgcggccagggcaaggacgcccacttcgagttcgaggtgaagatcaccgtgctggacgagacctggaccgtgttcagaagatacagcagattcagagagatgcacaagaccctgaagctgaagtacgccgagctggccgccctggagttcccccccaagaagctgttcggcaacaaggacgagagagtgatcgccgagagaagaagccacctggagaagtacctgagagacttcttcagcgtgatgctgcagagcgccaccagccccctgcacatcaacaaggtgggcctgaccctgagcaagcacaccatctgcgagttcagccccttcttcaagaagggcgtgttcgactacagcagccacggcaccggctag

SEQ ID NO: 216391 - DNA, 3954 bp, Artificial Sequence
  derived and/or modified sequence
atggcttccgtcaaagtggcagtaagggttagacccatgaaccgacgtgaaaaagacctcgaagcgaagtttatcattcagatggagaagtccaaaaccacaattacaaatctgaaaatccccgaaggggggacaggcgacagcggccgcgagcgtactaagacgttcacatacgacttctccttctattccgccgataccaaaagcccagactatgttagccaagaaatggtcttcaagacacttgggacagacgtcgtgaaatcggctttcgaagggtacaacgcttgcgtctttgcctatggacaaactggatccggcaagtcttataccatgatgggaaactccggcgattctggcctcatcccacggatctgtgaaggcttgttttcacgcatcaatgagacgacgcgttgggacgaggcctcattccgcaccgaagtgtcctacctcgaaatatacaacgaacgggtaagggacctcctacgcaggaaatcctctaaaacattcaacctgcgcgtgcgcgagcatccaaaggaaggcccatatgtggaagatctgagtaagcaccttgtccagaattacggtgacgtggaagaactgatggacgccggaaatatcaatagaacgacggcggcaacaggcatgaatgacgtgtcttctcggtcccacgctatattcacaattaaattcactcaggccaaatttgatagtgaaatgccctgtgaaacagtgagtaagatccacctggtagacttagccgggtctgaacgcgccgacgccaccggggcaacgggcgtgagactaaaggagggaggcaatatcaacaaatccttggttacactgggcaatgtgataagtgccttggctgacttaagccaggatgcagccaataccttggccaagaagaaacaggtcttcgtgccctaccgcgactctgttttgacatggttacttaaggacagcttaggcggcaattctaaaactattatgatagccacaatcagcccggccgatgtaaattacggtgaaaccctaagcacactcagatacgcaaatcgcgccaaaaacataattaacaaacccaccatcaacgaagacgccaacgttaaactgatccgcgaactgcgcgccgaaatcgcacgcctgaaaacccttctggctcagggtaatcagatagccttgttagacagccctactgctctgtctatggaggaaaagctgcagcagaacgaggccagagtccaggaactgacgaaagaatggactaacaaatggaatgaaacccagaacatccttaaagagcagacactagcattaagaaaggaaggaattggtgtggtcctggacagtgagctgccgcacctgatcggcatcgatgacgacctgctctctacgggaataattctgtaccacctaaaggagggtcaaacctatgtcggaagggacgatgcctctactgagcaagacattgtgcttcacggtctcgacctggagtccgaacattgcatttttgagaatataggcgggaccgttacactaatcccattgtccggatctcaatgcagtgttaatggcgtgcagatcgtcgaggcaacgcaccttaaccaaggcgctgtgattctgcttgggaggacaaatatgtttaggttcaatcatccaaaagaggccgctaagctgcgggagaaacgcaagtccggcctgctgtccagcttttcgctgagcatgactgacctctcgaagagtagagagaatctgtccgcggtaatgctatacaatccaggcctggagtttgaacgtcaacagagagaagagttggagaagctcgagtcaaagcgcaagttgattgaggagatggaagagaagcagaagtcagataaagccgaactcgaacggatgcaacaggaggtggagacccagagaaaagagactgaaatcgtgcaactgcagatacgcaaacaggaggagagcctgaagcgtcggtctttccacatcgaaaataaactgaaggacctgcttgcagagaaggagaaatttgaagaggaaagactccgggagcagcaagaaatcgaactgcagaagaagaggcaagaagaagagacgtttctccgagttcaagaggagctacaacgcctgaaagagctcaataacaacgaaaaggcagagaagttccagatttttcaggaactggaccaacttcagaaggagaaggatgagcagtatgcaaagctcgagctggaaaagaaaagactcgaggaacaggaaaaggagcaggtcatgctggtcgcacacctggaggagcaactccgcgagaagcaggagatgattcagctgttgaggagaggcgaagtgcagtgggtcgaagaagaaaaacgtgacctcgaaggaatacgggagtctttgttgcgtgtgaaggaggctcgcgccggcggggacgaagatggagaagagcttgaaaaggcacagttaagatttttcgagtttaaacggcgacagttggtcaaattggtgaatctggaaaaagacctggttcagcaaaaagatatcctgaagaaagaggtgcaggaagagcaggaaattttggaatgcctcaagtgtgaacacgacaaagagagccggcttctcgagaagcacgatgagtctgtcactgatgtgactgaggtgccacaggacttcgagaaaataaaacccgtggaataccgactgcaatataaggaaaggcaactgcagtacctgctacaaaaccaccttcctacactgttggaagaaaaacaacgcgcatttgaaatactggatcgggggccgctgtccctggacaacactctatatcaggtcgaaaaagagatggaagaaaaagaggaacagttggcacagtatcaggctaacgctaaccagctgcaaaagctgcaagccactttcgagtttactgccaacatagcacggcaggaagaaaaagtgagaaagaaggagaaggagattcttgaaagtagggagaagcagcaacgagaggcccttgaacgggcattagcacgcctcgaacgcagacactccgcactccagcgacattctaccctcgggatggagatcgaggagcagcggcagaaactggcctcacttaactcgggttctagagaacagtctgggcttcaggcctctttagaggcagaacaggaggccctggaaaaggaccaggaaaggctcgaatacgaaatccaacagctaaaacagaaaatctacgaagtggatggtgtgcagaaggaccaccacggtactctggagggtaaggtggccagcagttctctgcccgtctccgctgagaagagccaccttgttccgttgatggatgctagaatcaatgcgtacatcgaagaggaggttcagcgccggctgcaggatctgcatcgagtcatctctgagggttgttctacgtcggcagacaccatgaaggataatgagaaactgcataatggaactatccaacgcaagctgaagtacgagcgcatggtgtcacggtccctaggcgctaatccagacgatctcaaggacccaattaaaatctccatacctagatacgttctctgtggccagggcaaggacgcacattttgagtttgaagttaagattacggtcctggatgaaacttggaccgtcttccgccggtacagtcgattcagggagatgcacaaaacattgaaactgaagtatgcagagctcgcagctctggaatttccaccaaagaaactttttgggaacaaagatgagcgagtcattgctgagaggagaagtcacttggaaaagtatctccgcgatttcttctcagtcatgctgcagagcgccacaagtcctctccatatcaacaaggtgggtctaaccttatctaaacatacaatatgtgaattctcgccttttttcaagaaaggcgtatttgattatagcagccatggcaccggctag

SEQ ID NO: 216392 - DNA, 5261 bp, Artificial Sequence
  derived and/or modified sequence
gcaggtggggctgccgcggaactccaggtccggccgggagcagaggggcgggggcgagagggaagtgggcgggagccgcgatctgagtagccagcgtcgccggcgaccgcggagttctgggctagtgggaccccgcgcgggctggttcgggatgagcgatggcatcggtcaaggtggccgtgagggtccggcccatgaatcgcagggaaaaggacttggaggccaagttcattattcagatggagaaaagcaaaacgacaatcacaaacttaaagataccagaaggaggcactggggactcaggaagagaacggaccaagaccttcacctatgacttttctttttattctgctgatacaaaaagcccagattacgtttcacaagaaatggttttcaaaaccctcggcacagatgtcgtgaagtctgcatttgaaggttataatgcttgtgtctttgcatatgggcaaactggatctggaaagtcatacactatgatgggaaattctggagattctggcttaatacctcggatctgtgaaggactcttcagtcggataaatgaaaccaccagatgggatgaagcttcttttcgaactgaagtcagctacttagaaatttataacgaacgtgtgagagatctacttcggcggaagtcatctaaaaccttcaatttgagagtccgtgagcatcccaaagaaggcccttatgttgaggatttatccaaacatttagtacagaattatggtgacgtagaagaacttatggatgcgggcaatatcaaccggaccaccgcagcgactgggatgaacgacgtcagtagcaggtctcatgccatcttcaccatcaagttcactcaggctaaatttgattctgaaatgccatgtgaaaccgtcagtaagatccacttggttgatcttgccggaagtgagcgtgcagatgccaccggagccaccggggttaggctaaaggaagggggaaatattaacaagtccctcgtgactctggggaacgtcatttctgccttagctgatttatctcaggatgctgcaaatactcttgcaaagaagaagcaagttttcgtgccttacagggattctgtgttgacttggttgttaaaagatagccttggaggaaactctaaaactatcatgattgccaccatttcacctgctgatgtcaattatggagaaaccctaagtactcttcgctatgcaaatagagccaaaaacatcatcaacaagcctaccattaatgaggatgccaacgtcaaacttatccgtgagctgcgagctgaaatagccagactgaaaacgctgcttgctcaagggaatcagattgccctcttagactcccccacagctttaagtatggaggaaaaacttcagcagaatgaagcaagagttcaagaattgaccaaggaatggacaaataagtggaatgaaacccaaaatattttgaaagaacaaactctagccctcaggaaagaagggattggagttgttttggattctgaactgcctcatttgattggcatcgatgatgaccttttgagtactggaatcatcttatatcatttaaaggaaggtcagacatacgttggtagagacgatgcttccacggagcaagatattgttcttcatggccttgacttggagagtgagcattgcatctttgaaaatatcggggggacagtgactctgatacccctgagtgggtcccagtgctctgtgaatggtgttcagatcgtggaggccacacatctaaatcaaggtgctgtgattctcttgggaagaaccaatatgtttcgctttaaccatccaaaggaagccgccaagctcagggagaagaggaagagtggccttctgtcctccttcagcttgtccatgaccgacctctcgaagtcccgtgagaacctgtctgcagtcatgttgtataaccccggacttgaatttgagaggcaacagcgtgaagaacttgaaaaattagaaagtaaaaggaaactcatagaagaaatggaggaaaagcagaaatcagacaaggctgaactggagcggatgcagcaggaggtggagacccagcgcaaggagacagaaatcgtgcagctccagattcgcaagcaggaggagagcctcaaacgccgcagcttccacatcgagaacaagctaaaggatttacttgcggagaaggaaaaatttgaagaggagaggctgagggaacagcaggaaatcgagctgcagaagaagagacaagaagaagagacctttctccgcgtccaagaagaactccaacgactcaaagaactcaacaacaacgagaaggctgagaagtttcagatatttcaagaactggaccagctccaaaaggaaaaagatgaacagtatgccaagcttgaactggaaaaaaagagactagaggagcaggagaaggagcaggtcatgctcgtggcccatctggaagagcagctccgagagaagcaggagatgatccagctcctgcggcgtggggaggtacagtgggtggaagaggagaagagggacctggaaggcattcgggaatccctcctgcgggtgaaggaggctcgtgccggaggggatgaagatggcgaggagttagaaaaggctcaactgcgtttcttcgaattcaagagaaggcagcttgtcaagctagtgaacttggagaaggacctggttcagcagaaagacatcctgaaaaaagaagtccaagaagaacaggagatcctagagtgtttaaaatgtgaacatgacaaagaatctagattgttggaaaaacatgatgagagtgtcacagatgtcacggaagtgcctcaagatttcgagaaaataaagccagtggagtacaggctgcaatataaagaacgccagctacagtacctcctgcagaatcacttgccaactctgttggaagaaaagcagagagcatttgaaattcttgacagaggccctctcagcttagacaacactctttatcaagtagaaaaggaaatggaagaaaaagaagaacagcttgcacagtaccaggccaatgcaaaccagctgcaaaagctccaagccacctttgaattcactgccaacattgcacgtcaggaggaaaaagtgaggaaaaaggaaaaggagattttggagtccagagagaagcagcagagagaggcgctggagcgggccctggccaggctggagaggagacattctgcgctgcagaggcactccaccctgggcatggagattgaagagcagaggcagaaacttgccagtctgaacagtggcagcagagagcagtcagggctccaggctagcctggaggctgagcaggaagccctggagaaggaccaggagaggttagaatatgaaatccagcagctgaaacagaagatttatgaggtcgatggtgttcaaaaagatcatcatgggaccctggaagggaaggtggcttcttccagcttgccagtcagtgctgaaaaatcacacctggttcccctcatggatgccaggatcaatgcttacattgaagaagaagtccaaagacgccttcaggatttgcatcgtgtgattagtgaaggctgcagtacatctgcagacacgatgaaggataatgagaaacttcacaatggcaccattcaacgtaaactaaaatatgagcggatggtttctcgctctttgggcgcaaatccagatgacctgaaggacccaattaaaattagtatcccacgctacgtcctctgcgggcaaggaaaggatgcacacttcgagtttgaggtcaagattactgtcctagatgagacatggactgtattcaggcgttacagtcgttttcgagaaatgcataaaacattgaagttaaagtatgcagagcttgctgcccttgaatttcctccaaagaaactatttggaaataaggatgaacgtgtgattgctgagagacgaagtcacttagagaaatacctcagggactttttcagcgtgatgctccagtccgcaacatctcccctccacatcaacaaagtgggactgactctctcgaaacataccatttgtgagttttcaccattcttcaagaaaggagtctttgactacagcagccacgggacggggtagagccaggggtgatggaggaaccaccacagcagtgccttctcgtcgaagcgggctccgatgcagggcagctcccccatgcgaggatccgggtctgcctcctcctgctgaagacagacatgcagcagcgggcccgggccacctcacgtttccatacctagtgcctgagtttggggatgggatgctctgcctgctgatgtggccctgacaggcagccgttaccgttccattgcggttgaacgtggccttttcccacagtgcttccttctcactgcgcagcaaagttcgtcccctgtggcaagatagatgtggttgggccatcgtgggttccctgagcccagccagcctgggacctcccaaagtgggtggcttaccagaccacccttaaatgactttcatctggtttcctctttcaccaaaatatactcgtattttttatatttcttccatgtggctggctatattccaagaaaagcattttaaattatttcattgtatttttttctttttttccctcatttgaatcagaacttttatataaaacccaaacactgatgtttacacagaatttcatattctgcaaaagggattttttgatccaatcatgactgtagtcttccatgcttgacaaattggatgtagacaacattacttaaaacttctataaatccctacaattaggatatttatttaaccttgaatattcaagaacattctcccaaatctaaatggctactgtgcattcttgagctttttctgctaagcacaaaatgaacgcaaagctaaatgcatatttttaagtattattcacattttttgttacagaatctattggatctttggctggaaaactagaatttatagcagtttattaatgataccttaaattactcaggacttaatgtagcattgcacttctgtgtacagtaaaactgctttgttttactaaagagaaaaatgtgagtggaaaaaatatgtatgtggtatatactcaaatgtatataattctatctatagatttatatatgtatacattctgtacagtagttccatcaaaatatgtaataattcacaccaattttattaaatgtatttgctttttcaaaatttaaattgagctgctatcaatattaaatgaagttatggcatcta

SEQ ID NO: 216393 - DNA, 3954 bp, Artificial Sequence
  derived and/or modified sequence
atggcctctgtgaaggtggccgtgcgggtgcggcccatgaacagaagagagaaggacctggaggccaagttcatcatccagatggagaagagcaagaccaccatcaccaacctgaagatccctgagggcggcactggagacagcggccgggagaggaccaagaccttcacctatgacttctccttctacagcgctgacaccaagagcccagactatgtgtcccaggagatggtgttcaagaccctgggcacagatgtggtgaagagcgcctttgagggctacaatgcctgtgtgtttgcctacggccagacaggcagcggcaagagctacaccatgatgggcaacagcggggacagcggcctcatcccccgcatctgtgagggcctcttcagccgcatcaatgagaccacccgctgggatgaggccagcttcagaacagaggtgtcctacctggagatctacaatgaaagagtgcgggacctgctgcggaggaagagcagcaagaccttcaacctgcgggtgcgggagcaccccaaggagggcccctacgtggaggacctgagcaagcacctggtgcagaactatggagatgtggaggagctgatggatgctggcaacatcaacagaaccacagctgccaccggcatgaatgatgtgagcagccgcagccacgccatcttcaccatcaagttcacccaggccaagtttgacagcgagatgccctgtgagaccgtgtccaagatccacctggtggacctggccggcagcgagcgggcagatgccaccggggccactggagtgcggctgaaggagggcggcaacatcaacaagagcctggtgaccctgggcaatgtcatcagcgccctggccgacctgagccaggatgctgccaacaccctggccaagaagaagcaggtgtttgtgccctacagagattctgtgctgacctggctgctgaaggacagcctgggcggcaacagcaagaccatcatgattgccaccatcagccctgcagatgtgaactacggggagaccctgagcaccctgcgctatgccaacagagccaagaacatcatcaacaagcccaccatcaatgaagatgccaacgtgaagctgatccgggagctgcgggcagagatcgcccggctgaagaccctgctggcccagggcaaccagatcgccctgctggacagccccacagccctgtccatggaggagaagctgcagcagaatgaggcccgggtgcaggagctgaccaaggagtggaccaacaagtggaatgagacccagaacatcctgaaggagcagaccctggccctgaggaaggagggcattggagtggtgctggacagcgagctgccccacctgattggaattgatgatgacctgctgagcacaggcatcatcctgtaccacctgaaggagggccagacctacgtgggcagagatgatgccagcacagagcaggacatcgtgctgcacggcctggacctggagagcgagcactgcatctttgagaacatcggcggcaccgtgaccctcatccccctgagcggcagccagtgcagcgtgaatggagtgcagatcgtggaggccacccacctgaaccagggcgctgtgatcctgctgggccgcaccaacatgttccgcttcaaccaccccaaggaggccgccaagctgcgggagaagaggaagagcggcctgctgagcagcttcagcctgtccatgacagacctgagcaagagccgggagaacctgtctgctgtgatgctgtacaaccctggcctggagtttgagcggcagcagcgggaggagctggagaagctggagagcaagaggaagctgattgaggagatggaggagaagcagaagagtgacaaggccgagctggagaggatgcagcaggaggtggagacccagaggaaggagacagagatcgtgcagctgcagatcaggaagcaggaggagagcctgaagaggaggagcttccacatcgagaacaagctgaaggacctgctggccgagaaggagaagtttgaggaggagcggctgcgggagcagcaggagattgagctgcagaagaagaggcaggaggaggagaccttcctgcgggtgcaggaggagctgcagaggctgaaggagctgaacaacaatgagaaggccgagaagttccagatcttccaggagctggaccagctgcagaaggagaaggatgagcagtatgccaagctggagctggagaagaagaggctggaggagcaggagaaggagcaggtgatgctggtggcccacctggaggagcagctgcgggagaagcaggagatgatccagctgctgcggcggggggaggtgcagtgggtggaggaggagaagagggacctggagggcatccgggagagcctgctgcgggtgaaggaggcccgggctggaggagatgaagatggagaggagctggagaaggcccagctgcgcttctttgagttcaagaggcggcagctggtgaagctggtgaacctggagaaggacctggtgcagcagaaggacatcctgaagaaggaggtgcaggaggagcaggagatcctggagtgcctgaagtgtgaacatgacaaggagagccggctgctggagaagcatgatgaatctgtgacagatgtgacagaggtgccccaggactttgagaagatcaagcctgtggagtaccgcctgcagtacaaggagcggcagctgcagtacctgctgcagaaccacctgcccaccctgctggaggagaagcagagggcctttgagatcctggaccggggccccctgagcctggacaacaccctgtaccaggtggagaaggagatggaggagaaggaggagcagctggcccagtaccaggccaatgccaaccagctgcagaagctgcaggccacctttgagttcaccgccaacatcgcccggcaggaggagaaggtgaggaagaaggagaaggagatcctggagagccgggagaagcagcagcgggaggccctggagcgggccctggcccggctggagcggcggcacagcgccctgcagaggcacagcaccctgggcatggagattgaggagcagaggcagaagctggccagcctgaacagcggcagccgggagcagagcggcctgcaggccagcctggaggccgagcaggaggccctggagaaggaccaggagcggctggagtatgagatccagcagctgaagcagaagatctatgaggtggatggagtgcagaaggaccaccacggcaccctggagggcaaggtggccagcagcagcctgcctgtgtctgctgagaagagccacctggtgcccctgatggatgcccgcatcaatgcctacatcgaggaggaggtgcagaggcggctgcaggacctgcacagggtcatcagcgagggctgcagcaccagcgctgacaccatgaaggacaatgagaagctgcacaacggcaccatccagaggaagctgaagtatgaaagaatggtgagccgcagcctgggcgccaacccagatgacctgaaggaccccatcaagatcagcatccccaggtatgtgctgtgtggccagggcaaggatgcccactttgaatttgaggtgaagatcaccgtgctggatgagacctggacagtgttccgccgctacagccgcttccgggagatgcacaagaccctgaagctgaagtatgcagagctggccgccctggagttcccccccaagaagctgtttggaaacaaggatgagcgggtgattgctgagcggcgcagccacctggagaagtacctgcgggacttcttctctgtgatgctgcagagcgccaccagccccctgcacatcaacaaggtgggcctgaccctgagcaagcacaccatctgtgagttcagccccttcttcaagaagggcgtgtttgactacagcagccacggcaccggctag

SEQ ID NO: 216394 - DNA, 3954 bp, Artificial Sequence
  derived and/or modified sequence
atggccagcgtgaaggtggccgtgcgggtgcggcccatgaaccggcgcgaaaaggacctggaagccaaattcattatacagatggaaaagagcaagactacaatcacaaacctcaaaattcccgaaggcggcactggggactcagggcgggaacgcaccaagacatttacatatgattttagcttctatagcgcagatacaaagagccccgattacgtgtcccaggaaatggtctttaagaccctgggcactgacgtagtgaagtccgctttcgagggctataatgcctgtgtcttcgcctatggccagactggatcaggtaagtcatacacaatgatgggcaactcaggagactcaggcttaatcccgcgtatatgtgagggcttgttcagtaggatcaacgagactacaagatgggacgaagcttccttcaggactgaagtcagctatctggagatctataatgagcgtgttcgcgatctgctccgccggaaaagctctaaaacattcaacctccgcgtacgggaacacccaaaagagggcccttatgtcgaggacctctccaagcaccttgtgcaaaactacggggacgtcgaggaactcatggacgctgggaacataaacagaaccacagctgccacggggatgaatgatgtctcgtcacggagccacgccattttcacgatcaaattcacacaggcgaaatttgactctgagatgccatgcgagacagtgtctaaaattcaccttgttgaccttgccggttctgaaagagccgatgccacaggcgccactggtgtgagactgaaggaaggcggcaatatcaataaatcgctggtcaccctggggaacgtgatttctgccctggcagacctgtcacaggacgccgcaaacacgctggctaagaaaaaacaggtcttcgtgccttatcgggattctgtactcacatggcttctgaaggactcactagggggaaatagcaaaaccataatgatagcaacaatcagcccagccgatgttaactacggggaaaccttgagcaccttgcggtacgcaaatcgcgccaaaaacattatcaataaacccacaatcaacgaagacgccaacgtcaagcttattagggaattacgcgccgaaatcgccagactgaaaactcttctggcccagggcaaccagatagccctgcttgactcaccaacggctctgtccatggaagagaaattacagcagaatgaagcccgcgtgcaggaactcactaaggagtggactaataagtggaacgagacccagaatattctgaaggagcagacactcgcgttacggaaggagggcataggcgtggtactggactccgagcttcctcatcttataggaatagatgatgatctgctttcgacaggcatcatcctatatcacctgaaggagggacagacgtatgtgggtagagatgatgccagcaccgagcaggacatcgtgctgcacggcctggacttggaatctgagcactgcatctttgaaaacatcggtggaacagttaccctaattcccctgtccggcagccaatgctccgtcaatggggtgcagattgtggaggctacccaccttaatcagggggccgtgatattgcttggtcggaccaacatgttccgatttaatcaccccaaagaagccgctaaactgagagagaagagaaagtctggcctgctgagtagtttctccttatcgatgactgatctcagcaagtcacgagagaatctgagtgctgtgatgctgtataatcccggacttgaatttgaaagacagcagcgagaggagttggaaaaactggaatcaaaaaggaaacttatcgaggaaatggaagagaagcagaagagcgacaaggcagaattagaaagaatgcagcaggaggtggagacacaacgcaaagaaacagagatcgtacagttacagattaggaaacaagaggaatccttaaagcggagatcttttcacatcgagaacaaactcaaagacctcttggctgaaaaagagaaatttgaagaagagcggctcagagagcagcaggagatcgagctccagaaaaaacggcaggaagaggagactttccttcgagtgcaagaagagcttcaacgattaaaagaactcaacaacaatgagaaggccgaaaagttccagatttttcaggagctcgatcagcttcagaaggaaaaagacgagcagtacgccaaacttgagctcgagaagaaaaggctggaagagcaggagaaagagcaggtgatgctggtggcccacctcgaagagcagctgagagaaaagcaggaaatgatccagttgctgcgccgaggagaagtgcagtgggtcgaggaggagaagcgcgacttggaagggattcgcgaatctctcctgcgagtgaaagaggcccgcgctggaggagatgaggacggcgaagaattagaaaaggcgcagctcagattttttgagtttaagcgcaggcagctcgttaagcttgtgaacctggagaaagatcttgtgcagcagaaggacatcctgaagaaggaggtgcaggaggagcaggaaatcctcgaatgtttgaaatgtgaacatgataaagagtcacgcttgctagagaagcatgatgagtccgtaaccgacgtcaccgaggtcccgcaggatttcgagaaaataaagcccgtggagtatcgcctgcaatataaggagaggcagctgcagtacctgctccaaaatcaccttcctacgctcctggaggagaagcagcgagcctttgaaatcctcgatcgggggccattaagtcttgacaatacactgtaccaggtcgagaaggagatggaagagaaggaagaacagctcgctcagtaccaggccaatgcgaaccagcttcagaagctgcaggctaccttcgagtttaccgctaatatcgccagacaggaagagaaggtgaggaaaaaggaaaaggagattttggaatctagagaaaagcagcagcgcgaggccctggagcgagcattagctagattggagaggcggcattctgcccttcagcgccattcgaccctgggcatggagatagaggagcagagacagaagctggctagtcttaacagcggaagccgggagcagtctggcttacaggcaagcctcgaggccgaacaagaagccctagaaaaagatcaggaaagactggagtatgagatccaacagttgaagcagaagatctatgaagtggatggagtccagaaggaccaccatggaacactagaaggtaaggtggcgagctcatccctgccagtatctgccgaaaagagccatttggtgccactaatggacgcccgtataaatgcttatatcgaagaggaagtgcagagaaggttgcaggacctccatcgggtgatcagcgaagggtgctccacatctgccgacactatgaaagataacgaaaaattacacaatgggactatccagcgcaaactgaagtacgagaggatggtgtccagatccctcggggctaaccctgacgatctcaaggaccctatcaaaatcagtatcccccgttatgtattgtgtggtcagggcaaggatgcacattttgaatttgaggttaagattaccgtgcttgatgagacatggactgtgtttcgtaggtacagtaggttcagagagatgcacaagacactgaagctcaaatacgcagaattagccgccttggaattccctccgaaaaaactcttcgggaataaggacgaacgtgtaatcgccgaacgcaggtcccacttagagaaatacctgcgggacttttttagcgtgatgctgcagtccgctacctcacccctacacatcaacaaggtggggctcacactgagcaagcataccatttgtgaattttctcccttctttaagaagggtgtctttgactatagctcccacggcactggctag

SEQ ID NO: 216395 - DNA, 3954 bp, Artificial Sequence
  derived and/or modified sequence
atggcctctgttaaggtcgcggtcagagtccggccaatgaataggagagaaaaagatcttgaggcgaagtttattatccaaatggaaaaaagcaagacaactataactaacctcaaaatccctgagggagggactggtgactccggccgagagaggacaaaaacatttacttacgatttctccttttactcagccgataccaagtcacctgattacgtcagccaggagatggtattcaagaccctggggactgatgtagtgaagtcggcctttgaagggtacaacgcgtgcgtgtttgcgtatggacaaacgggatctggtaagtcttacaccatgatgggcaacagcggcgactcgggactcataccccgaatctgcgagggacttttttcgagaatcaatgagaccacccgctgggatgaggcatcgttccgcaccgaggttagctatttggagatctacaacgagagggtgagggacctgttgcggaggaagtcctccaaaacctttaaccttcgcgtcagagagcatcccaaggaggggccatacgtagaggacttaagtaaacacctagtccagaactacggagacgttgaagagctgatggatgcaggtaacatcaatcggaccacagccgctaccgggatgaatgatgtctcatcgcgaagccacgctatcttcactatcaaattcacccaagccaagtttgactcggagatgccttgcgaaacagtgtcaaagatccacctggtcgacctggcaggatcagagagggctgacgctaccggggcaacaggcgtgcggctcaaagaagggggtaacatcaataagtccttggtaacccttgggaatgtgatcagtgctctcgctgacctgtcacaggacgccgctaatactctggcaaaaaagaagcaggtgttcgtgccataccgagattctgtgcttacatggctgcttaaggactctctcggcggaaacagcaagacgatcatgatcgcaactatcagtcccgctgacgtgaattacggggagaccttgtctacactgagatatgcaaatcgcgctaaaaacatcattaacaaaccaaccattaatgaggatgccaatgtcaaactcatcagggaactcagagccgagatcgcacggttgaagactcttctcgcccagggcaatcagattgcgcttctggactctccaacagctctgtccatggaggagaaattacagcaaaacgaggcaagagtgcaggagctgaccaaggaatggacaaacaagtggaacgagacacagaacatccttaaggagcagactctggccttgagaaaggaagggatcggcgtggttctggatagcgagctgccccacctcatcgggatcgatgacgatctcttatctaccggaattattctgtaccatcttaaagagggccagacctatgtggggagagatgacgcaagcacagaacaggacattgtgctccatgggctcgatctcgagagcgaacactgcattttcgaaaacataggtggcactgtgacactcatccctttgtctggtagtcaatgcagtgtgaacggcgttcagatcgtcgaggcaacccacttgaatcaaggggcagtgatccttcttgggaggacaaacatgtttaggtttaaccatccgaaggaggccgcaaagttgcgggaaaaacggaagagtggtctattatctagcttcagtctcagtatgacagaccttagtaagtctcgtgagaacctgagtgccgtgatgctttacaatcccggactggagtttgagaggcagcagcgtgaggaattggagaaactggagtcaaaacgcaagctcatcgaagaaatggaagagaaacagaagagcgataaggcggaactggaacgcatgcagcaggaggtggagactcagcgtaaggagaccgagattgtgcagttgcaaatccggaaacaggaggagtctctcaagagacgtagctttcatattgaaaacaaactgaaagacctgctggctgaaaaagaaaagtttgaagaggagagattgcgggagcaacaagaaatcgagctgcagaagaaacgacaggaagaagagacattcctccgggtacaggaagagttgcagcgcctgaaggaattaaacaataacgagaaagcagaaaaatttcagatcttccaggaacttgatcagctgcaaaaggaaaaggacgagcagtacgccaaactcgaactggaaaagaagaggctggaagagcaggagaaggagcaggtgatgctcgtcgcgcatctggaagaacagctgagagagaaacaagagatgattcagttgctacggaggggggaagttcagtgggtggaggaggagaagagggatctggaaggtatacgggaaagcctgctcagggttaaggaggccagagccggtggcgacgaggacggggaagagctggagaaggctcagttgcgtttctttgagttcaagagaagacagcttgtgaaactcgtgaacctggaaaaagacttggtccagcagaaggatattcttaagaaggaggtccaggaggagcaggagattctggagtgcctcaaatgcgagcacgataaggaatcgcgtctgctggaaaagcatgacgaaagtgttaccgacgtcacagaggtcccacaggacttcgagaagataaagcctgtcgagtaccggcttcagtacaaagagcgtcagttgcaatacctacttcagaatcaccttcccacactgctcgaggagaaacagagagccttcgagatcctagatcgaggcccactatctctggataataccttgtatcaagttgagaaggaaatggaggagaaagaggaacagctcgctcagtatcaggctaatgccaaccagcttcagaagctgcaggctactttcgagttcactgccaatatcgctagacaagaggagaaagtgagaaaaaaagaaaaagagatccttgagtccagagaaaaacagcagagagaggctcttgagcgagcactcgcgagattggagcgacgccatagtgccctccagagacactctacccttggtatggagatagaagagcagcgacaaaagctagccagcctgaattccggctcacgagagcagtctggactgcaagcctctctggaagccgagcaggaggcactcgaaaaggaccaagaacgcttggaatatgaaatccaacaattaaaacagaaaatctatgaagtggatggagtgcagaaagaccaccacggaactttggaggggaaagtcgcatctagctcacttccagtttctgccgagaaaagccacttggtgcctctgatggatgcacgaatcaatgcttatatcgaagaggaagtccagcgaagactgcaggacctacaccgagtcatcagtgaaggctgctccaccagtgccgacaccatgaaagataacgaaaagttgcacaacggtaccatccaacgcaaactgaagtacgagcggatggtctcacgctccctgggggctaaccccgacgacctaaaagacccaatcaagatttcaatcccaaggtacgtgctgtgtggacagggcaaagacgctcactttgagtttgaggtcaaaatcaccgtactggatgagacctggaccgtgttccgcaggtactccagattcagagagatgcataagacattaaaactgaaatacgcagaacttgccgctctggagttccctcccaaaaagctctttgggaacaaagacgagcgtgttatagcggagagacggtcccatctcgaaaagtacttgagggatttcttttccgtaatgttgcaatccgcaacatcccccctacacattaacaaagtcggcctaactctgtctaagcatacaatatgcgagttttctcccttttttaaaaagggcgtcttcgactacagctcacatggaactgggtag

SEQ ID NO: 216396 - protein, 76 aa, Artificial Sequence
  derived and/or modified sequence
MEVEAAEARSPAPGYKRSGRRYKCVSCTKTFPNAPRAARHAATHGPADCSEEVAEVKPKPETEAKAEEASGEKVSG

SEQ ID NO: 216397 - protein, 103 aa, Artificial Sequence
  derived and/or modified sequence
MEVEAAEARSPAPGYKRSGRRYKCVSCTKTFPNAPRAARHAATHGPADCSEEVAEVKPKPETEAKAEEASGEKVSGSAAKPRPYACPLCPKAYKTAPELRSHG

SEQ ID NO: 216398 - DNA, 327 bp, Artificial Sequence
  derived and/or modified sequence
atggaggtggaggccgccgaggccagaagccccgcccccggctacaagagaagcggcagaagatacaagtgcgtgagctgcaccaagaccttccccaacgcccccagagccgccagacacgccgccacccacggccccgccgactgcagcgaggaggtggccgaggtgccccacagaagagcccccctgcccctgctgagagtgagagaggagctgctgcccctgatcctggcccacgtgccccccgcccaccccagaggcaccgaggccctgcccctgcccggcctgagacagggcctgcacgccgcccagttcctgcccgagtag

SEQ ID NO: 216399 - DNA, 279 bp, Artificial Sequence
  derived and/or modified sequence
atggaggtggaggccgccgaggccagaagccccgcccccggctacaagagaagcggcagaagatacaagtgcgtgagctgcaccaagaccttccccaacgcccccagagccgccagacacgccgccacccacggccccgccgactgcagcgaggaggtggccgaggtgaagcccaagcccgagaccgaggccaaggccgaggaggccagcggcgagaaggtgagcggcagcgccgccaagcccagaccctacgcctgccccctgtgccccaaggcctag

SEQ ID NO: 216400 - DNA, 231 bp, Artificial Sequence
  derived and/or modified sequence
atggaggtggaggccgccgaggccagaagccccgcccccggctacaagagaagcggcagaagatacaagtgcgtgagctgcaccaagaccttccccaacgcccccagagccgccagacacgccgccacccacggccccgccgactgcagcgaggaggtggccgaggtgaagcccaagcccgagaccgaggccaaggccgaggaggccagcggcgagaaggtgagcggctag

SEQ ID NO: 216401 - DNA, 312 bp, Artificial Sequence
  derived and/or modified sequence
atggaggtggaggccgccgaggccagaagccccgcccccggctacaagagaagcggcagaagatacaagtgcgtgagctgcaccaagaccttccccaacgcccccagagccgccagacacgccgccacccacggccccgccgactgcagcgaggaggtggccgaggtgaagcccaagcccgagaccgaggccaaggccgaggaggccagcggcgagaaggtgagcggcagcgccgccaagcccagaccctacgcctgccccctgtgccccaaggcctacaagaccgcccccgagctgagaagccacggctag

SEQ ID NO: 216402 - DNA, 327 bp, Artificial Sequence
  derived and/or modified sequence
atggaagttgaagcggctgaggcacgctctccagctcccggttacaagagatccggccgccgttacaaatgcgtctcttgcactaagacattccccaacgctccccgggccgccagacacgcagcaactcacggccccgccgactgctctgaggaggtcgcagaggtgccccatcgacgcgcaccactccccctgctgcgtgtccgcgaagagctgttaccccttatcctggctcacgtgccgcctgcacacccacgaggaactgaggccctgcctctccctgggctgcgacaagggctgcacgccgcacaatttttacctgagtag

SEQ ID NO: 216403 - DNA, 279 bp, Artificial Sequence
  derived and/or modified sequence
atggaggtagaagccgccgaggcccgctcccctgctcccggctataaaagaagtggcagacgatacaagtgcgtgtcctgtacgaaaacctttccgaatgcaccaagagcagcccggcacgctgccactcacggtcctgccgactgttctgaagaggtagcagaagtgaagcccaaaccagaaacggaggcgaaagccgaggaggcctctggcgaaaaggtgtctggctcagccgcaaagcctaggccttatgcgtgtcccctctgccccaaggcatag

SEQ ID NO: 216404 - DNA, 231 bp, Artificial Sequence
  derived and/or modified sequence
atggaggtggaggccgcggaggctcggagccccgcgcccggttacaaacgctccggaagacgatacaagtgtgtttcttgtacaaaaacctttcccaacgccccaagggccgcacgccacgccgctacccatggtccagccgactgtagcgaggaggtagctgaggtcaagccaaagccagagactgaggcaaaggctgaggaggccagcggagaaaaagtgtcaggctag

SEQ ID NO: 216405 - DNA, 312 bp, Artificial Sequence
  derived and/or modified sequence
atggaagtagaagccgctgaggcgcggagtcccgcaccgggatacaaacgtagtggcagacgttataagtgtgtctcctgtacaaagacgttccccaacgcaccacgcgctgctcgccatgcagctacccatggccctgccgattgtagtgaagaggtggcagaggtcaagccgaaacctgagactgaagcaaaagctgaggaagccagtggagagaaagttagtggtagtgcagctaaacccagaccgtatgcctgccccctgtgtcccaaggcttacaagactgccccagagttaaggagtcatggatag

SEQ ID NO: 216406 - DNA, 327 bp, Artificial Sequence
  derived and/or modified sequence
atggaggtggaggccgctgaggcccggagccctgcccctggctacaagaggagcggccgccgctacaagtgtgtgtcctgcaccaagaccttccccaatgcccccagggctgcccggcatgctgccacccacggccctgctgactgcagcgaggaggtggccgaggtgccccacagaagagcccccctgcccctgctgcgggtgcgggaggagctgctgcccctcatcctggcccacgtgcccccagcccacccccggggcacagaggccctgcccctgcccggcctgcggcagggcctgcacgccgcccagttcctgcctgagtag

SEQ ID NO: 216407 - DNA, 279 bp, Artificial Sequence
  derived and/or modified sequence
atggaggtggaggccgctgaggcccggagccctgcccctggctacaagaggagcggccgccgctacaagtgtgtgtcctgcaccaagaccttccccaatgcccccagggctgcccggcatgctgccacccacggccctgctgactgcagcgaggaggtggccgaggtgaagcccaagccagagacagaggccaaggccgaggaggccagcggggagaaggtgtctggcagcgctgccaagccccggccctatgcctgccccctgtgccccaaggcctag

SEQ ID NO: 216408 - DNA, 231 bp, Artificial Sequence
  derived and/or modified sequence
atggaggtggaggccgctgaggcccggagccctgcccctggctacaagaggagcggccgccgctacaagtgtgtgtcctgcaccaagaccttccccaatgcccccagggctgcccggcatgctgccacccacggccctgctgactgcagcgaggaggtggccgaggtgaagcccaagccagagacagaggccaaggccgaggaggccagcggggagaaggtgtctggatag

SEQ ID NO: 216409 - DNA, 312 bp, Artificial Sequence
  derived and/or modified sequence
atggaggtggaggccgctgaggcccggagccctgcccctggctacaagaggagcggccgccgctacaagtgtgtgtcctgcaccaagaccttccccaatgcccccagggctgcccggcatgctgccacccacggccctgctgactgcagcgaggaggtggccgaggtgaagcccaagccagagacagaggccaaggccgaggaggccagcggggagaaggtgtctggcagcgctgccaagccccggccctatgcctgccccctgtgccccaaggcctacaagacagcccctgagctgcggagccacggctag

SEQ ID NO: 216410 - DNA, 327 bp, Artificial Sequence
  derived and/or modified sequence
atggaggtggaggccgccgaggcccggagccccgcccccggctacaaaaggagtggtcgcagatacaaatgtgtttcctgtacgaagaccttcccgaacgcgccgcgggcagcacggcacgcggctacacatggacccgccgattgctccgaagaagtggccgaggtgccacaccgtagagccccgctccccctgctgagggtgcgggaagagctcctgcccttgatccttgcacatgttcccccagcccacccccgcggaacggaagcccttccgctgccgggcctgagacagggcctccatgccgcccaatttcttccagaatag

SEQ ID NO: 216411 - DNA, 279 bp, Artificial Sequence
  derived and/or modified sequence
atggaggtggaggccgccgaggcccggagccccgcccccggctacaagaggtctggacgcagatacaaatgtgtgtcttgtacaaaaacattcccgaatgctcctagggccgctcggcatgccgccacccacggtcccgccgattgttctgaagaagtagcagaagttaaacccaaacccgaaactgaggcaaaggccgaggaggcttcgggcgagaaggtgtccggctcagccgccaagccacggccttacgcctgtcctttgtgtccgaaagcatag

SEQ ID NO: 216412 - DNA, 231 bp, Artificial Sequence
  derived and/or modified sequence
atggaggtggaggccgccgaggcccggagccccgcccccggctacaagcgaagtggcagacgatacaaatgtgtttcctgcaccaagactttccccaacgcccccagagctgcaaggcacgcagcgactcacggcccagccgattgctccgaagaggtcgcagaagtcaagcccaagccagaaactgaggcaaaggcggaagaggcaagtggagaaaaagtgagcggctag

SEQ ID NO: 216413 - DNA, 312 bp, Artificial Sequence
  derived and/or modified sequence
atggaggtggaggccgccgaggcccggagccccgcccccggctacaagagaagtgggcggcgctataagtgcgtatcatgcacaaaaacatttcctaatgcgcctagggcagcccgccacgcagcaacacatggcccagcagactgctccgaagaggtggccgaagtgaaaccaaagcctgagaccgaagctaaagccgaagaagcctccggggagaaggtgtcgggctctgccgccaagcctcgaccttatgcatgtcccctctgtcctaaagcctacaagaccgctccagagcttcgttcacatggctag

SEQ ID NO: 216414 - DNA, 327 bp, Artificial Sequence
  derived and/or modified sequence
atggaagtcgaagccgctgaggcaagaagtccagcgcctggctataagagatctggccgacgatacaaatgcgtcagctgcaccaaaactttcccgaacgccccaagagcagctcgtcatgcagcaactcacggcccagccgactgcagcgaggaagtggccgaggtccctcatcgcagagcccctttgccattgctgagggtccgtgaagaacttttgcccctaatattggcgcatgtgcccccagcacacccacggggtaccgaagctctgccacttccgggacttcgccagggcctgcacgccgctcagtttctgcccgaatag

SEQ ID NO: 216415 - DNA, 279 bp, Artificial Sequence
  derived and/or modified sequence
atggaagtggaggccgcagaagcgaggtctcctgctccaggttacaaaaggtccggcagaagatacaaatgcgtgtcgtgtaccaaaacgtttccaaacgcacccagggcagccaggcatgctgccacgcatggcccagcagattgcagcgaagaagtggctgaggtgaaacctaagcccgaaaccgaggctaaggccgaggaggctagcggtgaaaaggttagcggttccgcagcaaagccacggccatacgcctgtcccctgtgccctaaagcatag

SEQ ID NO: 216416 - DNA, 231 bp, Artificial Sequence
  derived and/or modified sequence
atggaagtggaagccgctgaagccaggtcgccagcgcctgggtacaagcgctctggacgcaggtataagtgtgttagctgcaccaagaccttccccaatgcccctcgggctgcacggcacgccgcaacccatggcccagccgattgctctgaagaagttgctgaagtgaaaccaaagcccgaaaccgaggcgaaagcagaagaggcatccggagagaaggtcagcggatag

SEQ ID NO: 216417 - DNA, 312 bp, Artificial Sequence
  derived and/or modified sequence
atggaggtggaggctgctgaggcgcgatctcctgcccctgggtataagagaagcggcagaagatataaatgcgtgagctgcacgaagacattccctaacgcacctcgtgccgctcgtcacgccgctacacacggcccagccgactgttctgaagaagtcgcagaagtgaagccaaagcccgaaactgaggcaaaagcagaagaggccagtggtgaaaaggtgtctggatcagcagctaaacctcggccttatgcatgcccattgtgccctaaggcctacaagactgctccggaattgcgcagccatggctag

SEQ ID NO: 216418 - DNA, 639 bp, Artificial Sequence
  derived and/or modified sequence
atgcccaccacctgccactgcgtggccatcaccccccccgacagcggcggcagccccagcagccccgccggcggcagccccagccccgcccccgccgccggcgccgccgagctgagccccgccacccccaccggcagcgccaaccccaccaccagcagctgcgccggcggcacccccgccgccagcctgctgagatgggtgagaagctgcttcctgagactggacgacaccaccaaggacttcccccacgccctgcagtggaagggcagaagccccgagtgcaccagactgtgcttcgtgagactggccagaagcgccaaggccagaccccacagcagccagagaaagggcagatggcccgagtgcaccagcgcctgcagactgagaagccaggacgccaccaacgtgctgagccactgcagacacctgaacggcagaagccccgtgtgcaccagaagatgcatggccagaagcgccggctgcagaaagagcctgccccacttcagccagtggtacggcttcacccccagctgggccagatggtggagaagaaagctggagggcagcgagaacatgagaccccagagaggccacagaaagggcttcagccccgagtgcgtgagaagctggctgtggtag

SEQ ID NO: 216419 - DNA, 639 bp, Artificial Sequence
  derived and/or modified sequence
atgcccaccacttgccactgtgtggctatcactccaccggacagtggggggagcccaagtagccccgcaggcgggagtcccagtcccgcccctgctgccggcgccgccgagttaagcccagccactccaacagggagtgcaaaccccaccacctcgtcttgcgccggaggcacgcccgcagcatcgctccttcggtgggtgcgctcgtgttttctccgcttggacgatacaacaaaggacttccctcatgcactgcaatggaaaggccggtccccagaatgtacgcggctatgctttgtgagattggcacgatcagcgaaagctcggccgcactcaagccagcggaagggaagatggccggaatgtaccagtgcttgccggctgcggtctcaggacgccaccaacgttctaagtcactgtcggcacctgaacgggagatctcccgtgtgtaccaggcggtgcatggcgcggagcgcggggtgtagaaaaagtttgccgcactttagccaatggtatggtttcacaccgtcttgggctagatggtggaggagaaagcttgaagggagcgagaacatgcgccctcaacgcggtcaccgcaaagggtttagcccagaatgcgtgcggagttggttgtggtag

SEQ ID NO: 216420 - DNA, 639 bp, Artificial Sequence
  derived and/or modified sequence
atgcccaccacctgccactgtgtggccatcaccccaccagattctgggggcagccccagcagccctgctgggggcagccccagccctgccccagctgctggagctgctgagctgagccctgccacccccaccggcagcgccaaccccaccaccagcagctgtgccggcggcaccccagctgccagcctgctgcgctgggtgcgcagctgcttcctgcggctggatgacaccaccaaggacttcccccacgccctgcagtggaagggccgcagcccagaatgtacccggctgtgctttgtgcggctggcccggagcgccaaggcccggccccacagcagccagaggaagggccgctggccagaatgtaccagcgcctgccgcctgcggagccaggatgccaccaacgtgctgagccactgccgccacctgaatggccgcagccctgtgtgcacccggcgctgcatggcccggtctgctggctgcaggaagagcctgccccacttcagccagtggtacggcttcacccccagctgggcccgctggtggaggaggaagctggagggcagcgagaacatgaggccccagaggggccacaggaagggcttctccccagaatgtgtgcgctcctggctgtggtag

SEQ ID NO: 216421 - DNA, 639 bp, Artificial Sequence
  derived and/or modified sequence
atgcccaccacctgccactgcgtggccatcaccccccccgacagcggtggaagtccttcttccccggccggcggctcaccaagccccgcccctgctgccggggccgcagagcttagccctgcgacccccactggttctgccaaccccaccactagctcctgcgccggcggcacccccgctgctagcttgctgaggtgggttaggtcatgcttcctgagattggacgataccacaaaggacttcccacatgcgttgcaatggaaaggccgtagccctgagtgcacaaggctttgttttgtccgacttgcccgatccgccaaagctcggcctcacagttctcagaggaaggggaggtggcctgagtgcaccagcgcctgccgacttaggtctcaagacgctacaaatgtgctttctcactgtaggcatttgaacggccggtctcccgtgtgcacgagacgttgcatggcccgttctgccggatgccgaaaatccctcccccacttctcccagtggtacggatttactccttcatgggctagatggtggagaagaaagctcgagggatccgagaacatgcggccccagcggggtcaccgtaagggattttcccctgaatgcgtgaggtcctggctgtggtag

SEQ ID NO: 216422 - DNA, 639 bp, Artificial Sequence
  derived and/or modified sequence
atgccgaccacgtgccactgcgtggctataactccccctgactccgggggtagcccctccagtcctgctggtgggtcgccctcccccgcacctgcagctggagccgctgaattaagtcccgctacaccaacaggatccgcaaatccaacaactagttcgtgcgctgggggaactcccgctgctagcctgctgaggtgggttcgctcatgcttcctccgtttggacgacactacaaaggacttcccacacgccctgcagtggaaagggagaagccccgaatgcactcgattgtgcttcgtaagattagcacgatcggctaaagccaggccacattcttcccaacgcaaggggcgatggccggagtgcactagcgcctgtaggctcaggtcccaggatgcgacaaacgtgctcagtcattgtcgtcacttgaacggtaggtcaccagtatgtacccggcgatgtatggctcgaagtgccggttgtagaaaaagtcttccgcacttttcccaatggtacggtttcacccctagctgggctcggtggtggcggaggaaactggagggatcagaaaatatgcgaccccagagaggccacaggaagggattttctccggaatgtgtgcggagctggctgtggtag

SEQ ID NO: 216423 - DNA, 639 bp, Artificial Sequence
  derived and/or modified sequence
atgcccaccacctgccactgtgtggccatcacaccacctgactccgggggcagccctagcagccctgctggagggtcccccagccccgcccctgctgccggggcggctgaactctcacctgccacgcccacaggcagcgccaaccccaccaccagctcctgtgcagggggcacacccgcggcctcactgcttcgatgggtccgctcgtgcttcctcaggctcgacgacaccacaaaggatttcccacatgcgttacagtggaaggggcgctcccccgagtgcacccggctatgcttcgtgaggctggcacgctcggcgaaggctcgcccgcactcctcacagcggaagggccgctggccagagtgcaccagcgcgtgccgcttgaggtcccaggacgccacgaacgtcttgtcacattgcaggcacttgaacggccggtcgcctgtgtgcacacgccggtgcatggccaggtccgccggctgccggaagtccttgccgcacttctcgcagtggtatggcttcaccccttcatgggcgcgctggtggcgacggaagctcgaggggtcggagaacatgcggccgcagcgcgggcacaggaagggcttctcccccgagtgcgtgcgctcgtggctctggtag

SEQ ID NO: 216424 - protein, 274 aa, Artificial Sequence
  derived and/or modified sequence
MLHHHCRRNPELQEELQIQAAVAAGDVHTVRKMLEQGYSPNGRDANGWTLLHFSAARGKERCVRVFLEHGADPTVKDLIGGFTALHYAAMHGRARIARLMLESEYRSDIINAKSNDGWTPLHVAAHYGRDSFVRLLLEFKAEVDPLSDKGTTPLQLAIIRERSSCVKILLDHNANIDIQNGFLLRYAVIKSNHSYCRMFLQRGADTNLGRLEDGQTPLHLSALRDDVLCARMLYNYGADTNTRNYEGQTPLAVSISISGSSRPCLDFLQEVTSM

SEQ ID NO: 216425 - DNA, 825 bp, Artificial Sequence
  derived and/or modified sequence
atgctgcaccaccactgcagaagaaaccccgagctgcaggaggagctgcagatccaggccgccgtggccgccggcgacgtgcacaccgtgagaaagatgctggagcagggctacagccccaacggcagagacgccaacggctggaccctgctgcacttcagcgccgccagaggcaaggagagatgcgtgagagtgttcctggagcacggcgccgaccccaccgtgaaggacctgatcggcggcttcaccgccctgcactacgccgccatgcacggcagagccagaatcgccagactgatgctggagagcgagtacagaagcgacatcatcaacgccaagagcaacgacggctggacccccctgcacgtggccgcccactacggcagagacagcttcgtgagactgctgctggagttcaaggccgaggtggaccccctgagcgacaagggcaccacccccctgcagctggccatcatcagagagagaagcagctgcgtgaagatcctgctggaccacaacgccaacatcgacatccagaacggcttcctgctgagatacgccgtgatcaagagcaaccacagctactgcagaatgttcctgcagagaggcgccgacaccaacctgggcagactggaggacggccagacccccctgcacctgagcgccctgagagacgacgtgctgtgcgccagaatgctgtacaactacggcgccgacaccaacaccagaaactacgagggccagacccccctggccgtgagcatcagcatcagcggcagcagcagaccctgcctggacttcctgcaggaggtgaccagcatgtag

SEQ ID NO: 216426 - DNA, 825 bp, Artificial Sequence
  derived and/or modified sequence
atgctccatcatcattgcagacgaaatcccgaattgcaggaggaactgcaaattcaggccgccgtggctgcgggagacgtgcacaccgtgcgcaaaatgctggagcagggctatagtccgaatgggagggatgcgaatggctggacgctgctacatttctcggccgcgagaggaaaggagcgttgtgtgagggtgtttctcgagcacggagcagatcccacagtgaaggacctcatcggagggttcactgccctgcactatgccgccatgcacggccgcgcccggatcgcgcgcctgatgctcgagtccgagtatcgaagcgacatcatcaatgcaaagagcaatgacgggtggacacctttgcacgttgccgctcattatgggagagatagtttcgtgaggctccttctagagttcaaggctgaggtggatcccctgtccgacaaggggactacacctcttcaactcgcaattataagggagcgcagttcctgtgtcaaaatactactggatcacaatgcaaatatcgacatccagaatggcttcttactgaggtacgcagtgatcaagtcgaatcactcctactgtcggatgttcttgcagcggggcgccgataccaacctcggcaggctcgaggacggacagacaccattacatctcagcgcattacgagatgacgtgctgtgcgctagaatgctgtacaactacggggccgatactaacacccgcaattacgaaggacaaactccgcttgccgtgagcatctctatcagtgggagcagtaggccatgtcttgattttttacaggaggtcacctccatgtag

SEQ ID NO: 216427 - DNA, 825 bp, Artificial Sequence
  derived and/or modified sequence
atgctgcaccaccactgcagaagaaatcctgagctgcaggaggagctgcagatccaggccgctgtggccgctggagatgtgcacacagtgaggaagatgctggagcagggctacagccccaacggcagagatgccaacggctggaccctgctgcacttctctgctgcccggggcaaggagcgctgtgtgcgggtcttcctggagcacggggctgaccccaccgtgaaggacctgattggaggcttcaccgccctgcactacgccgccatgcacggccgggcccgcatcgcccggctgatgctggagagcgagtacagaagtgacatcatcaatgccaagagcaatgatggctggacccccctgcacgtggccgcccactacggccgggacagctttgtgcggctgctgctggagttcaaggccgaggtggaccccctgagtgacaagggcaccacccccctgcagctggccatcatccgggagaggagcagctgtgtgaagatcctgctggaccacaatgccaacatcgacatccagaatggcttcctgctgcgctatgctgtgatcaagagcaaccacagctactgcaggatgttcctgcagagaggagctgacaccaacctgggccgcctggaggatggccagacccccctgcacctgagcgccctgagagatgatgtgctgtgtgccaggatgctgtacaactacggggctgacaccaacaccagaaattatgagggccagacccccctggccgtgtccatcagcatcagcggcagcagccggccctgcctggacttcctgcaggaggtgacctccatgtag

SEQ ID NO: 216428 - DNA, 1694 bp, Artificial Sequence
  derived and/or modified sequence
gggagggggcgggggtggcccagtgcaaagtgcatcccgaaagccccctgtccggagaccccacggctggcacttcgggccccgtatgacctgggacctcgccgtcccgagacctcctgggtccctccgtagctggaagcctccggcccggagcgcggcagccccctgctccgagccctggaccgggactgcccccccacccgagccaggacttcctccctgcctccctgcacctctgccccaaggctgcccggcggccgggatcgccacctcctgccttctcggctgttcggatgttcgccgggctggggccgtgaggcaccgaggaggatcaggaacaccagggtccggccctgcctggggtatttcttcaatggagaagttggtgagtgtagaggaggctgaaaggaggaagagaagcagcagctgaggagacaggtttgagctggctgaagaagacgcgaaagcaggaagaggtctgcccacctatcagagaagcagaaggcacagtgcctctgaccagcatcgtctgtaaaggttaagaaggcttttttgctctgtagcctggacgtactttgaagcccctccccacgatgctgtacgtgcacaatggttactaggcaatccgtacatcaggagaagggacactcttccataaggctgatccccgtaacctaatgaatcctttgtaaaaagtggactcagctaggatgttacaccatcattgtcgaaggaaccctgagctccaggaagagttgcagattcaggccgcggtggctgctggggatgtccacacagtgcgaaagatgctagaacaaggctattccccgaatggccgagatgcgaatggctggactctgcttcatttctctgcagcaagaggaaaggaaagatgtgttcgggtttttctagaacacggagctgatcctacagttaaagacttaatcggaggcttcacggctcttcactatgcagccatgcatggccgggcccgcattgcacgcttgatgttagaatctgaatacaggagcgacatcattaatgcaaaaagcaatgacggctggactcccctccatgtggctgcccactacggcagggactcatttgtccggctcctcctggagttcaaggctgaggttgacccactcagtgataaaggtaccacaccgcttcagctcgccattatccgagagaggtcaagctgtgtgaaaatcctcctggaccacaatgccaacatcgacattcagaatggtttcctgttgcgatacgccgtgatcaaaagcaatcactcttattgccgaatgttccttcagagaggggcagacacaaacttgggtcgcttagaagacggacagactcctttacacttatctgcccttagggatgatgtgctgtgtgcacggatgttatataattacggagcagacacgaacacacggaactatgaaggacagaccccattggctgtttcaataagtatttctggaagtagtcgaccatgtttggatttcttacaagaagtcacaagtatgtaatataattattactttattgcattttttaaaaatttgcatcttctgaggagcttaatgtgtttttgcaacttaagatgactagatattaatcattcctataaccactgcttggtaagcgatgcctcattcttctgaaataaaaaaaaaactttgactgta

SEQ ID NO: 216429 - DNA, 825 bp, Artificial Sequence
  derived and/or modified sequence
atgctgcaccaccactgccggcggaaccccgagctgcaggaggagcttcagatccaggccgccgtggccgctggcgacgttcataccgtgaggaaaatgctggagcaggggtattctccaaacggcagagatgccaacgggtggactctgctgcacttctccgctgcccggggaaaagagcgctgcgtgagggtgttcctagaacacggggctgatcccacagtcaaagatctgatcggagggttcacagccctgcactatgctgccatgcatggccgggcgcgcatcgcacggttgatgcttgaaagtgagtaccgatcggacatcataaacgccaagagcaacgatggctggacccctcttcacgtggcagctcactatggacgagatagcttcgtgcgactgctgcttgaattcaaggcagaggttgatcctttgagcgacaaaggtacaacccctctccagctagccatcatccgggagcggagctcatgtgtgaaaatcctgcttgatcacaatgccaacatcgatattcagaacggctttctgctgaggtatgccgtgataaaaagcaatcacagctactgtagaatgtttctgcagcgcggcgcagacacaaatttaggcaggctggaagacggacaaaccccactccacctgtccgcactgcgagatgacgtgctgtgtgcgcggatgctgtacaactatggagccgacaccaacacacgaaactacgaagggcagacacctcttgccgtttctatctcgatttcaggctccagcaggccttgtctagatttcttgcaggaggtgacaagtatgtag

SEQ ID NO: 216430 - DNA, 825 bp, Artificial Sequence
  derived and/or modified sequence
atgcttcatcatcattgccgccgaaacccagagctgcaagaggagctacaaattcaggctgccgtggcagctggggacgtacacaccgtgagaaagatgcttgagcagggctattcaccgaacggacgagacgctaacggctggacactgctccatttcagcgctgccaggggtaaggagcgctgtgtcagggtgtttttggaacacggcgcagatcctacagttaaggatctgattggcggtttcaccgctctgcactatgcagcaatgcatggacgggcacgcatagccaggctgatgttagaatcagagtaccgctctgacatcattaacgccaagtctaacgacggctggactcctctgcacgtggccgctcattatggacgtgatagctttgtgcgtctactgctggagtttaaggccgaagtcgaccctttgagcgacaaagggacaacacctctgcagttagccattatccgggaacgctctagctgcgtgaaaatcctcctggaccacaacgcaaatatcgatatccaaaatggatttctgctacgatacgctgtaatcaagtccaaccattcatactgtagaatgttcctgcaacgcggagcagacactaacctgggtcgacttgaggatggccagaccccactgcacttgtccgctctccgagacgacgtactgtgtgcaagaatgctgtacaactatggcgcagacactaacacccgtaattacgaaggacagacccccctcgccgtctccatcagtatcagcggcagcagccgcccatgtctcgacttcttgcaagaggtaaccagtatgtag

SEQ ID NO: 216431 - protein, 142 aa, Artificial Sequence
  derived and/or modified sequence
MTVGARLRSKAESSLLRRGPRGRGRTEGDEEAAAILEHLEYADEAEAAAESGTSAADERGPGTRGARRVHFALLPERYEPLEEPAPSEQPRKRYRRKLKKYGKNVGKVIIKGCRYVVIGLQGFAAAYSAPFAVATSVVSFVR

SEQ ID NO: 216432 - DNA, 429 bp, Artificial Sequence
  derived and/or modified sequence
atgaccgtgggcgccagactgagaagcaaggccgagagcagcctgctgagaagaggccccagaggcagaggcagaaccgagggcgacgaggaggccgccgccatcctggagcacctggagtacgccgacgaggccgaggccgccgccgagagcggcaccagcgccgccgacgagagaggccccggcaccagaggcgccagaagagtgcacttcgccctgctgcccgagagatacgagcccctggaggagcccgcccccagcgagcagcccagaaagagatacagaagaaagctgaagaagtacggcaagaacgtgggcaaggtgatcatcaagggctgcagatacgtggtgatcggcctgcagggcttcgccgccgcctacagcgcccccttcgccgtggccaccagcgtggtgagcttcgtgagatag

SEQ ID NO: 216433 - DNA, 429 bp, Artificial Sequence
  derived and/or modified sequence
atgacagtgggcgcgaggttacgctccaaggccgaatctagtcttctgcgccgcggaccaagaggacgtggcaggacagagggagacgaagaagctgctgctattctggagcacttggaatatgccgacgaggccgaagccgcggcagagtcaggtaccagcgcggcggatgaacgcggaccaggaacaagaggcgcccgaagagttcatttcgcgctcctgcctgagagatatgagccactggaagaacctgccccttccgagcagccaagaaagaggtacagaaggaagcttaagaagtacggtaagaatgttgggaaggtgattattaagggatgcaggtacgttgtgatcgggctgcagggctttgcggcagcctatagcgcaccttttgccgtcgcgactagcgtggtgtcctttgtcagatag

SEQ ID NO: 216434 - DNA, 429 bp, Artificial Sequence
  derived and/or modified sequence
atgacagtgggcgcccggctgcggagcaaggccgagagcagcctgctgcggcggggcccccggggccggggccgcacagaaggagatgaggaggccgccgccatcctggagcacctggagtatgcagatgaagctgaggccgctgctgagagcggcaccagcgctgctgatgagcggggccctggcaccaggggggccaggagagtgcactttgccctgctgcctgagagatatgagcccctggaggagcccgcccccagcgagcagcccaggaagcgctacagaaggaagctgaagaagtatggcaagaatgtgggcaaggtgatcatcaagggctgccgctacgtggtgattggcctgcagggctttgctgctgcctacagcgccccctttgctgtggccacctctgtggtgtcctttgtgaggtag

SEQ ID NO: 216435 - DNA, 429 bp, Artificial Sequence
  derived and/or modified sequence
atgaccgtgggcgcccggctgcggagcaaggccgagagcagcctgctacgacgaggtccgagaggtcggggaaggactgagggcgatgaagaggcggccgccatcctggaacacctggaatacgctgatgaggccgaggcggcagcagagagtggcacgtctgctgcagatgaaagaggcccaggaaccaggggcgcacgccgcgttcacttcgccctgctgccagagcgttacgaacccttggaggaacccgcccccagcgaacagcctaggaaacgttaccgccgcaagttgaagaaatatggtaaaaacgtgggaaaagtgattataaagggctgcagatatgtggtgattggcctccagggcttcgcagccgcgtattccgccccattcgctgtggctacgtccgtggttagctttgtccggtag

SEQ ID NO: 216436 - DNA, 429 bp, Artificial Sequence
  derived and/or modified sequence
atgacagtcggggcacgcttacgctctaaggcggagagctcgctattgagacggggaccacgagggcgaggccgaacggaaggcgatgaggaagcagccgctattctggagcacctggaatacgcagacgaggcagaggctgccgctgaaagcggcacaagcgctgccgacgaacggggtcctggtacccgcggtgcgagaagagtccatttcgccctgttaccagagagatacgagccactggaagaacctgctccatccgaacagccgagaaaaagatatagacgcaaactgaaaaaatacgggaaaaatgtcggtaaggtgataatcaaggggtgtaggtatgtcgtgattggcctgcagggcttcgctgctgcgtactcagccccttttgccgtcgccacaagcgtggtgagctttgtacggtag

SEQ ID NO: 216437 - DNA, 3413 bp, Artificial Sequence
  derived and/or modified sequence
actttttcactgagtcagaccgttgaacaccgtggacacactgtcttgcgtttccgaatatttcctagaatacggacgtttcctaagactcacgataaagattttctgatcgtctctccaaaaccttgccaccaatttgcactcccacgaatcctgttaccgtgactatctcgccatgccctccctagcactgagcgtgatctctagtatcattttccatcgttgctaatttgaacatgagcagatggagtcctattatttggggtcattaatttcgtagcaagtgcagttgaaggtgttttgcatgttcattgtgcagtgcgcgccgtagtctgcacagtttggccggcaggtgggatgaagggcggggctggcggagcgcgcccgccgcctggtaggccagttcggagcggagccaacgctatcccgggccccacggccagggggcgctgcggcccccccaatcccccgccccgtccgggctggggcggaggagcgggcggggaccaaaggttggtgtctttgcgctcggaccttcgccagaggggccgggacatcatgacggtgggagccaggctccgaagcaaggcggagagcagcctcctgcgccgcgggccccgagggcgagggcgaaccgagggggacgaggaggcggccgccatcctggagcacctggagtacgcggacgaggcggaggcggcggccgagagcgggacgagcgcggcggacgagcggggcccggggacccggggcgcgcggagggtgcacttcgccctcctgcccgagcgctacgagccactggaggagccggcgccgagcgagcagcccaggaagaggtaccggaggaagctgaagaagtacggcaagaatgtcgggaaggtcatcatcaaaggatgccgctacgtggtcatcggcctgcaaggcttcgctgcagcctactccgccccgtttgcggtagccaccagcgtggtatccttcgtgcgctaatgggagctgctgtggcaggtgcccccagagtgaacgggagcccctgctgtgggaactttgtgaatcctggagcatctcagacttgaacacacagcatatttggaagagaaaacatgcctttctttgttgaatcacattagtatgatgagtgagtcatccctgcccatctgctgagcttctcacatctctcagtcacacgtggacccagtggtcaatcctgcagagaattcggcggaggttaggtttgggagtggagctagcgtgctaaagccagagccttcacgtgaaggtggcaggcactggggcggaagccaacactcaacagatgcaagcagtgtgggtgtgcagcagaacagtgatcttgggggaggaagaggatgttactagagtcagatgatttgctgtattctcctgaaaggtcgtaggctgacaggcgctcacattccttggctgcctcggttctgagggcagctaaggagctgtttattcctcaagtcatgctccccgatctccttcctctaccactctgtcaccaggagtttaattacaggcttgaggagaagaaaggaagaaaagatatcttgatgctttgaaaactgtgttggcagtgtggcatgactgtttaaagtagataaaaccttgtcattttaccccatccctgcatgactgtgaagctggcgaggaaggaggaagaagggcaagttcagatgcaggctgggtggctgggacaggttggctaagggactactctggagggctcttctgcctggcattgcccacttcggcccagccacgtgtttgcagcgaccagagtccctgcaaaggtgtggctggctgtggtcagggtgctactagcaccatcagcgcactcccgccattggctcagctcctctctgccagtccaactaagagtgctttgtcctgggtgggacataggggctgagagagatggggggagacataacacccaggaatgaaaatacagatttagagaaggaaccagtaagtaggagacagatgtgaaggaaatggaaatgaggcaagaggacattggaagagagaagtttgctgtccaggagccaggtctggagcatcagtgtgagggagttcaggtaggctgggcctgtgcctctaggtagggacaagggaggctgggtagccagggctggtgcttaaaacccctgaggccatgagctcattggctgcctttgtagcatcctgtcttcttctgtgctgcctggtttgatctcatctcacctggattcaaagggtaaggtgggcatgggtcttgggcctgacacccaccaaggatgacctgtggactgccatcggatgctgaacagggagatgaaaggaggtcctcttaccatacccctctgccaaccccccagtaggccactgttctgactttgtttccagaatatccagaaatccaaaggggctgttgctgaacagtctgcaggaccagtgacagcacctacctgttgtcccaaggcatacaaaggaggcctcaacgctcatgcttctctaatcaagccctaccaagacagacagaaagacagacagaaaaaaggaaggggtagaggagaaggttgaagctgtggagctagactctgcttcacttcctgaagcttcaacttcatgtcgaagattcactgggacccaattcctgcattgttaatatttgtgaggaaaagtgaaacaagtgatctggttttagcccagatgatgaaagtggatatggcacattttcacacacgtgagataattacagcttgccccacaacactgggtgttggagaaagggagagatagtcataagtggaagaaaaagccaagcatagtgagtgggaaagagagtgagagcctgtgcaggctgctgacgagccccaggcagcccacaagtttctcgtggggagatggaggcagagcccagggtaggggacagagctgctggggcctttccttgcctgggaatctgtcccaggaagagcttccccactcccatcccccaaattggaaaaaccgtacattcaagcctgtttggccctgaaattcttaagaatctggttaagaattaactcactaatgtcaaaagtcaaaacctcctaggggttgtcctgggagtcaggttcacgggtacagaagatgaatctcagatgtcactcaacctgagccgtcattctctgtggcagggctgccctgggtttctcttactcaatccctggagtgtaagcatttggattgtgtcacagattacctttttaccttttctttctttttttttctttttttcaatatcagtgcccacaccttactgagtattgagttttagagctttcgcttgatgtgcttgaccaagagacttcttttgtatccttttcttgtcctatgatgtaaataaaagcctcgatttatgtaatgtt

SEQ ID NO: 216438 - protein, 360 aa, Artificial Sequence
  derived and/or modified sequence
MVPAAGRRPPRVMRLLGWWQVLLWVLGLPVRGVEVAEESGRLWSEEQPAHPLQVGAVYLGEEELLHDPMGQDRAAEEANAVLGLDTQGDHMVMLSVIPGEAEDKVSSEPSGVTCGAGGAEDSRCNVRESLFSLDGAGAHFPDREEEYYTEPEVAESDAAPTEDSNNTESLKSPKVNCEERNITGLENFTLKILNMSQDLMDFLNPNGSDCTLVLFYTPWCRFSASLAPHFNSLPRAFPALHFLALDASQHSSLSTRFGTVAVPNILLFQGAKPMARFNHTDRTLETLKIFIFNQTGIEAKKNVVVTQADQIGPLPSTLIKSVDWLLVFSLFFLISFIMYATIRTESIRWLIPGQEQEHVE

SEQ ID NO: 216439 - protein, 344 aa, Artificial Sequence
  derived and/or modified sequence
MVPAAGRRPPRVMRLLGWWQVLLWVLGLPVRGVEVAEESGRLWSEEELLHDPMGQDRAAEEANAVLGLDTQGDHMVMLSVIPGEAEDKVSSEPSGVTCGAGGAEDSRCNVRESLFSLDGAGAHFPDREEEYYTEPEVAESDAAPTEDSNNTESLKSPKVNCEERNITGLENFTLKILNMSQDLMDFLNPNGSDCTLVLFYTPWCRFSASLAPHFNSLPRAFPALHFLALDASQHSSLSTRFGTVAVPNILLFQGAKPMARFNHTDRTLETLKIFIFNQTGIEAKKNVVVTQADQIGPLPSTLIKSVDWLLVFSLFFLISFIMYATIRTESIRWLIPGQEQEHVE

SEQ ID NO: 216440 - protein, 337 aa, Artificial Sequence
  derived and/or modified sequence
MEAGQQRVVEKVAEESGRLWSEEQPAHPLQVGAVYLGEEELLHDPMGQDRAAEEANAVLGLDTQGDHMVMLSVIPGEAEDKVSSEPSGVTCGAGGAEDSRCNVRESLFSLDGAGAHFPDREEEYYTEPEVAESDAAPTEDSNNTESLKSPKVNCEERNITGLENFTLKILNMSQDLMDFLNPNGSDCTLVLFYTPWCRFSASLAPHFNSLPRAFPALHFLALDASQHSSLSTRFGTVAVPNILLFQGAKPMARFNHTDRTLETLKIFIFNQTGIEAKKNVVVTQADQIGPLPSTLIKSVDWLLVFSLFFLISFIMYATIRTESIRWLIPGQEQEHVE

SEQ ID NO: 216441 - DNA, 1083 bp, Artificial Sequence
  derived and/or modified sequence
atggtgcccgccgccggcagaagaccccccagagtgatgagactgctgggctggtggcaggtgctgctgtgggtgctgggcctgcccgtgagaggcgtggaggtggccgaggagagcggcagactgtggagcgaggagcagcccgcccaccccctgcaggtgggcgccgtgtacctgggcgaggaggagctgctgcacgaccccatgggccaggacagagccgccgaggaggccaacgccgtgctgggcctggacacccagggcgaccacatggtgatgctgagcgtgatccccggcgaggccgaggacaaggtgagcagcgagcccagcggcgtgacctgcggcgccggcggcgccgaggacagcagatgcaacgtgagagagagcctgttcagcctggacggcgccggcgcccacttccccgacagagaggaggagtactacaccgagcccgaggtggccgagagcgacgccgcccccaccgaggacagcaacaacaccgagagcctgaagagccccaaggtgaactgcgaggagagaaacatcaccggcctggagaacttcaccctgaagatcctgaacatgagccaggacctgatggacttcctgaaccccaacggcagcgactgcaccctggtgctgttctacaccccctggtgcagattcagcgccagcctggccccccacttcaacagcctgcccagagccttccccgccctgcacttcctggccctggacgccagccagcacagcagcctgagcaccagattcggcaccgtggccgtgcccaacatcctgctgttccagggcgccaagcccatggccagattcaaccacaccgacagaaccctggagaccctgaagatcttcatcttcaaccagaccggcatcgaggccaagaagaacgtggtggtgacccaggccgaccagatcggccccctgcccagcaccctgatcaagagcgtggactggctgctggtgttcagcctgttcttcctgatcagcttcatcatgtacgccaccatcagaaccgagagcatcagatggctgatccccggccaggagcaggagcacgtggagtag

SEQ ID NO: 216442 - DNA, 1035 bp, Artificial Sequence
  derived and/or modified sequence
atggtgcccgccgccggcagaagaccccccagagtgatgagactgctgggctggtggcaggtgctgctgtgggtgctgggcctgcccgtgagaggcgtggaggtggccgaggagagcggcagactgtggagcgaggaggagctgctgcacgaccccatgggccaggacagagccgccgaggaggccaacgccgtgctgggcctggacacccagggcgaccacatggtgatgctgagcgtgatccccggcgaggccgaggacaaggtgagcagcgagcccagcggcgtgacctgcggcgccggcggcgccgaggacagcagatgcaacgtgagagagagcctgttcagcctggacggcgccggcgcccacttccccgacagagaggaggagtactacaccgagcccgaggtggccgagagcgacgccgcccccaccgaggacagcaacaacaccgagagcctgaagagccccaaggtgaactgcgaggagagaaacatcaccggcctggagaacttcaccctgaagatcctgaacatgagccaggacctgatggacttcctgaaccccaacggcagcgactgcaccctggtgctgttctacaccccctggtgcagattcagcgccagcctggccccccacttcaacagcctgcccagagccttccccgccctgcacttcctggccctggacgccagccagcacagcagcctgagcaccagattcggcaccgtggccgtgcccaacatcctgctgttccagggcgccaagcccatggccagattcaaccacaccgacagaaccctggagaccctgaagatcttcatcttcaaccagaccggcatcgaggccaagaagaacgtggtggtgacccaggccgaccagatcggccccctgcccagcaccctgatcaagagcgtggactggctgctggtgttcagcctgttcttcctgatcagcttcatcatgtacgccaccatcagaaccgagagcatcagatggctgatccccggccaggagcaggagcacgtggagtag

SEQ ID NO: 216443 - DNA, 1014 bp, Artificial Sequence
  derived and/or modified sequence
atggaggccggccagcagagagtggtggagaaggtggccgaggagagcggcagactgtggagcgaggagcagcccgcccaccccctgcaggtgggcgccgtgtacctgggcgaggaggagctgctgcacgaccccatgggccaggacagagccgccgaggaggccaacgccgtgctgggcctggacacccagggcgaccacatggtgatgctgagcgtgatccccggcgaggccgaggacaaggtgagcagcgagcccagcggcgtgacctgcggcgccggcggcgccgaggacagcagatgcaacgtgagagagagcctgttcagcctggacggcgccggcgcccacttccccgacagagaggaggagtactacaccgagcccgaggtggccgagagcgacgccgcccccaccgaggacagcaacaacaccgagagcctgaagagccccaaggtgaactgcgaggagagaaacatcaccggcctggagaacttcaccctgaagatcctgaacatgagccaggacctgatggacttcctgaaccccaacggcagcgactgcaccctggtgctgttctacaccccctggtgcagattcagcgccagcctggccccccacttcaacagcctgcccagagccttccccgccctgcacttcctggccctggacgccagccagcacagcagcctgagcaccagattcggcaccgtggccgtgcccaacatcctgctgttccagggcgccaagcccatggccagattcaaccacaccgacagaaccctggagaccctgaagatcttcatcttcaaccagaccggcatcgaggccaagaagaacgtggtggtgacccaggccgaccagatcggccccctgcccagcaccctgatcaagagcgtggactggctgctggtgttcagcctgttcttcctgatcagcttcatcatgtacgccaccatcagaaccgagagcatcagatggctgatccccggccaggagcaggagcacgtggagtag

SEQ ID NO: 216444 - DNA, 1083 bp, Artificial Sequence
  derived and/or modified sequence
atggttccagcagccggccggcgccctccacgggtaatgagattattgggctggtggcaggtgctcttgtgggtgctgggtttgcctgtgaggggtgtcgaagttgccgaggagagtggccggctttggagcgaagagcagcctgcccaccccttgcaggtgggggcagtatacctaggtgaggaggagctgctacacgaccccatgggccaggaccgcgcagctgaggaagccaacgccgtgctgggactcgacactcagggcgatcacatggttatgctctcagtgattcctggagaggcggaggacaaagtcagctcggagcctagtggcgtaacatgtggtgctggtggagcagaggatagccggtgcaacgttcgtgaaagcctgttttcccttgatggcgcgggcgcccactttccagatagagaagaagagtattacacagaacctgaggttgccgagtctgatgccgcaccgaccgaagatagtaataatacagagtcgctaaaatcaccgaaggttaactgcgaggagcgcaacatcacaggcctggaaaattttaccctgaagattctgaatatgtcccaagatctgatggatttcttgaatcctaatggctcagactgcaccctggtgttattttacacaccctggtgcagattttctgcctccctggcccctcactttaattccctgccccgagcttttcctgcattacattttctggccttggacgctagccaacatagcagcctctctacaagattcggcactgtggccgtgcctaatattttactcttccagggagccaagccaatggctagattcaatcatacggatcgaaccctggagactctcaaaatattcatcttcaaccagacaggcatcgaagccaagaagaacgtggtggtcactcaggctgaccagatagggcctctgccgtctactttaataaaatccgtagactggctgcttgtgttttccctcttctttcttatatcatttattatgtacgccaccatccgcaccgagtctattcgctggttgattcccggacaagagcaggagcacgtggagtag

SEQ ID NO: 216445 - DNA, 1035 bp, Artificial Sequence
  derived and/or modified sequence
atggttccggctgccggccgcaggcctcccagggtcatgaggctgctgggctggtggcaagtgctgctgtgggttttgggcctgcccgtgcggggggttgaggtcgctgaggagagcggccggctgtggagcgaagaggaactattacacgatcctatgggacaggaccgagctgcagaagaggccaacgctgtactgggcttagacactcagggagatcacatggttatgctttccgtgattccaggggaggccgaagacaaggtttctagtgaaccttctggtgtgacttgcggcgctggcggcgctgaggattctcgctgcaatgtacgggagtctctgttctctctggacggggctggagcccatttcccagaccgcgaagaggaatattacacagaacccgaggtggcagagagtgacgcggcgcccaccgaggattctaacaacacagaaagcctcaaatcacctaaagttaactgcgaagaacggaatatcacagggctggaaaatttcacccttaagatcctaaacatgagtcaggatctgatggacttcctcaatcctaacggatccgactgcacattggtcctgttctataccccatggtgtcgattcagtgcctcccttgcaccacactttaactcccttccccgggcctttcccgccttacacttccttgcccttgatgccagtcagcattctagcttgtctacacgctttggaactgttgcagtgcctaacatcctgctcttccagggagcaaagccgatggcacgcttcaaccacactgaccggaccttggagacactaaaaatttttatttttaaccagactgggatagaggcgaaaaaaaatgtggtggtaacccaagctgatcagattgggcctctaccttctacactgattaagtcggtggactggctgctcgtgttctccctgttttttctgatcagttttatcatgtatgctaccatcagaacggaatccataaggtggctaatccctggccaggaacaggagcatgtcgaatag

SEQ ID NO: 216446 - DNA, 1014 bp, Artificial Sequence
  derived and/or modified sequence
atggaggctgggcaacaacgcgtggtcgaaaaagtggctgaagagtctgggcgcctctggtcagaagaacagcctgcacatcctttacaggtcggtgctgtttacctgggtgaagaggaacttcttcacgatcccatgggccaggaccgggccgctgaagaggctaacgccgtgctcgggctagacacccagggtgatcacatggtaatgctatccgtgatccccggcgaagctgaggataaggtgagctccgagccctctggtgtcacgtgcggcgccgggggggctgaggactcccggtgcaacgtgagagagtctctgttttctctggacggtgctggagctcactttccagatcgcgaggaagagtactacaccgaaccagaagtggccgaatcagacgcagctcccactgaggactccaacaataccgaatccctgaagagcccgaaagtgaactgcgaggagaggaatatcacggggcttgagaattttacactcaaaattctgaacatgagccaggatttaatggactttctaaatccaaatgggtcagattgcacacttgtactcttctacacaccctggtgtcggttctcagccagtctcgctcctcattttaattcactgccgcgtgcttttcctgcacttcacttccttgctctcgacgcttcacagcacagctcgctgtcaactcgattcggcacagtggctgtgcccaacatccttctgttccagggcgctaagccaatggcccgcttcaatcacacagacagaaccctagaaaccctgaaaatcttcatctttaatcaaaccggaatagaggctaagaagaacgttgtggtgacacaggcagatcagatcggccctctgcccagcacattgattaaatcggtcgattggctgctggtgttcagtctgtttttcctgattagctttattatgtacgccacaattagaactgagagcattcgctggctcatccctggccaagagcaagaacatgtagagtag

SEQ ID NO: 216447 - DNA, 1083 bp, Artificial Sequence
  derived and/or modified sequence
atggtgcctgctgctggaagaagaccaccccgggtgatgaggctgctgggctggtggcaggtgctgctgtgggtgctgggcctgcctgtgcggggcgtggaggtggccgaggagagcggccgcctgtggagcgaggagcagcctgcccaccccctgcaggtgggcgctgtgtacctgggggaggaggagctgctgcatgaccccatgggccaggacagagctgctgaggaggccaatgctgtgctgggcctggacacccagggcgaccacatggtgatgctgagcgtcatccctggagaggccgaggacaaggtgtcctctgagcccagcggcgtgacctgtggggccggcggcgctgaggacagccgctgcaatgtgcgggagagcctcttcagcctggatggagctggggcccacttcccagaccgggaggaggagtactacacagagcctgaggtggccgagagtgatgctgcccccacagaggacagcaacaacacagagagcctgaagagccccaaggtgaactgtgaggagaggaacatcaccggcctggagaacttcaccctgaagatcctgaacatgagccaggacctgatggacttcctgaaccccaacggcagtgactgcaccctggtgctcttctacaccccctggtgccgcttcagcgccagcctggccccccacttcaacagcctgccccgggccttccctgccctgcacttcctggccctggatgccagccagcacagcagcctgagcaccaggtttggaacagtggccgtgcccaacatcctgctcttccagggcgccaagcccatggcccgcttcaaccacacagacaggaccctggagaccctgaagatcttcatcttcaaccagacaggaattgaggccaagaagaatgtggtggtgacccaggccgaccagatcggccccctgcccagcaccctcatcaagtctgtggactggctgctggtgttcagcctcttcttcctgatctccttcatcatgtatgccaccatcagaacagagagcatccgctggctgatccctggccaggagcaggagcacgtggagtag

SEQ ID NO: 216448 - DNA, 1035 bp, Artificial Sequence
  derived and/or modified sequence
atggtgcctgctgctggaagaagaccaccccgggtgatgaggctgctgggctggtggcaggtgctgctgtgggtgctgggcctgcctgtgcggggcgtggaggtggccgaggagagcggccgcctgtggagcgaggaggagctgctgcatgaccccatgggccaggacagagctgctgaggaggccaatgctgtgctgggcctggacacccagggcgaccacatggtgatgctgagcgtcatccctggagaggccgaggacaaggtgtcctctgagcccagcggcgtgacctgtggggccggcggcgctgaggacagccgctgcaatgtgcgggagagcctcttcagcctggatggagctggggcccacttcccagaccgggaggaggagtactacacagagcctgaggtggccgagagtgatgctgcccccacagaggacagcaacaacacagagagcctgaagagccccaaggtgaactgtgaggagaggaacatcaccggcctggagaacttcaccctgaagatcctgaacatgagccaggacctgatggacttcctgaaccccaacggcagtgactgcaccctggtgctcttctacaccccctggtgccgcttcagcgccagcctggccccccacttcaacagcctgccccgggccttccctgccctgcacttcctggccctggatgccagccagcacagcagcctgagcaccaggtttggaacagtggccgtgcccaacatcctgctcttccagggcgccaagcccatggcccgcttcaaccacacagacaggaccctggagaccctgaagatcttcatcttcaaccagacaggaattgaggccaagaagaatgtggtggtgacccaggccgaccagatcggccccctgcccagcaccctcatcaagtctgtggactggctgctggtgttcagcctcttcttcctgatctccttcatcatgtatgccaccatcagaacagagagcatccgctggctgatccctggccaggagcaggagcacgtggagtag

SEQ ID NO: 216449 - DNA, 1014 bp, Artificial Sequence
  derived and/or modified sequence
atggaggccggccagcagagggtggtggagaaggtggccgaggagagcggccgcctgtggagcgaggagcagcctgcccaccccctgcaggtgggcgctgtgtacctgggggaggaggagctgctgcatgaccccatgggccaggacagagctgctgaggaggccaatgctgtgctgggcctggacacccagggcgaccacatggtgatgctgagcgtcatccctggagaggccgaggacaaggtgagcagcgagcccagcggcgtgacctgtggggccggcggcgctgaggacagccgctgcaatgtgcgggagagcctcttcagcctggatggagctggggcccacttcccagaccgggaggaggagtactacacagagcctgaggtggccgagagtgatgctgcccccacagaggacagcaacaacacagagagcctgaagagccccaaggtgaactgtgaggagaggaacatcaccggcctggagaacttcaccctgaagatcctgaacatgagccaggacctgatggacttcctgaaccccaatggaagtgactgcaccctggtgctcttctacaccccctggtgccgcttcagcgccagcctggccccccacttcaacagcctgccccgggccttccctgccctgcacttcctggccctggatgccagccagcacagcagcctgagcacccgcttcggcaccgtggccgtgcccaacatcctgctcttccagggcgccaagcccatggcccgcttcaaccacacagacaggaccctggagaccctgaagatcttcatcttcaaccagacaggcatcgaggccaagaagaatgtggtggtgacccaggccgaccagatcggccccctgcccagcaccctcatcaagtctgtggactggctgctggtgttcagcctcttcttcctgatctccttcatcatgtatgccaccatcagaacagagagcatccgctggctgatccctggccaggagcaggagcacgtggagtag

SEQ ID NO: 216450 - DNA, 1083 bp, Artificial Sequence
  derived and/or modified sequence
atggtgcccgccgccggccggcggcccccccgggtgatgcggctgctgggttggtggcaagtactgctgtgggtactcgggctgccagtgaggggtgtggaggtggctgaggagagtggcaggctatggagcgaagagcagcctgcacacccgcttcaggtaggcgccgtataccttggcgaggaggaactgctgcatgacccgatgggacaagatcgtgctgcagaggaggccaacgccgtgctcggtcttgacacccaaggggaccacatggtgatgttgtctgtgattccaggggaggctgaggacaaagtcagttccgagccgtccggagtcacatgtggggcagggggggccgaagatagcaggtgcaacgtgagggagagcctgtttagtttggacggcgccggcgcacactttccagatagagaggaggaatactacaccgagcccgaagtggccgagtctgatgccgcgccgaccgaagattcaaacaatactgaaagtctcaaatcccccaaggtgaactgcgaagagaggaatatcacaggcctggaaaacttcactctgaaaatcctcaacatgtcccaggatttgatggactttcttaacccaaatgggagcgattgcactcttgtcttgttctacaccccctggtgtagattcagcgcctccctcgcgccacattttaattcactgcctcgagcattccctgcattacactttttagcactcgatgctagtcagcacagctcactctctactaggttcggcacagtggcggtccctaacatcctgctgttccaaggagccaagcccatggcccggttcaaccacaccgatagaactctggagaccttgaaaattttcatctttaatcagacaggtatcgaggccaagaaaaatgtggtcgtcacacaggctgaccagattggccccttgccgtccacgctgatcaaatccgtggactggctgctggtgttctccctgttctttctgatcagctttattatgtacgctacaatcaggactgaaagcatacggtggcttatccctggacaggagcaagagcatgttgagtag

SEQ ID NO: 216451 - DNA, 1035 bp, Artificial Sequence
  derived and/or modified sequence
atggtgcccgccgccggccggcggcccccccgggtgatgcggctgttaggctggtggcaggtgctgttgtgggtcctgggactgccagtccggggcgtcgaggtggccgaggagtcaggccggctttggtctgaggaggagctcttgcatgatcctatgggacaagatcgcgcagcggaagaagcgaatgccgtgctaggactggacacccagggggatcacatggtcatgctatccgtgatccctggtgaggctgaggacaaagtgagctcagagcctagtggtgttacctgcggggcaggcggcgccgaagatagtcgctgtaatgtgagggaaagtctgttctccctcgacggagccggcgcccactttcccgaccgcgaagaggagtattacaccgagcccgaggttgccgagagcgacgctgccccaactgaggactccaataatactgagagcctgaagtcacctaaggtgaactgcgaggagcggaatattactggcctcgagaactttacgctgaaaatcctgaacatgagccaggacctcatggattttctcaaccccaacggctccgactgcacactcgtgctgttctacacgccatggtgcagattttccgctagtttggctccacattttaattccttacccagagccttccccgcgttgcattttctcgccctggacgcctcacagcacagcagcctctcgactcgctttggcaccgtcgccgttccgaatattcttctctttcagggcgcaaaacctatggctaggttcaaccacactgatcggactcttgaaaccctcaaaatcttcatctttaaccagacaggcattgaagccaagaagaatgtcgtcgttacccaggccgatcaaattggccccctgccctccacactgatcaagtctgtggactggcttctggtcttttctctattcttcctgatctcatttattatgtatgccacaattaggaccgagtcaatccgatggctcatccctggacaggagcaggaacacgttgaatag

SEQ ID NO: 216452 - DNA, 1014 bp, Artificial Sequence
  derived and/or modified sequence
atggaggccggccagcagcgggtggtggagaaggtggccgaggagagtgggcgactatggtcagaggaacagccagcacatcctttgcaggttggtgctgtctatctgggtgaagaggaactgctgcatgacccaatgggacaggaccgggccgcggaggaagctaatgccgtgctgggtttggacacccaaggggaccacatggtcatgctcagcgtgattccaggggaagccgaggacaaagtgtcatcagagccttcaggggtgacatgcggagcagggggtgccgaggatagcagatgcaatgtcagggaatcccttttcagccttgatggcgccggcgctcatttcccagaccgggaagaggagtactatacagaacctgaggtcgctgaaagtgacgctgcaccgacagaagacagcaacaacacggaatcgctcaaatctccgaaggtcaattgcgaggaaagaaacatcacaggccttgaaaactttactttgaagattctgaacatgtctcaggatctgatggacttcctaaatccgaatgggagcgactgtaccttggtacttttctataccccctggtgccgcttcagcgcttcattggcgccacatttcaatagcctgcctcgagccttcccagcattgcactttctagcgttggatgcctcacagcactcttcactgagcacgaggttcggcactgtggccgtgccaaacattctcctctttcaaggagctaagccgatggcccggtttaatcacacagacagaactctcgagacattaaagattttcattttcaaccaaaccggtatagaggctaagaagaacgtggtggtgacccaggccgaccaaatcggccccttgcctagcactttgattaaatcggttgactggctgctcgtgtttagtcttttctttttaattagctttattatgtacgctacaatcaggaccgagtccattcggtggctcataccagggcaagaacaagagcatgtggagtag

SEQ ID NO: 216453 - DNA, 1083 bp, Artificial Sequence
  derived and/or modified sequence
atggtgccggctgctggcagacgtcccccacgcgtcatgagacttctggggtggtggcaggtgctcctatgggtgctggggctgccagttaggggcgttgaagtcgcagaggagtcgggacgcctctggagtgaggaacagcctgcccaccctttgcaagtgggcgctgtgtatctcggagaggaagagctcctgcacgacccaatgggacaagacagggccgcagaagaggctaacgctgtgctcgggttggacacacaaggagatcacatggtcatgctgtcagttatcccaggggaagcagaagacaaggtttcttcagaaccctccggcgtgacatgcggcgctgggggagctgaagatagccggtgtaatgtgagagagtccttatttagcctggacggcgcaggcgctcattttcctgaccgcgaggaggagtactatacagagccggaagtggccgagagcgatgccgctcccactgaagactctaacaacactgagtccctgaaaagccccaaagtgaattgcgaagagcgcaacataacagggctcgagaacttcacgctgaagattctcaatatgtcacaggacctaatggacttcctcaacccaaacggaagtgattgcacccttgtgctgttctatacgccatggtgtagattttctgcctcactggctcctcacttcaatagtttgcctagagctttccccgctttgcatttcctggccttagacgcctcccagcactctagcctcagcacccggttcgggaccgtcgccgtgcccaacatccttctgtttcagggcgctaagcctatggctaggttcaaccacacagaccggactcttgagactctgaagatttttatttttaatcagaccggcatagaggccaaaaagaacgtagtggtaacacaggcggatcagatcggccctctcccttcgactttgatcaaatctgtagactggctattggtgttctccttgttttttctgatcagctttatcatgtacgcaaccatccgaaccgagagtatccgatggttaatccctgggcaagaacaagaacatgttgaatag

SEQ ID NO: 216454 - DNA, 1035 bp, Artificial Sequence
  derived and/or modified sequence
atggtacccgcagccggtcggcgaccgcctcgagtgatgcgcctgctgggttggtggcaggtgctcctttgggtacttggactcccagtaaggggagtagaagtcgctgaagagtcaggaaggctctggagcgaggaagaactactccacgatcctatgggtcaggatcgagccgctgaagaggctaacgcagtcctcggactagatacccagggtgaccatatggtgatgctgtccgtgatcccaggggaggcggaggataaagtctcatccgagccatccggagtgacatgtggggctggaggtgctgaggacagtaggtgcaatgtcagagagagcctatttagtctggatggtgccggagcccactttcccgacagggaagaggaatattacaccgaacctgaagtggcagagtccgatgcagccccaactgaggactccaataatactgaatccttgaagtctcccaaggtcaactgtgaagaaagaaacatcaccggtctggagaattttaccttaaaaatcctgaatatgtcccaggaccttatggattttctgaaccctaatggttctgactgtacgctcgtacttttctataccccatggtgtaggttctccgcctcattggcaccgcacttcaattccttgcccagagcttttcctgctctgcatttcctggctctcgatgcaagtcagcattcctcactgagcacacggtttgggaccgtcgccgtaccaaatatcctgctgttccagggagccaagccaatggcccgttttaaccatactgaccgcacactggagacattgaaaatttttatttttaatcaaacaggtatcgaggcaaaaaagaacgtagtcgttacacaggcagatcagatcggaccactacccagtacactgatcaagagtgttgattggctgctggtgttctctttgtttttcctcatttcgtttatcatgtacgccacaattcggacagaaagcattaggtggctgatccccggacaggaacaagagcatgtcgaatag

SEQ ID NO: 216455 - DNA, 1014 bp, Artificial Sequence
  derived and/or modified sequence
atggaggccggtcagcagcgggtggtggagaaagtcgctgaagagagcggtaggctgtggtctgaggaacaacccgcacacccgctgcaagtgggcgctgtgtacttgggtgaagaagaactcctccacgatccaatggggcaggacagggccgcagaggaggctaacgcagtgctaggcctagatacccagggtgaccacatggtgatgttgtctgtgattcctggagaagctgaagataaggttagctccgaaccttctggagtaacatgcggtgccggtggtgccgaggattcccggtgtaacgtaagggaaagtctattctccctcgacggtgccggtgctcacttccctgatcgtgaggaggagtactataccgaaccagaggttgcagaatcagacgcagcccctaccgaggattctaacaacacggagtcgttgaaatccccaaaggtgaattgcgaggagagaaatattacaggactcgagaatttcactcttaagatcctcaatatgagccaagacctgatggactttcttaaccccaatggatctgattgcaccctggtcctcttttataccccttggtgtcgcttctccgcatcccttgccccacattttaactccctgccccgtgcttttcctgcactgcactttctcgctcttgatgcatcacagcactcctcactctcaacacggtttggtaccgttgcagtcccaaacattttgctttttcagggcgctaagcctatggcaaggttcaaccatactgaccgcacacttgaaaccttaaaaatctttatctttaaccagacaggaattgaagctaagaagaatgtggttgtcacacaggccgaccagatcggcccactgcctagtacgctcattaaatccgtggattggctcctagtcttcagcctcttctttctgatttcattcattatgtatgcaaccatcagaacggagtccatacgatggcttatccctggtcaggaacaagagcatgtcgagtag

SEQ ID NO: 216456 - DNA, 3548 bp, Artificial Sequence
  derived and/or modified sequence
aggtagggttagggttgccagatgtcacgaagttacaggatgctcagttttaaggtatatcccttatactataagggttatagtaaaaaatattcattatgtgaaattcaaatataactgggtatcaggtattctatgtggcaaccctaggtaggggagcacaggttaggcaagcgattagaagatttgcagcctccaaagtttctgcacctcgatgggacactagaacaggaaggctcctgggcctttctggctctgggaatgaagcgtggaaaaccctccttaggcgggcgcagtgcttcaagtagccaagctctgacttccgagggaagaaaggaggccatgggcctctgccagagccatgctctgcactctggggtcagcagagttcaaaacgacctgcaacgtctggcgcttagctcctaaagaggtctccagtccagcgccgacggccagcggctagaggccgtccgcccgactccaagatggcgcccgccacagctgccaggtgttaagatggcggcgcggggccgcgcccgcgctcccaggctctcctcccccagccttcctccggctggcagcacgactcgcgtagccgtgcgccgattgcctctcggcctgggcaatggtcccggctgccggtcgacgaccgccccgcgtcatgcggctcctcggctggtggcaagtattgctgtgggtgctgggacttcccgtccgcggcgtggaggttgcagaggaaagtggtcgcttatggtcagaggagcagcctgctcaccctctccaggtgggggctgtgtacctgggtgaggaggagctcctgcatgacccgatgggccaggacagggcagcagaagaggccaatgcggtgctggggctggacacccaaggcgatcacatggtgatgctgtctgtgattcctggggaagctgaggacaaagtgagttcagagcctagcggcgtcacctgtggtgctggaggagcggaggactcaaggtgcaacgtccgagagagccttttctctctggatggcgctggagcacacttccctgacagagaagaggagtattacacagagccagaagtggcggaatctgacgcagccccgacagaggactccaataacactgaaagtctgaaatccccaaaggtgaactgtgaggagagaaacattacaggattagaaaatttcactctgaaaattttaaatatgtcacaggaccttatggattttctgaacccaaacggtagtgactgtactctagtcctgttttacaccccgtggtgccgcttttctgccagtttggcccctcactttaactctctgccccgggcatttccagctcttcactttttggcactggatgcatctcagcacagcagcctttctaccaggtttggcaccgtagctgttcctaatattttattatttcaaggagctaaaccaatggccagatttaatcatacagatcgaacactggaaacactgaaaatcttcatttttaatcagacaggtatagaagccaagaagaatgtggtggtaactcaagccgaccaaataggccctcttcccagcactttgataaaaagtgtggactggttgcttgtattttccttattctttttaattagttttattatgtatgctaccattcgaactgagagtattcggtggctaattccaggacaagagcaggaacatgtggagtagtgatggtctgaaagaagttggaaagaggaacttcaatccttcgtttcagaaattagtgctacagtttcatacattttctccagtgacgtgttgacttgaaacttcaggcagattaaaagaatcatttgttgaacaactgaatgtataaaaaaattataaactggtgttttaactagtattgcaataagcaaatgcaaaaatattcaatagatgcactattcttgtttttactgcatgaacgtaatccagtatttggaaagtaatccagtttgaaatgtgaagatgtattccggcagaatagtgagtagaatgacatgcttactatacagaaggcaaaaataggactctcaggtaatagtttaaggaaacccttgattccttatatatgtttaagaaggttagttttctgtttctttgcagtttttcttctagagtccatagcaggaaagtatgtaaccagaattggttagtgtgaccccctcaagtagcaagtgatggaaaataagagtcaaataccttgatgtttgtgatctctaactcaaaaaatttgaagtgttttaagttgtttctgggtaagggagatgttaggagaaaggaaatgctgtaactaaagctcaattattatcagttctatgctaacgtatacattttaatcatagttacctaagcagcatgcattaattgaaccttaaaatgttcccagcaggctgggcgcagtggctcatgcctgtaatcccagcactttgggaggccaaggcgggaggatcacttgaggttaggacttttgagaccagcctggccaacttggtgaaaccctctctctactaaaaatacaaaaaattagctgggcgtggtggcgggcacctgtaatcccagctacttgggaaagctgaggcatgagaatcacttgaacccgggaggcagaggttgcagtgagctgagatcatgccactgcactccagcctgtgcaaccagagcgaaactccatctcaaaaacaaacaaaaagaagtattgaagtgtaaaacactgttcttgcccacaagttgattctagtctagttcaagacacatgtttagtaaagagacaacatgtaatttaaacaaactttttttttttttttagacaaagtctcactctgtcacctaggctggagtgcaatggtgcaatcttggctcactgcaacctctgcttcccgggttcaagcgattctccagcctcagcctcctgagtagctgggactatgggcctgtgccatcacacccagctaatttttctatttttagtagagatggggttttgccatgttggccaggctggtctcaaactgctgacttcaggtgatccacccgcctcagcctcccaaagtgttgggattacaggtgtgagccactgcgcctggcctaaacaaactttttgaaaagctgtttctaaaagattccttaaattcagatatgacagctaattacctcatcataaattacttttatactaattgtttccagggttttagagtagttgaatgtttatttcacaaggcaccctaaattctatagaaataaaacctcagatgagtctccttcttagagtgttacaatgaatgggagtttacaacttttatgtgtcatgtttccaacagctgtgtttggggtggtcactggcaggaggggaccgtatctcagaatggcacattatttctattttacacatgagcaaattgaggcatagagagttagataacttgcccaggttacacagattgtaagttgatgaagctgggatttgaatcttcacatgtgtgtacttataaatacaaatgtaaggaaaactctagtgagtcca

SEQ ID NO: 216457 - DNA, 3641 bp, Artificial Sequence
  derived and/or modified sequence
agttaaaaccaacctctcctgccctgagtggataggtagggttagggttgccagatgtcacgaagttacaggatgctcagttttaaggtatatcccttatactataagggttatagtaaaaaatattcattatgtgaaattcaaatataactgggtatcaggtattctatgtggcaaccctaggtaggggagcacaggttaggcaagcgattagaagatttgcagcctccaaagtttctgcacctcgatgggacactagaacaggaaggctcctgggcctttctggctctgggaatgaagcgtggaaaaccctccttaggcgggcgcagtgcttcaagtagccaagctctgacttccgagggaagaaaggaggccatgggcctctgccagagccatgctctgcactctggggtcagcagagttcaaaacgacctgcaacgtctggcgcttagctcctaaagaggtctccagtccagcgccgacggccagcggctagaggccgtccgcccgactccaagatggcgcccgccacagctgccaggtgttaagatggcggcgcggggccgcgcccgcgctcccaggctctcctcccccagccttcctccggctggcagcacgactcgcgtagccgtgcgccgattgcctctcggcctgggcaatggtcccggctgccggtcgacgaccgccccgcgtcatgcggctcctcggctggtggcaagtattgctgtgggtgctgggacttcccgtccgcggcgtggaggttgcagaggaaagtggtcgcttatggtcagaggaggagctcctgcatgacccgatgggccaggacagggcagcagaagaggccaatgcggtgctggggctggacacccaaggcgatcacatggtgatgctgtctgtgattcctggggaagctgaggacaaagtgagttcagagcctagcggcgtcacctgtggtgctggaggagcggaggactcaaggtgcaacgtccgagagagccttttctctctggatggcgctggagcacacttccctgacagagaagaggagtattacacagagccagaagtggcggaatctgacgcagccccgacagaggactccaataacactgaaagtctgaaatccccaaaggtgaactgtgaggagagaaacattacaggattagaaaatttcactctgaaaattttaaatatgtcacaggaccttatggattttctgaacccaaacggtagtgactgtactctagtcctgttttacaccccgtggtgccgcttttctgccagtttggcccctcactttaactctctgccccgggcatttccagctcttcactttttggcactggatgcatctcagcacagcagcctttctaccaggtttggcaccgtagctgttcctaatattttattatttcaaggagctaaaccaatggccagatttaatcatacagatcgaacactggaaacactgaaaatcttcatttttaatcagacaggtatagaagccaagaagaatgtggtggtaactcaagccgaccaaataggccctcttcccagcactttgataaaaagtgtggactggttgcttgtattttccttattctttttaattagttttattatgtatgctaccattcgaactgagagtattcggtggctaattccaggacaagagcaggaacatgtggagtagtgatggtctgaaagaagttggaaagaggaacttcaatccttcgtttcagaaattagtgctacagtttcatacattttctccagtgacgtgttgacttgaaacttcaggcagattaaaagaatcatttgttgaacaactgaatgtataaaaaaattataaactggtgttttaactagtattgcaataagcaaatgcaaaaatattcaatagatgcactattcttgtttttactgcatgaacgtaatccagtatttggaaagtaatccagtttgaaatgtgaagatgtattccggcagaatagtgagtagaatgacatgcttactatacagaaggcaaaaataggactctcaggtaatagtttaaggaaacccttgattccttatatatgtttaagaaggttagttttctgtttctttgcagtttttcttctagagtccatagcaggaaagtatgtaaccagaattggttagtgtgaccccctcaagtagcaagtgatggaaaataagagtcaaataccttgatgtttgtgatctctaactcaaaaaatttgaagtgttttaagttgtttctgggtaagggagatgttaggagaaaggaaatgctgtaactaaagctcaattattatcagttctatgctaacgtatacattttaatcatagttacctaagcagcatgcattaattgaaccttaaaatgttcccagcaggctgggcgcagtggctcatgcctgtaatcccagcactttgggaggccaaggcgggaggatcacttgaggttaggacttttgagaccagcctggccaacttggtgaaaccctctctctactaaaaatacaaaaaattagctgggcgtggtggcgggcacctgtaatcccagctacttgggaaagctgaggcatgagaatcacttgaacccgggaggcagaggttgcagtgagctgagatcatgccactgcactccagcctgtgcaaccagagcgaaactccatctcaaaaacaaacaaaaagaagtattgaagtgtaaaacactgttcttgcccacaagttgattctagtctagttcaagacacatgtttagtaaagagacaacatgtaatttaaacaaactttttttttttttttagacaaagtctcactctgtcacctaggctggagtgcaatggtgcaatcttggctcactgcaacctctgcttcccgggttcaagcgattctccagcctcagcctcctgagtagctgggactatgggcctgtgccatcacacccagctaatttttctatttttagtagagatggggttttgccatgttggccaggctggtctcaaactgctgacttcaggtgatccacccgcctcagcctcccaaagtgttgggattacaggtgtgagccactgcgcctggcctaaacaaactttttgaaaagctgtttctaaaagattccttaaattcagatatgacagctaattacctcatcataaattacttttatactaattgtttccagggttttagagtagttgaatgtttatttcacaaggcaccctaaattctatagaaataaaacctcagatgagtctccttcttagagtgttacaatgaatgggagtttacaacttttatgtgtcatgtttccaacagctgtgtttggggtggtcactggcaggaggggaccgtatctcagaatggcacattatttctattttacacatgagcaaattgaggcatagagagttagataacttgcccaggttacacagattgtaagttgatgaagctgggatttgaatcttcacatgtgtgtacttataaatacaaatgtaaggaaaactctagtgagtccacctcttatattgagttattactgtgtgagtgccaagtactgttttagatgctttacatatactattttgtttaatatcctttttaaagaataaactaggttggtgcag

SEQ ID NO: 216458 - DNA, 1477 bp, Artificial Sequence
  derived and/or modified sequence
ttttccctggggtgtcctggatggaggcaggacagcagagagttgtggagaaggttgcagaggaaagtggtcgcttatggtcagaggagcagcctgctcaccctctccaggtgggggctgtgtacctgggtgaggaggagctcctgcatgacccgatgggccaggacagggcagcagaagaggccaatgcggtgctggggctggacacccaaggcgatcacatggtgatgctgtctgtgattcctggggaagctgaggacaaagtgagttcagagcctagcggcgtcacctgtggtgctggaggagcggaggactcaaggtgcaacgtccgagagagccttttctctctggatggcgctggagcacacttccctgacagagaagaggagtattacacagagccagaagtggcggaatctgacgcagccccgacagaggactccaataacactgaaagtctgaaatccccaaaggtgaactgtgaggagagaaacattacaggattagaaaatttcactctgaaaattttaaatatgtcacaggaccttatggattttctgaacccaaacggtagtgactgtactctagtcctgttttacaccccgtggtgccgcttttctgccagtttggcccctcactttaactctctgccccgggcatttccagctcttcactttttggcactggatgcatctcagcacagcagcctttctaccaggtttggcaccgtagctgttcctaatattttattatttcaaggagctaaaccaatggccagatttaatcatacagatcgaacactggaaacactgaaaatcttcatttttaatcagacaggtatagaagccaagaagaatgtggtggtaactcaagccgaccaaataggccctcttcccagcactttgataaaaagtgtggactggttgcttgtattttccttattctttttaattagttttattatgtatgctaccattcgaactgagagtattcggtggctaattccaggacaagagcaggaacatgtggagtagtgatggtctgaaagaagttggaaagaggaacttcaatccttcgtttcagaaattagtgctacagtttcatacattttctccagtgacgtgttgacttgaaacttcaggcagattaaaagaatcatttgttgaacaactgaatgtataaaaaaattataaactggtgttttaactagtattgcaataagcaaatgcaaaaatattcaatagatgcactattcttgtttttactgcatgaacgtaatccagtatttggaaagtaatccagtttgaaatgtgaagatgtattccggcagaatagtgagtagaatgacatgcttactatacagaaggcaaaaataggactctcaggtaatagtttaaggaaacccttgattccttatatatgtttaagaaggttagttttctgtttctttgcagtttttcttctagagtccatagca

SEQ ID NO: 216459 - protein, 515 aa, Artificial Sequence
  derived and/or modified sequence
MDSNGLSDPYVKFRLGHQKYKSKIMPKTLNPQWREQFDFHLYEERGGVIDITAWDKDAGKRDDFIGRCQVDLSALSREQTHKLELQLEEGEGHLVLLVTLTASATVSISDLSVNSLEDQKEREEILKRYSPLRIFHNLKDVGFLQVKVIRAEGLMAADVTGKSDPFCVVELNNDRLLTHTVYKNLNPEWNKVFTFNIKDIHSVLEVTVYDEDRDRSADFLGKVAIPLLSIQNGEQKAYVLKNKQLTGPTKGVIYLEIDVIFNAVKASLRTLIPKEQKYIEEENRLSKQLLLRNFIRMKRCVMVLVNAAYYVNSCFDWDSPPRSLAAFVLFLFVVWNFELYMIPLVLLLLLTWNYFLIISGKDNRQRDTVVEDMLEDEEEEDDKDDKDSEKKGFINKIYAIQEVCVSVQNILDEVASFGERIKNTFNWTVPFLSWLAIVALCVFTAILYCIPLRYIVLVWGINKFTKKLRSPYAIDNNELLDFLSRVPSDVQVVQYQELKPDPSHSPYKRKKNNLG

SEQ ID NO: 216460 - protein, 999 aa, Artificial Sequence
  derived and/or modified sequence
MEPRAAAAGEPEPPAASSSFQARLWKNLQLGVGRSKGGGGGRAGGPERRTADTPSPSPPPPVGTGNAPARGSGAGSRWSGFKKRKQVLDRVFSSSQPNLCCSSPEPLEPGGAGRAEQGSTLRRRIREHLLPAVKGPAAASGAAGGTPPGGRSPDSAPSSSSASSSLSSSPQPPPRGDRARDEGARRQGPGAHLCHQKSSSLPGTACLEQLLEPPPPPAEPARSPAESRAPETGEEHGSSQKIINTAGTSNAEVPLADPGMYQLDITLRRGQSLAARDRGGTSDPYVKFKIGGKEVFRSKIIHKNLNPVWEEKACILVDHLREPLYIKVFDYDFGLQDDFMGSAFLDLTQLELNRPTDVTLTLKDPHYPDHDLGIILLSVILTPKEGESRDVTMLMRKSWKRSSKELSENEVVGSYFSVKSLFWRTCGRPALPVLGFCRAELQNPYCKNVQFQTQSLRLSDLHRKSHLWRGIVSITLIEGRDLKAMDSNGLSDPYVKFRLGHQKYKSKIMPKTLNPQWREQFDFHLYEERGGVIDITAWDKDAGKRDDFIGRCQVDLSALSREQTHKLELQLEEGEGHLVLLVTLTASATVSISDLSVNSLEDQKEREEILKRYSPLRIFHNLKDVGFLQVKVIRAEGLMAADVTGKSDPFCVVELNNDRLLTHTVYKNLNPEWNKVFTFNIKDIHSVLEVTVYDEDRDRSADFLGKVAIPLLSIQNGEQKAYVLKNKQLTGPTKGVIYLEIDVIFNAVKASLRTLIPKEQKYIEEENRLSKQLLLRNFIRMKRCVMVLVNAAYYVNSCFDWDSPPRSLAAFVLFLFVVWNFELYMIPLVLLLLLTWNYFLIISGKDNRQRDTVVEDMLEDEEEEDDKDDKDSEKKGFINKIYAIQEVCVSVQNILDEVASFGERIKNTFNWTVPFLSWLAIVALCVFTAILYCIPLRYIVLVWGINKFTKKLRSPYAIDNNELLDFLSRVPSDVQVVQYQELKPDPSHSPYKRKKNNLG

SEQ ID NO: 216461 - DNA, 1548 bp, Artificial Sequence
  derived and/or modified sequence
atggacagcaacggcctgagcgacccctacgtgaagttcagactgggccaccagaagtacaagagcaagatcatgcccaagaccctgaacccccagtggagagagcagttcgacttccacctgtacgaggagagaggcggcgtgatcgacatcaccgcctgggacaaggacgccggcaagagagacgacttcatcggcagatgccaggtggacctgagcgccctgagcagagagcagacccacaagctggagctgcagctggaggagggcgagggccacctggtgctgctggtgaccctgaccgccagcgccaccgtgagcatcagcgacctgagcgtgaacagcctggaggaccagaaggagagagaggagatcctgaagagatacagccccctgagaatcttccacaacctgaaggacgtgggcttcctgcaggtgaaggtgatcagagccgagggcctgatggccgccgacgtgaccggcaagagcgaccccttctgcgtggtggagctgaacaacgacagactgctgacccacaccgtgtacaagaacctgaaccccgagtggaacaaggtgttcaccttcaacatcaaggacatccacagcgtgctggaggtgaccgtgtacgacgaggacagagacagaagcgccgacttcctgggcaaggtggccatccccctgctgagcatccagaacggcgagcagaaggcctacgtgctgaagaacaagcagctgaccggccccaccaagggcgtgatctacctggagatcgacgtgatcttcaacgccgtgaaggccagcctgagaaccctgatccccaaggagcagaagtacatcgaggaggagaacagactgagcaagcagctgctgctgagaaacttcatcagaatgaagagatgcgtgatggtgctggtgaacgccgcctactacgtgaacagctgcttcgactgggacagcccccccagaagcctggccgccttcgtgctgttcctgttcgtggtgtggaacttcgagctgtacatgatccccctggtgctgctgctgctgctgacctggaactacttcctgatcatcagcggcaaggacaacagacagagagacaccgtggtggaggacatgctggaggacgaggaggaggaggacgacaaggacgacaaggacagcgagaagaagggcttcatcaacaagatctacgccatccaggaggtgtgcgtgagcgtgcagaacatcctggacgaggtggccagcttcggcgagagaatcaagaacaccttcaactggaccgtgcccttcctgagctggctggccatcgtggccctgtgcgtgttcaccgccatcctgtactgcatccccctgagatacatcgtgctggtgtggggcatcaacaagttcaccaagaagctgagaagcccctacgccatcgacaacaacgagctgctggacttcctgagcagagtgcccagcgacgtgcaggtggtgcagtaccaggagctgaagcccgaccccagccacagcccctacaagagaaagaagaacaacctgggctag

SEQ ID NO: 216462 - DNA, 3000 bp, Artificial Sequence
  derived and/or modified sequence
atggagcccagagccgccgccgccggcgagcccgagccccccgccgccagcagcagcttccaggccagactgtggaagaacctgcagctgggcgtgggcagaagcaagggcggcggcggcggcagagccggcggccccgagagaagaaccgccgacacccccagccccagcccccccccccccgtgggcaccggcaacgcccccgccagaggcagcggcgccggcagcagatggagcggcttcaagaagagaaagcaggtgctggacagagtgttcagcagcagccagcccaacctgtgctgcagcagccccgagcccctggagcccggcggcgccggcagagccgagcagggcagcaccctgagaagaagaatcagagagcacctgctgcccgccgtgaagggccccgccgccgccagcggcgccgccggcggcaccccccccggcggcagaagccccgacagcgcccccagcagcagcagcgccagcagcagcctgagcagcagcccccagcccccccccagaggcgacagagccagagacgagggcgccagaagacagggccccggcgcccacctgtgccaccagaagagcagcagcctgcccggcaccgcctgcctggagcagctgctggagcccccccccccccccgccgagcccgccagaagccccgccgagagcagagcccccgagaccggcgaggagcacggcagcagccagaagatcatcaacaccgccggcaccagcaacgccgaggtgcccctggccgaccccggcatgtaccagctggacatcaccctgagaagaggccagagcctggccgccagagacagaggcggcaccagcgacccctacgtgaagttcaagatcggcggcaaggaggtgttcagaagcaagatcatccacaagaacctgaaccccgtgtgggaggagaaggcctgcatcctggtggaccacctgagagagcccctgtacatcaaggtgttcgactacgacttcggcctgcaggacgacttcatgggcagcgccttcctggacctgacccagctggagctgaacagacccaccgacgtgaccctgaccctgaaggacccccactaccccgaccacgacctgggcatcatcctgctgagcgtgatcctgacccccaaggagggcgagagcagagacgtgaccatgctgatgagaaagagctggaagagaagcagcaaggagctgagcgagaacgaggtggtgggcagctacttcagcgtgaagagcctgttctggagaacctgcggcagacccgccctgcccgtgctgggcttctgcagagccgagctgcagaacccctactgcaagaacgtgcagttccagacccagagcctgagactgagcgacctgcacagaaagagccacctgtggagaggcatcgtgagcatcaccctgatcgagggcagagacctgaaggccatggacagcaacggcctgagcgacccctacgtgaagttcagactgggccaccagaagtacaagagcaagatcatgcccaagaccctgaacccccagtggagagagcagttcgacttccacctgtacgaggagagaggcggcgtgatcgacatcaccgcctgggacaaggacgccggcaagagagacgacttcatcggcagatgccaggtggacctgagcgccctgagcagagagcagacccacaagctggagctgcagctggaggagggcgagggccacctggtgctgctggtgaccctgaccgccagcgccaccgtgagcatcagcgacctgagcgtgaacagcctggaggaccagaaggagagagaggagatcctgaagagatacagccccctgagaatcttccacaacctgaaggacgtgggcttcctgcaggtgaaggtgatcagagccgagggcctgatggccgccgacgtgaccggcaagagcgaccccttctgcgtggtggagctgaacaacgacagactgctgacccacaccgtgtacaagaacctgaaccccgagtggaacaaggtgttcaccttcaacatcaaggacatccacagcgtgctggaggtgaccgtgtacgacgaggacagagacagaagcgccgacttcctgggcaaggtggccatccccctgctgagcatccagaacggcgagcagaaggcctacgtgctgaagaacaagcagctgaccggccccaccaagggcgtgatctacctggagatcgacgtgatcttcaacgccgtgaaggccagcctgagaaccctgatccccaaggagcagaagtacatcgaggaggagaacagactgagcaagcagctgctgctgagaaacttcatcagaatgaagagatgcgtgatggtgctggtgaacgccgcctactacgtgaacagctgcttcgactgggacagcccccccagaagcctggccgccttcgtgctgttcctgttcgtggtgtggaacttcgagctgtacatgatccccctggtgctgctgctgctgctgacctggaactacttcctgatcatcagcggcaaggacaacagacagagagacaccgtggtggaggacatgctggaggacgaggaggaggaggacgacaaggacgacaaggacagcgagaagaagggcttcatcaacaagatctacgccatccaggaggtgtgcgtgagcgtgcagaacatcctggacgaggtggccagcttcggcgagagaatcaagaacaccttcaactggaccgtgcccttcctgagctggctggccatcgtggccctgtgcgtgttcaccgccatcctgtactgcatccccctgagatacatcgtgctggtgtggggcatcaacaagttcaccaagaagctgagaagcccctacgccatcgacaacaacgagctgctggacttcctgagcagagtgcccagcgacgtgcaggtggtgcagtaccaggagctgaagcccgaccccagccacagcccctacaagagaaagaagaacaacctgggctag

SEQ ID NO: 216463 - DNA, 1548 bp, Artificial Sequence
  derived and/or modified sequence
atggacagtaacggtttgtcagacccatatgtaaagttcagactgggacaccagaagtataagagcaagatcatgccaaagaccctaaaccctcagtggagggagcagtttgacttccacctgtatgaagagcgtgggggggtgattgatattacagcgtgggataaggatgccggtaagagggacgattttattgggcgctgccaggtggacctatccgccttatcgagagaacagacccacaagctagagttgcagttggaggaaggagaaggacatttggtactcttggtaacacttaccgcgagtgcaaccgtgagcatctccgatctgagtgttaactctctggaagaccaaaaagagagggaggaaattctgaagcggtactctcctttaaggattttccacaacctgaaggatgtcggatttttgcaagtgaaggttatcagggccgagggactcatggccgccgacgtgacaggaaaaagtgaccccttttgtgtggtggagcttaacaatgaccggctgctgacacatacagtgtacaagaacttgaacccagagtggaacaaggtgttcacatttaacattaaggacatccatagcgtccttgaagtcacagtgtacgacgaagatcgcgacagaagtgccgatttcctggggaaagtcgccatcccattgctctctatacagaatggcgaacagaaagcgtacgtcctcaaaaacaaacagctgaccgggccgaccaaaggcgtgatctaccttgaaattgacgtaattttcaacgcagttaaagcaagcttgaggactctgattcctaaagagcaaaaatatatcgaggaagagaataggctgtccaaacagctgctgctgagaaattttatcagaatgaagcggtgtgtgatggtcctcgtcaatgccgcctattacgtgaattcctgctttgactgggatagtcctccccgatctctggcagcatttgtgctgttcttgtttgtggtttggaactttgaactgtacatgatccccttagttctcttactcctgctgacgtggaactatttcctgatcatttccgggaaagacaataggcagagagacacagtggttgaagacatgctggaagacgaggaagaggaggacgacaaagacgataaggacagcgaaaagaagggctttattaataagatctatgcaattcaggaggtctgtgtctccgtgcagaacatcctcgacgaggtggcgtctttcggagaacggataaagaacactttcaattggaccgttccctttcttagttggcttgccattgtagcgttgtgcgtgtttacagccatcctttattgtattcccctcaggtacatagtgctcgtgtgggggatcaacaagtttactaaaaagctgaggtcaccttacgcgatcgataacaacgagctcctggactttctctcacgcgttccatccgatgtccaggtggtccagtatcaagagctcaagcccgacccaagccattccccctataagagaaaaaagaacaacctcggatag

SEQ ID NO: 216464 - DNA, 3000 bp, Artificial Sequence
  derived and/or modified sequence
atggagcctcgcgcagccgccgccggggagcccgaaccgcccgcagcctcctcatcgtttcaggcacgcctgtggaaaaatctgcagctcggcgtggggcggtcgaaaggcggagggggcggccgggccggcggccccgagcgccggaccgctgacactccctcccccagccccccccctccagttggaaccggcaacgcccccgcgcggggtagcggcgcaggctctcggtggagtggattcaagaaacggaaacaggttctggaccgggtgttttctagtagtcaacctaatctgtgctgttcatcccccgaacctttggagccgggaggggcaggacgcgcagaacaaggctctacgttacgcagacggattcgtgaacatctgctgcccgctgtcaaagggccagcagcagcaagcggcgccgctgggggcactccaccaggcggccggtcgccggattcggctccttcatcaagctctgcttcctcatctctgtctagctcacctcaacctccacctaggggggaccgggcgcgcgacgaaggggcacgacgacagggtcccggcgctcatctgtgtcaccagaagagttcatctctgccaggtaccgcttgccttgagcagcttctcgaaccccctccgccacccgctgagcccgctcgttcacctgccgagtctcgcgctccagaaacaggggaggagcacggctccagccagaagataatcaatacagccggcaccagcaacgctgaagtgcctctggcagaccctggtatgtatcagttagacatcaccctcagacgaggccagtctctggccgccagggataggggcgggacaagcgatccatatgttaagtttaaaatcggtggtaaagaggtgttcaggtctaaaatcatccacaaaaatctgaaccctgtgtgggaggagaaagcttgtatcctggtggaccacctccgggaaccgttatatattaaggttttcgattatgacttcggtctacaagatgactttatgggatcagcctttcttgacctgacacaattggagctgaatagacccactgatgtaaccttgaccctgaaagacccccactaccccgaccatgatcttgggatcattttacttagcgtgatcctaactccaaaagaaggagagtcccgggacgttacaatgctcatgcggaagtcatggaagcgaagcagcaaggaactgagcgagaacgaagtcgtaggcagttacttcagcgtgaagtcacttttctggcgcacctgcgggagacccgcgctccctgttctggggttctgtcgggcggagcttcaaaacccgtactgcaagaacgttcaatttcaaacccagtccctccgtctatccgacctgcatcgaaagtcacacttgtggcggggcatcgtcagcattaccttgattgaaggaagagatctgaaagctatggatagcaatggtctgtccgatccctatgttaagttccgcctcgggcatcagaaatacaaaagtaagattatgccaaagactcttaacccacagtggcgcgagcagttcgatttccacctgtacgaggagcgtgggggcgtaatcgatattacagcttgggataaggacgcaggtaagagagatgatttcattggtcgttgtcaggttgatcttagcgccctgtcccgggaacagacacacaaactagagctacagcttgaggagggcgagggtcacttagttcttctggtgacccttaccgccagcgccacagtgagtatttcagacctgtctgtaaatagcctggaggaccagaaagaaagagaagaaatcctcaaacggtacagcccactgcgtatcttccacaacttaaaggatgttgggtttctccaggtcaaggtcatccgcgctgagggccttatggccgccgatgtaaccggaaagtccgaccctttttgtgtggtggagctaaacaacgatcgacttctcacacatacagtttacaaaaaccttaaccctgagtggaacaaggtctttacgtttaatataaaagatattcattctgttctggaggtgaccgtttatgatgaggaccgggacaggtccgctgatttcctgggcaaggtggccatccctctgctgtctattcaaaatggagaacagaaagcgtacgtccttaagaataagcagctgactggtccaacgaagggtgtcatatatctggagattgacgtgatcttcaatgctgtgaaggcgtcgctgagaaccctaatcccgaaagagcagaagtacatcgaggaagaaaacagactatccaagcagttgttactgagaaacttcatccgaatgaagcggtgtgtaatggtccttgtcaacgccgcatactatgtgaattcctgctttgactgggattcaccccctcggagcctggccgcatttgtactgtttctattcgttgtttggaattttgagctgtacatgataccactggtgctactgctccttctgacttggaattattttttaatcattagcggtaaagacaacaggcaacgggatacagtcgtcgaagacatgttagaagacgaggaagaagaggatgataaagatgataaggacagcgagaaaaaggggtttatcaacaaaatctacgcaatccaggaggtatgcgtatccgttcagaatatcctagatgaagtcgctagtttcggcgagaggataaagaacaccttcaattggactgtacccttcctctcttggctcgccatcgtggcattgtgtgtgttcaccgctatcctgtattgcatccccctgaggtacattgtccttgtctggggaataaacaaatttactaagaagttacgcagcccatacgccatcgataataatgaactgctggactttctctcccgggtgccttcagacgtgcaagtagtgcaatatcaggaactaaagcctgatccgtcacactctccttacaaacggaagaaaaacaatctgggctag

SEQ ID NO: 216465 - DNA, 1548 bp, Artificial Sequence
  derived and/or modified sequence
atggacagcaatggcctgagtgacccctacgtgaagttccggctgggccaccagaagtacaagagcaagatcatgcccaagaccctgaacccccagtggagggagcagtttgacttccacctgtatgaggagcggggcggcgtgattgacatcacagcctgggacaaggatgctgggaagagagatgacttcatcggccgctgccaggtggacctgagcgccctgagccgggagcagacccacaagctggagctgcagctggaggagggggagggccacctggtgctgctggtgaccctgacagccagcgccaccgtgtccatcagtgacctgtctgtgaacagcctggaggaccagaaggagcgggaggagatcctgaagcgctacagccccctgcgcatcttccacaacctgaaggatgtgggcttcctgcaggtgaaggtgatccgggcagagggcctgatggctgctgatgtgacaggcaagagtgaccccttctgtgtggtggagctgaacaatgaccggctgctgacccacacagtgtacaagaacctgaaccctgagtggaacaaggtgttcaccttcaacatcaaggacatccacagcgtgctggaggtgacagtgtatgatgaagatcgggacagatctgctgacttcctgggcaaggtggccatccccctgctgagcatccagaatggagagcagaaggcctacgtgctgaagaacaagcagctgaccggccccaccaagggcgtcatctacctggagattgatgtgatcttcaatgctgtgaaggccagcctgcggaccctcatccccaaggagcagaagtacatcgaggaggagaaccggctgagcaagcagctgctgctgaggaacttcatccgcatgaagagatgtgtgatggtgctggtgaatgctgcctactacgtgaacagctgctttgactgggacagcccccccaggagcctggccgcctttgtgctcttcctgtttgtggtgtggaactttgagctgtacatgatccccctggtgctgctgctgctgctgacctggaactacttcctgatcatcagcggcaaggacaaccggcagagggacacagtggtggaggacatgctggaggatgaggaggaggaggatgacaaggatgacaaggacagcgagaagaagggcttcatcaacaagatctatgccatccaggaggtgtgtgtgtctgtgcagaacatcctggatgaggtggccagctttggagagcgcatcaagaacaccttcaactggacagtgcccttcctgtcctggctggccatcgtggccctgtgtgtgttcaccgccatcctgtactgcatccccctgcgctacatcgtgctggtgtggggcatcaacaagttcaccaagaagctgcggagcccctatgccatcgacaacaatgagctgctggacttcctgagccgggtgcccagtgatgtgcaggtggtgcagtaccaggagctgaagccagaccccagccacagcccctacaagaggaagaagaacaacctgggctag

SEQ ID NO: 216466 - DNA, 3000 bp, Artificial Sequence
  derived and/or modified sequence
atggagcccagggctgctgctgctggggagcctgagcccccagctgccagcagcagcttccaggcccggctgtggaagaacctgcagctgggcgtgggccgcagcaagggcggcggcggcggccgggccggcggccctgagaggagaacagctgacacccccagccccagccccccacctcctgtgggcactggaaatgccccagcccggggcagcggggccggcagccgctggagcggcttcaagaagaggaagcaggtgctggacagagtcttcagcagcagccagcccaacctgtgctgcagcagccctgagcccctggagcctggaggagctggccgggcagagcagggcagcaccctgcggcggcgcatccgggagcacctgctgcctgctgtgaagggccctgctgctgccagcggggctgctgggggcaccccacctgggggccgcagcccagattctgcccccagcagcagcagcgccagcagcagcctgagcagcagcccccagcccccacccaggggggaccgggccagagatgaaggagcccggcggcagggccctggggcccacctgtgccaccagaagagcagcagcctgcccggcacagcctgcctggagcagctgctggagcccccacctcctcctgctgagcccgcccggagccctgctgagagccgggcccctgagaccggggaggagcacggcagcagccagaagatcatcaacacagctggcaccagcaatgctgaggtgcccctggccgaccccggcatgtaccagctggacatcaccctgcggcggggccagagcctggccgcccgggacagaggaggcaccagtgacccctacgtgaagttcaagattggaggcaaggaggtgttccgcagcaagatcatccacaagaacctgaaccctgtgtgggaggagaaggcctgcatcctggtggaccacctgcgggagcccctgtacatcaaggtgtttgattatgactttggcctgcaggatgacttcatgggcagcgccttcctggacctgacccagctggagctgaaccggcccacagatgtgaccctgaccctgaaggacccccactacccagaccatgacctgggcatcatcctgctgagcgtcatcctgacccccaaggagggggagagcagagatgtgaccatgctgatgaggaagtcctggaagaggagcagcaaggagctgtctgaaaatgaggtggtgggcagctacttctctgtgaagagcctcttctggaggacctgtggccgcccagccctgcctgtgctgggcttctgcagagctgagctgcagaacccctactgcaagaatgtgcagttccagacccagagcctgcggctgagtgacctgcacaggaagagccacctgtggaggggcatcgtgtccatcaccctgattgagggccgggacctgaaggccatggacagcaatggcctgagtgacccctacgtgaagttccggctgggccaccagaagtacaagagcaagatcatgcccaagaccctgaacccccagtggagggagcagtttgacttccacctgtatgaggagcggggcggcgtgattgacatcacagcctgggacaaggatgctgggaagagagatgacttcatcggccgctgccaggtggacctgagcgccctgagccgggagcagacccacaagctggagctgcagctggaggagggggagggccacctggtgctgctggtgaccctgacagccagcgccaccgtgtccatcagtgacctgtctgtgaacagcctggaggaccagaaggagcgggaggagatcctgaagcgctacagccccctgcgcatcttccacaacctgaaggatgtgggcttcctgcaggtgaaggtgatccgggcagagggcctgatggctgctgatgtgacaggcaagagtgaccccttctgtgtggtggagctgaacaatgaccggctgctgacccacacagtgtacaagaacctgaaccctgagtggaacaaggtgttcaccttcaacatcaaggacatccacagcgtgctggaggtgacagtgtatgatgaagatcgggacagatctgctgacttcctgggcaaggtggccatccccctgctgagcatccagaatggagagcagaaggcctacgtgctgaagaacaagcagctgaccggccccaccaagggcgtcatctacctggagattgatgtgatcttcaatgctgtgaaggccagcctgcggaccctcatccccaaggagcagaagtacatcgaggaggagaaccggctgagcaagcagctgctgctgaggaacttcatccgcatgaagagatgtgtgatggtgctggtgaatgctgcctactacgtgaacagctgctttgactgggacagcccccccaggagcctggccgcctttgtgctcttcctgtttgtggtgtggaactttgagctgtacatgatccccctggtgctgctgctgctgctgacctggaactacttcctgatcatcagcggcaaggacaaccggcagagggacacagtggtggaggacatgctggaggatgaggaggaggaggatgacaaggatgacaaggacagcgagaagaagggcttcatcaacaagatctatgccatccaggaggtgtgtgtgtctgtgcagaacatcctggatgaggtggccagctttggagagcgcatcaagaacaccttcaactggacagtgcccttcctgtcctggctggccatcgtggccctgtgtgtgttcaccgccatcctgtactgcatccccctgcgctacatcgtgctggtgtggggcatcaacaagttcaccaagaagctgcggagcccctatgccatcgacaacaatgagctgctggacttcctgagccgggtgcccagtgatgtgcaggtggtgcagtaccaggagctgaagccagaccccagccacagcccctacaagaggaagaagaacaacctgggctag

SEQ ID NO: 216467 - DNA, 2629 bp, Artificial Sequence
  derived and/or modified sequence
acacactctgctacattgaaactgctccctgaatcttttcctccggtaaattgtgcttcctgggaaactaagggtttcagacccaaagtttacgcctatcagacctacacagaaaatcgcatctttggagaggaatagtcagcatcaccttgattgaagggagagacctcaaggccatggattccaacgggttgagcgatccctacgtgaagttccggcttgggcatcagaagtacaagagcaagattatgccaaaaacgttgaatcctcagtggagggaacaatttgattttcacctttatgaagaaagaggaggagtcattgatatcactgcatgggacaaagatgctgggaaaagggatgatttcattggcaggtgccaggtcgacctgtcagccctcagtagggaacagacgcacaagctggagttgcagctggaagagggtgagggacacctggtgctgctggtcactctgacagcatcagccacagtcagcatctctgacctgtctgtcaactccctggaggaccagaaggaacgagaggagatattaaagagatatagcccattgaggatatttcacaacctgaaagatgtgggatttctccaggtgaaagtcatcagagcggaagggttaatggctgccgacgtcactggaaaaagtgacccattttgtgtggtagaactgaacaacgatagactgctaacacatactgtctacaaaaatctcaatcctgagtggaataaagtcttcacgttcaacattaaagatatccattcagttcttgaagtgacagtttatgatgaagatcgggatcgaagtgctgactttctgggcaaagttgctataccattgctgtctattcaaaatggtgaacagaaagcctacgtcttgaaaaacaagcagctgacagggccaacaaagggggtcatctatcttgaaatagatgtgatttttaatgctgtgaaagccagcttacgaacattaatacccaaagaacagaagtacattgaagaggaaaacagactctctaaacagctgctactaagaaactttatcagaatgaaacgttgtgtcatggtgctggtaaatgctgcatactacgttaatagttgctttgattgggattcacccccaaggagtctcgctgcttttgtgctctttctctttgttgtctggaactttgagctctacatgataccactggttttgttgttactattgacatggaactacttcttgataatatcagggaaagataacaggcaacgtgatacagtagtggaggacatgctagaggacgaggaagaagaagatgacaaagatgacaaggacagtgaaaaaaagggatttataaataaaatctatgccatccaggaggtatgtgtcagtgtccagaacatcctagatgaagtggcttcctttggcgaaaggataaagaatactttcaactggactgtcccattcttaagctggctggccattgtagccctctgtgtgttcacagccatcctgtactgcattccgctgagatacattgtccttgtctggggcatcaataaatttacaaaaaagcttcggagtccatatgcaattgataacaatgaactacttgacttcctttccagagtcccttcagatgtacaagtggtgcaataccaagaactgaaaccagatccttctcatagcccatataaaagaaagaaaaacaatcttggctagccagctcccagcactgaggagaccagcatctgtttgggaagataaaagaaaaagccctcagcctcagcagcatttcctttctttctgctttttatttattttgcctttttatcatgatcgagagaatctgtaaatagtgtacaaaggcatatgtctttgaatatatacttctattgtacagactcaacttgataaaggttttgctactgctgtgtcaaaaccttgttagctgtggataataatataacacactgaaagaacaaatataagaatgataacactggaagatatattcttatctaattactagtggattaaatactcacctgtgctctgattaaatctacatcaattgtaaatgtcgatttgattttaaagtttttttttaatgcgactattttttatctgaaaagtaatccattacacttttctatgttttatacatttcaaaagggagggaaattccaaagcctgaataatggaatggatacatttcaatttaacatatattctggctttagatcccgacattcactcctgtgcaaattacttaggtatgacttaggctaattttaagctaataagtgaaggtacattcactccctcaagagaatcaatactcagaaggttacaaagttttctttatagaatttcaatcaatcattccatctaaaaccttaaaatctctacaggactacataacataaatactgccagtttataaacgattgcctatctgaatttttatacctaccactactttaatttatacagttagttagcaaattagcaacccagtaagtacagttatcaaaaatactaggaaactatatccatatcgcttttggtgtcagattgtatctgtgcatctaaaaatattttaataaatactcaagtgctctcag

SEQ ID NO: 216468 - DNA, 5396 bp, Artificial Sequence
  derived and/or modified sequence
atggagccccgggctgccgcggcgggcgagccagagccgccggcggcgtcctcctccttccaggcccggctctggaagaacctgcagctgggggtgggcaggagcaagggcggcgggggcgggcgcgctgggggtccagagcgccgcactgcggacaccccgtcgccctccccgccacccccggtgggcacagggaatgcaccggccagggggagtggtgcaggcagcaggtggagcggcttcaagaagcggaagcaagtgctggaccgagtcttctcctcctcgcagcccaacctgtgctgctcgtcgccggagcccctggagcccggcggcgccggcagagccgagcaggggtccacgctacgccgccggatccgcgagcatttgctccccgccgtaaaggggcccgcggcggcctcgggagcagcgggagggacgcctcctggcggacgctcccccgactcagctccttcctcttcctccgcctcatcctccctgtcctcctcgccccagcctcccccgaggggggaccgcgcccgagatgagggtgcacggcgtcagggccccggggcgcacttgtgccaccagaagagctcctctctgccgggcaccgcctgcctggagcagctgctggagccgccgcctcctcccgcagagccggcgcggagtcccgcggagtctcgggccccggagacgggcgaggagcacggcagcagccagaaaataataaacactgctggaaccagtaatgcagaagtccccttggctgatcccggaatgtaccagctggacattacattaagaaggggtcaaagtttagctgctcgagatcgaggagggacgagtgatccatatgtgaagtttaaaatcggaggaaaagaagtttttagaagtaagataatacacaagaacctcaaccctgtgtgggaagaaaaagcttgtattctggttgatcatcttagggagccattgtatataaaggtatttgactatgattttggactacaggatgactttatgggctcagcctttctggatctgacacaattggagttaaacaggcccacagatgtgacccttactctgaaagatcctcattatcctgaccatgatcttggaatcattttgctctcagtcatccttacccctaaagaaggagagtccagggatgtgacaatgctaatgaggaagagttggaaaagatcaagtaaggaactttcagaaaatgaagtggttggatcttatttctctgtgaagtctctcttttggaggacgtgcggcaggccagctcttcctgtcctgggcttctgcagagcagagcttcagaatccttattgcaaaaatgtacaatttcagacccaaagtttacgcctatcagacctacacagaaaatcgcatctttggagaggaatagtcagcatcaccttgattgaagggagagacctcaaggccatggattccaacgggttgagcgatccctacgtgaagttccggcttgggcatcagaagtacaagagcaagattatgccaaaaacgttgaatcctcagtggagggaacaatttgattttcacctttatgaagaaagaggaggagtcattgatatcactgcatgggacaaagatgctgggaaaagggatgatttcattggcaggtgccaggtcgacctgtcagccctcagtagggaacagacgcacaagctggagttgcagctggaagagggtgagggacacctggtgctgctggtcactctgacagcatcagccacagtcagcatctctgacctgtctgtcaactccctggaggaccagaaggaacgagaggagatattaaagagatatagcccattgaggatatttcacaacctgaaagatgtgggatttctccaggtgaaagtcatcagagcggaagggttaatggctgccgacgtcactggaaaaagtgacccattttgtgtggtagaactgaacaacgatagactgctaacacatactgtctacaaaaatctcaatcctgagtggaataaagtcttcacgttcaacattaaagatatccattcagttcttgaagtgacagtttatgatgaagatcgggatcgaagtgctgactttctgggcaaagttgctataccattgctgtctattcaaaatggtgaacagaaagcctacgtcttgaaaaacaagcagctgacagggccaacaaagggggtcatctatcttgaaatagatgtgatttttaatgctgtgaaagccagcttacgaacattaatacccaaagaacagaagtacattgaagaggaaaacagactctctaaacagctgctactaagaaactttatcagaatgaaacgttgtgtcatggtgctggtaaatgctgcatactacgttaatagttgctttgattgggattcacccccaaggagtctcgctgcttttgtgctctttctctttgttgtctggaactttgagctctacatgataccactggttttgttgttactattgacatggaactacttcttgataatatcagggaaagataacaggcaacgtgatacagtagtggaggacatgctagaggacgaggaagaagaagatgacaaagatgacaaggacagtgaaaaaaagggatttataaataaaatctatgccatccaggaggtatgtgtcagtgtccagaacatcctagatgaagtggcttcctttggcgaaaggataaagaatactttcaactggactgtcccattcttaagctggctggccattgtagccctctgtgtgttcacagccatcctgtactgcattccgctgagatacattgtccttgtctggggcatcaataaatttacaaaaaagcttcggagtccatatgcaattgataacaatgaactacttgacttcctttccagagtcccttcagatgtacaagtggtgcaataccaagaactgaaaccagatccttctcatagcccatataaaagaaagaaaaacaatcttggctagccagctcccagcactgaggagaccagcatctgtttgggaagataaaagaaaaagccctcagcctcagcagcatttcctttctttctgctttttatttattttgcctttttatcatgatcgagagaatctgtaaatagtgtacaaaggcatatgtctttgaatatatacttctattgtacagactcaacttgataaaggttttgctactgctgtgtcaaaaccttgttagctgtggataataatataacacactgaaagaacaaatataagaatgataacactggaagatatattcttatctaattactagtggattaaatactcacctgtgctctgattaaatctacatcaattgtaaatgtcgatttgattttaaagtttttttttaatgcgactattttttatctgaaaagtaatccattacacttttctatgttttatacatttcaaaagggagggaaattccaaagcctgaataatggaatggatacatttcaatttaacatatattctggctttagatcccgacattcactcctgtgcaaattacttaggtatgacttaggctaattttaagctaataagtgaaggtacattcactccctcaagagaatcaatactcagaaggttacaaagttttctttatagaatttcaatcaatcattccatctaaaaccttaaaatctctacaggactacataacataaatactgccagtttataaacgattgcctatctgaatttttatacctaccactactttaatttatacagttagttagcaaattagcaacccagtaagtacagttatcaaaaatactaggaaactatatccatatcgcttttggtgtcagattgtatctgtgcatctaaaaatattttaataaatactcaagtgctctcagagaaaaaaaaaacctgctttctcattagattactgaaatgctttaattcatactatgattttgttattagtgtgaattttaatgtagagaattcagtgtgctaagtgatatgccagtgtttcactacattcatttattaaaaaaaatcattcttgattatgcatgaaaacctgttttgtaaaataaaataaactgcttgggggtggtggttgcctttatcaatgtttcactattatcatagaatctatacttaaaaattgcattcccaagactcttaaagtagtttttatatctcactccctggtatactaagggagcataactctggagaaaaaataatttggttggttgagaatgtcttacttccctgacttggtaggggactacactcagttgaaattgcagcagacaatgctttgcactactttattaataataaacttggatggggtaaaagtgggggttatactggaaaaactatagaaaagctaaaagaaatgtatatttcactctaaaggaagattctttaacaataaatgtaatctcattgaagctgatttttaaagtatttttattttagagataagttgttaaatactatttcttataatagaactattttgatctgtttatatactatgcttgaatgtcaattaaattccctttctacagaaaggctttgacctcaacatgctttatttaatgtatcatgtttaaaatgacatgcttctgtctgcataccatcactgtttgttgctaaaaacataatgttccatgaacatgatgttactacagaaagtttattgatgagataactgtttgaaataactttcaattataccttatgtgagacttttatgttctgtgctgacaatgtgtactcaaatgtctataagcctgatattctacaacctcagatgtatctagtggatagtaaccattaacagatgactaatttgtttcactgtatcaaatttcagatgtttagttcaatggtaatgctgactacacattcactgtattaaatacaaaagaaaataatctttcccacgtataatcagcactccttttttttttttttttggtggttcagagattgatgagggattgtgtgcatattcttaaaaactatatgtcacttggagaaaaacagatttggtttaaacaaataagacctttttcctgaaactctgactcttatatgaaaatacctctggaggggtgagcaaccaatgacattaacagaggaataagaactagcttgaggcacaaaagtgatattcagggaaatcttcattgcttttagaaactactacattcacaggctgaaaacagaatatgtatagttaaaattttaactatttatttctttccccttctcacatagctgcaattctgtcttgagagctgcctgacttgccttcattttgagatctgtgatgtaaatatttcttaagagactgaatgtcactcaaacatctacttggactg

SEQ ID NO: 216469 - DNA, 1548 bp, Artificial Sequence
  derived and/or modified sequence
atggacagcaacggcctgagcgacccctacgtgaagttccggctgggacatcaaaaatacaagtctaagattatgccaaagaccctgaatcctcaatggcgggaacagttcgatttccatctctatgaagaacggggcggtgtgatcgatataaccgcctgggataaagatgccggtaagcgggacgattttatcggacgctgtcaagttgacctgtccgctctaagtcgcgagcagacgcacaagcttgaacttcagctggaggagggtgagggccacctggtgttgctggtgactctgacagcttctgccacagtatcaatttcagatttgtctgtgaactctctggaggaccagaaggagagggaagaaatcctcaaaagatattctcccctgcgcatcttccataatctgaaggacgtcgggttcctgcaggtgaaggtaattcgggctgagggtctgatggctgcagacgtgaccggaaagagtgatcccttctgtgtggtcgagctaaataatgataggctgttaacacacactgtgtataaaaacctgaacccagaatggaacaaggttttcacctttaatattaaggacatccacagtgtgctagaagtgactgtgtacgacgaggaccgagaccgcagcgccgacttcttgggcaaggtggcgatacctttgctcagtatccaaaatggcgagcaaaaagcttacgtcctcaagaataaacaattgacaggtccaacaaaaggggtcatttatctcgagatagacgtgatattcaacgcagttaaagcatccctacgcaccctgattcctaaggaacagaagtatattgaggaagagaacagactgtccaaacagctgctgctgagaaattttattcgcatgaaacgatgcgtcatggtcctcgtgaacgcagcttactacgttaattcatgcttcgactgggatagtcctcccagaagtctagcggcctttgtcctctttctgttcgttgtctggaatttcgaattgtatatgatcccattggttctgctgctgctgctgacttggaactactttctgatcatttcagggaaagacaatcgccagcgagacactgtcgttgaggatatgctggaggatgaagaagaagaagatgacaaagatgataaagacagcgagaagaaggggtttatcaataagatctacgctattcaggaagtatgtgtgtccgtgcagaacatcctggatgaagttgctagctttggcgaacgcatcaagaatacctttaactggaccgtgccttttctgtcgtggctggccattgtcgcactgtgtgtgtttaccgcaattttatattgtatcccgctccgctatattgtgcttgtgtggggcatcaacaagtttacgaaaaagctgcgatctccttacgccatagacaataatgaactgctcgattttctctccagggtgccttccgatgttcaggtggtgcagtatcaggagttgaagcctgatccttctcatagtccttacaaacgcaaaaagaataacctcggatag

SEQ ID NO: 216470 - DNA, 3000 bp, Artificial Sequence
  derived and/or modified sequence
atggagccccgggccgccgccgccggcgagcccgagccccccgccgcctcatctagttttcaggcccggctttggaaaaatctccagctcggggtagggcgcagcaaaggaggcggaggcggacgcgccggcgggcctgaacgcagaacagccgacaccccctcaccatctcctcccccaccggtgggaaccggaaatgcacccgcccgcgggagcggcgctggatccaggtggagtgggtttaagaagaggaagcaggttctggatcgagtgttcagctcatctcaacctaatctctgttgcagcagccccgagccattggagcctgggggtgccggccgggccgaacagggaagcactttgagacggcgcattagagagcaccttttaccagcagtgaaaggtcctgccgccgcaagcggcgcggcaggaggtactcctcctggtggtcggtctcctgactctgcccctagttcctcttccgctagtagttcattatcatcttccccacaacctcccccccggggcgacagagcgcgggatgagggcgcaagacgccaggggccaggtgcacatctgtgccatcagaagagctcatcactgcctggcactgcatgtctggagcagttgctcgagccacctccacctcctgccgagccagcccgaagccccgcagagagcagggccccagagacgggggaagagcatggttcttctcaaaaaatcatcaacacggccggtacgtcgaacgcagaagtccctctcgccgatcctgggatgtaccagcttgacataacccttcgaagaggacagtcactcgccgccagagatcgcggcgggacttctgacccctatgtgaaattcaagataggtggtaaggaggtcttcaggtccaaaataatccacaagaacctgaacccagtttgggaagagaaagcatgcatcttggtagatcacttgagggagcctctatacatcaaggtgtttgattacgactttggcttacaagacgactttatgggctctgcattccttgatcttacacagctggagttgaataggccaaccgatgttaccctgaccctgaaggacccccattaccccgaccatgatttgggcatcatcctactgtctgttatcctcacccctaaggaaggcgagagtagggatgttacaatgctgatgcgcaagtcatggaagcgctcatcaaaagagctgtcagaaaacgaggtggtgggttcctattttagtgtcaagtcactcttttggcgaacctgcgggcgtccagccctcccagtgctagggttttgccgcgccgagctgcaaaatccttattgtaagaatgtccagttccagacgcagagcctaagactctcagatcttcaccggaaaagccatctatggcgcgggattgtatcaatcaccttaattgaggggagagacctcaaggctatggactctaatggactgagtgacccctacgtgaagttccggctcggccatcagaaatataagtccaaaatcatgccaaagaccctcaatccacagtggcgcgaacagtttgacttccacctgtacgaggagagaggcggcgtcatcgatatcaccgcgtgggataaagatgccgggaaacgcgacgacttcataggtagatgtcaggttgacctcagcgccttatcccgagagcagacgcataaactggaactccaactggaagagggagagggccaccttgtacttctggttactctgacagccagtgctacagtgtccataagcgatctttcagtcaattccctggaggatcaaaaggaacgtgaagaaattctaaaacgatactcccccctgagaatattccataacttgaaggacgtgggttttctccaggtcaaagtgatccgcgcagagggcttaatggccgccgacgtgacagggaagagcgacccattctgcgttgtcgagctgaacaacgacagactactaactcacacggtctacaaaaacctgaatcccgaatggaacaaagtgttcacattcaacattaaagatattcactcagtcctggaagtcacagtctacgatgaggaccgcgatcgcagtgccgacttcctcgggaaagtggcaattcctctgttaagcattcagaacggggagcaaaaggcctacgtactgaaaaacaagcagctaacaggacccacgaagggagtgatttacctggaaatagacgtgatctttaacgcagtaaaggcctcactaaggacattgattccaaaagagcagaagtacattgaggaagagaaccggctctccaagcaactcttgctgcggaatttcattcgcatgaagcgctgtgttatggtgctggtaaatgcagcctattatgttaacagctgttttgattgggactcacctcctaggagtctggccgcctttgtgctcttcctgtttgtggtgtggaattttgagctctatatgatccccctggtcctgcttcttctgttgacttggaactacttcttgattatatcaggaaaggataatcgccaaagggatactgtcgtggaggacatgctggaagatgaggaggaggaggacgataaagacgataaggacagcgagaagaagggcttcattaacaaaatctatgccatccaggaagtctgtgtatcagtgcagaatatcctcgatgaggtagcatcttttggcgagaggataaaaaacacattcaattggacagtgccattccttagttggctggccatcgtcgcactctgtgttttcaccgccattctgtactgcatacccctgcgatacatagtcctggtatggggtatcaataagtttacgaagaagcttagatcaccctacgcgattgacaacaatgaactcctggactttctcagtcgggtgccaagtgatgtgcaggtagttcagtatcaggagctcaaacctgacccttctcattctccctacaagcggaaaaagaataacctcggttag

SEQ ID NO: 216471 - DNA, 1548 bp, Artificial Sequence
  derived and/or modified sequence
atggattccaacggcctgtcagacccctacgttaagttcagactgggccaccaaaagtataaaagcaaaatcatgccaaaaaccctgaacccacagtggcgggagcaatttgattttcacctgtacgaggagcgaggaggagtgattgacattaccgcttgggataaggatgccggtaaaagagacgacttcatcgggagatgccaggttgatcttagtgctctaagcagggaacaaactcacaaattggagctgcagttggaggaaggggagggacacttagtgttgctcgtgacgctgactgcatcggcgaccgtgtcgatttcagacttatctgttaactccctggaggatcaaaaggagcgggaggagatcctgaagcgttattctccactgcgaatctttcataatctgaaagatgtcggctttctgcaagttaaggtgataagggcggagggcttgatggccgctgatgtgacgggaaagtcagatccattctgcgttgtggaactaaacaacgacaggcttctgacccacaccgtttataaaaacttaaatcccgagtggaacaaagtctttaccttcaacattaaagacattcattcagtgctggaagtgaccgtatatgacgaggacagggaccgtagcgcagacttcctgggcaaggtggccatcccattgctgtctatccagaacggagagcagaaagcctacgtgttaaagaacaaacaattgactggccctacaaagggggtgatctacctcgaaatagacgtgatctttaacgcggtgaaggcgagcttacggactctgattcctaaagagcaaaagtatattgaggaggaaaataggttatcgaaacagttgttacttcgcaactttatcagaatgaagaggtgcgtaatggtgcttgtaaatgctgcttattacgtgaacagttgtttcgactgggattcacctccacggagcctggccgcttttgtacttttcttgtttgtcgtatggaatttcgaactgtacatgataccgctcgtgctgctattgctactgacctggaactactttctaatcatcagtggcaaagacaaccgtcaacgtgacacagtggttgaggatatgctggaagatgaggaagaggaagatgataaggacgataaagactctgagaagaaaggatttatcaataagatttacgccatccaggaggtgtgcgtgagcgtacagaatattctggacgaagtcgcctcttttggagagaggatcaaaaataccttcaattggacagttcctttcctcagctggcttgctattgttgctctttgcgttttcacagcgatcttatactgcattcctctgcggtacattgtgctagtatggggtatcaacaaatttaccaaaaagctgcgatccccctacgctatcgacaacaacgaactgctggacttcttgtcccgcgtgcccagcgacgtccaggtggttcaatatcaggagctgaagccggacccatcacattccccttataaaaggaagaaaaataatctcggatag

SEQ ID NO: 216472 - DNA, 3000 bp, Artificial Sequence
  derived and/or modified sequence
atggagcctcgcgctgcagctgccggtgagcctgagccacctgcggcttcctcaagttttcaggccagattatggaagaacttacagctgggagtcggccgaagtaaagggggtggtgggggtcgagccggtgggccagaacgcagaaccgcagacaccccttcccccagtccaccgcctccagtgggcaccggaaatgctcccgcaagagggagcggggctggtagcaggtggtccgggtttaagaaaaggaagcaggtgctggaccgggtattctcatccagccagcctaacttgtgctgcagctcgccggagcctcttgagccaggcggagccggacgcgctgaacagggatccacactgcggaggcggatccgtgagcatctcctcccagctgtgaaggggcctgcggctgcctccggagcagcagggggaacaccccctggcggacgcagtccagactctgctcctagctcctcttccgccagcagctccttgtcaagttctccacagcctccacccagaggggaccgcgctagggacgaaggagcacgtcgccaagggcctggtgcccatctctgtcatcaaaagagcagtagtttgcctgggactgcgtgccttgagcagctgttggagccaccaccacccccagccgagccagcaagaagccccgcagaatcgcgggctcctgagactggagaagagcacggttctagccagaagattatcaatactgcaggaacctccaatgcggaggtgcctctggcagatcccggaatgtaccaacttgacattactctcagaagaggccagtctcttgcagcccgagacaggggcggaacatcagacccctacgtgaaatttaagataggcggaaaggaggtattcagatccaagattattcacaagaatttgaatcctgtgtgggaggagaaagcctgcattcttgtcgatcacttaagagagcccctctacatcaaggtgttcgactatgatttcgggctccaggacgactttatgggatcagcttttctcgacttgactcagctcgagttgaacagacccactgatgtgaccctgacgctgaaagatccacactacccggaccacgacctgggtattatcctgttgagcgtgatattaactccgaaagagggtgagtccagggatgtcacgatgctcatgaggaaatcctggaaacgcagtagcaaagaactgtcagagaatgaagtagtggggtcatatttttccgtaaaatccctgttttggcgaacctgcggcaggccagccctgccggttctgggattttgtagagccgaactccagaatccatactgcaaaaacgtccagtttcagactcagtctttacgcctctccgatctgcataggaagagccacctgtggcgaggcatcgtttccatcacactgattgaaggccgagacttgaaggcaatggactccaacggactaagcgacccatatgtgaagttccgcttaggccatcaaaagtacaaatctaagattatgccaaaaaccctcaatcctcaatggcgagaacagttcgattttcatctgtatgaagagcgcggaggggtaatcgacatcacagcctgggacaaagacgccggaaagagagatgattttattggcagatgccaggtcgacctctcagccttgtcccgcgagcagacgcacaaacttgagctgcagttggaagaaggggaggggcacctggtgctcctggtgactctgacggcctcggcaaccgtgagtatctcagatctgagcgtgaactccctcgaagatcagaaagagcgtgaggaaatactcaaacgttatagtccgctgaggatcttccacaatctgaaggatgttggcttcttgcaagtgaaagtcattcgggctgaggggctgatggccgcagatgtgaccggcaaatccgacccgttctgtgttgtggagcttaacaacgatcggttgcttacgcatactgtgtacaaaaacttaaaccctgagtggaataaagtgtttaccttcaacatcaaagacattcattccgtcctggaggtgactgtctatgatgaggaccgggaccggagtgccgactttctgggaaaagtggcgatcccactgctatccatccaaaatggagaacaaaaagcatatgttcttaagaataagcagcttactggccctaccaaaggggtgatctatcttgaaatagatgtgatcttcaatgctgtgaaggcctccttacgcaccctgattcctaaagagcagaaatacatcgaagaggagaacaggctgagcaaacagcttttgttaaggaactttatccggatgaaacgctgcgtgatggtgctggtcaacgctgcatactacgttaattcctgtttcgactgggattccccccctagatcattggccgcttttgtactgtttttgtttgtggtgtggaatttcgagctgtacatgatcccactggttctgctccttcttctaacctggaactatttcctaatcattagtggaaaggacaatcgacagagggataccgtggtagaagatatgttggaggacgaggaagaggaagacgacaaggacgataaagatagcgaaaagaaggggtttattaacaagatttacgcaattcaggaggtgtgcgtgtcagttcagaatatactggacgaggttgctagcttcggcgaacgcatcaaaaatacatttaactggacggtacctttcttgtcttggttggcgatcgtggctttgtgtgtgttcacagccatcctgtattgtatacccctgagatacatcgtgcttgtgtgggggattaacaaattcactaagaagcttaggtccccgtatgcgattgataacaatgagctcctagatttcctctcaagagtaccctcggatgtccaggtggtacaataccaagagctgaagcccgatccatcccactcaccctacaagcggaagaaaaacaacctcggctag

SEQ ID NO: 216473 - protein, 145 aa, Artificial Sequence
  derived and/or modified sequence
MESKSPWSLRLLICCAAMVAIALLPQQGGQAACFVPTPGPAPAPPGSSATNTNASSAAPRPAKPSAFPPPMYGGVTPGTGSLQPHECGGRCAERCSATAYQKPCLFFCRKCCAACLCVPPGTYGNKNTCPCYNNWKTKRGGPKCP

SEQ ID NO: 216474 - protein, 729 aa, Artificial Sequence
  derived and/or modified sequence
MFSALKKLVGSDQAPGRDKNIPAGLQSMNQALQRRFAKGVQYNMKIVIRGDRNTGKTALWHRLQGRPFVEEYIPTQEIQVTSIHWSYKTTDDIVKVEVWDVVDKGKCKKRGDGLKMENDPQEAESEMALDAEFLDVYKNCNGVVMMFDITKQWTFNYILRELPKVPTHVPVCVLGNYRDMGEHRVILPDDVRDFIDNLDRPPGSSYFRYAESSMKNSFGLKYLHKFFNIPFLQLQRETLLRQLETNQLDMDATLEELSVQQETEDQNYGIFLEMMEARSRGHASPLAANGQSPSPGSQSPVVPAGAVSTGSSSPGTPQPAPQLPLNAAPPSSVPPVPPSEALPPPACPSAPAPRRSIISRLFGTSPATEAAPPPPEPVPAAEGPATVQSVEDFVPDDRLDRSFLEDTTPARDEKKVGAKAAQQDSDSDGEALGGNPMVAGFQDDVDLEDQPRGSPPLPAGPVPSQDITLSSEEEAEVAAPTKGPAPAPQQCSEPETKWSSIPASKPRRGTAPTRTAAPPWPGGVSVRTGPEKRSSTRPPAEMEPGKGEQASSSESDPEGPIAAQMLSFVMDDPDFESEGSDTQRRADDFPVRDDPSDVTDEDEGPAEPPPPPKLPLPAFRLKNDSDLFGLGLEEAGPKESSEEGKEGKTPSKEKKKKKKKGKEEEEKAAKKKSKHKKSKDKEEGKEERRRRQQRPPRSRERTAADELEAFLGGGAPGGRHPGGGDYEEL

SEQ ID NO: 216475 - protein, 520 aa, Artificial Sequence
  derived and/or modified sequence
MFSALKKLVGSDQAPGRDKNIPAGLQSMNQALQRRFAKGVQYNMKIVIRGDRNTGKTALWHRLQGRPFVEEYIPTQEIQVTSIHWSYKTTDDIVKVEVWDVVDKGKCKKRGDGLKMENDPQEAESEMALDAEFLDVYKNCNGVVMMFDITKQWTFNYILRELPKVPTHVPVCVLGNYRDMGEHRVILPDDVRDFIDNLDRPPGSSYFRYAESSMKNSFGLKYLHKFFNIPFLQLQRETLLRQLETNQLDMDATLEELSVQQETEDQNYGIFLEMMEARSRGHASPLAANGQSPSPGSQSPVVPAGAVSTGSSSPGTPQPAPQLPLNAAPPSSVPPVPPSEALPPPACPSAPAPRRSIISRPPPWGWRLRGALGRRGQWPPWGGGRACHCLGRHLPLYHRLCRCPVAAVCASELEEAGHWWSPGWALQVLGLQAQCEPALQEGRGQLASARLGGHPGPLGAEPPVFLRDVTEAQEGPVRVCLQRLGRGRLAVGCALPRHLLALRAHLGPQHAYGSASGREP

SEQ ID NO: 216476 - protein, 614 aa, Artificial Sequence
  derived and/or modified sequence
MENDPQEAESEMALDAEFLDVYKNCNGVVMMFDITKQWTFNYILRELPKVPTHVPVCVLGNYRDMGEHRVILPDDVRDFIDNLDRPPGSSYFRYAESSMKNSFGLKYLHKFFNIPFLQLQRETLLRQLETNQLDMDATLEELSVQQETEDQNYGIFLEMMEARSRGHASPLAANGQSPSPGSQSPVVPAGAVSTGSSSPGTPQPAPQLPLNAAPPSSVPPVPPSEALPPPACPSAPAPRRSIISRLFGTSPATEAAPPPPEPVPAAEGPATVQSVEDFVPDDRLDRSFLEDTTPARDEKKVGAKAAQQDSDSDGEALGGNPMVAGFQDDVDLEDQPRGSPPLPAGPVPSQDITLSSEEEAEVAAPTKGPAPAPQQCSEPETKWSSIPASKPRRGTAPTRTAAPPWPGGVSVRTGPEKRSSTRPPAEMEPGKGEQASSSESDPEGPIAAQMLSFVMDDPDFESEGSDTQRRADDFPVRDDPSDVTDEDEGPAEPPPPPKLPLPAFRLKNDSDLFGLGLEEAGPKESSEEGKEGKTPSKEKKKKKKKGKEEEEKAAKKKSKHKKSKDKEEGKEERRRRQQRPPRSRERTAADELEAFLGGGAPGGRHPGGGDYEEL

SEQ ID NO: 216477 - protein, 471 aa, Artificial Sequence
  derived and/or modified sequence
MTVGTVKIVIRGDRNTGKTALWHRLQGRPFVEEYIPTQEIQVTSIHWSYKTTDDIVKVEVWDVVDKGKCKKRGDGLKMENDPQEAESEMALDAEFLDVYKNCNGVVMMFDITKQWTFNYILRELPKVPTHVPVCVLGNYRDMGEHRVILPDDVRDFIDNLDRPPGSSYFRYAESSMKNSFGLKYLHKFFNIPFLQLQRETLLRQLETNQLDMDATLEELSVQQETEDQNYGIFLEMMEARSRGHASPLAANGQSPSPGSQSPVVPAGAVSTGSSSPGTPQPAPQLPLNAAPPSSVPPVPPSEALPPPACPSAPAPRRSIISRLFGTSPATEAAPPPPEPVPAAEGPATVQSVEDFVPDDRLDRSFLEDTTPARDEKKVGAKAAQQDSDSDGEALGGNPMVAGFQDDVDLEDQPRGSPPLPAGPVPSQDITLSSEEEAEVAAPTKGPAPAPQQCSEPETKWSGEAQQHQAPC

SEQ ID NO: 216478 - protein, 448 aa, Artificial Sequence
  derived and/or modified sequence
MSHRAWLALLPLEVDGDDGLCGAGGPEHSGSSQPQQQQQRAPCHLRASGRGRGARLLTRLLPFSFLEMMEARSRGHASPLAANGQSPSPGSQSPVVPAGAVSTGSSSPGTPQPAPQLPLNAAPPSSVPPVPPSEALPPPACPSAPAPRRSIISRLFGTSPATEAAPPPPEPVPAAEGPATVQSVEDFVPDDRLDRSFLEDTTPARDEKKVGAKAAQQDSDSDGEALGGNPMVAGFQDDVDLEDQPRGSPPLPAGPVPSQDITLSSEEEAEVAAPTKGPAPAPQQCSEPETKWSSIPASKPRRGTAPTRTAAPPWPGGVSVRTGPEKRSSTRPPAEMEPGKGEQASSSESDPEGPIAAQMLSFVMDDPDFESEGSDTQRRADDFPVRDDPSDVTDEDEGPAEPPPPPKLPLPAFRLKNDSDLFGLGLEEAGPKESSEEGKEGKTPSKEK

SEQ ID NO: 216479 - DNA, 474 bp, Artificial Sequence
  derived and/or modified sequence
atgcatccctggttgggcagcgcccttggcttccctaaatgtcgagggatacatctgtgcgcctgtggaaatggctggactcccggagagaccctgtcccagaacaagactgagattaccaagaacaaagtgacctgctggagaccccacgggtgcgaaccaaacacgggcctggggtatcagggttcccacaccagcaagtataccctactgccttggaacctgttaaaaaccaagcccctcccccctagccatggcaaagaagggggaaaagaggccaaggttccatcgggtgataattcagggagaggcgaggtcccacgggctcaggagggccaggctgcatgtggccgagccgcttctggtgattcccaagaggggatgagacgaggatatgaggagcgtgccacggctcagcggcctgctgtccggtccgccgagacgacagcgcacggaacatggatctacccttag

SEQ ID NO: 216480 - DNA, 474 bp, Artificial Sequence
  derived and/or modified sequence
atgcatccctggctggggtctgcccttggctttcctaagtgtagggggatacacctgtgcgcatgcggtaacggttggacacctggtgaaacactttctcagaataagacggaaataacaaagaataaggtcacatgttggagaccccatggctgtgagcctaacacgggcctcggctatcaaggatcccacacttctaagtataccctgctgccttggaacctgctcaagacaaagccactgccccccagccacggcaaggaaggcggcaaagaggctaaagtacctagtggtgataacagtggcagaggcgaagtaccacgggcacaggaagggcaagccgcttgcggcagagccgcttctggcgactcccaagagggaatgagaagagggtacgaggaacgcgctaccgctcagcgtcccgccgtgagaagcgcagagactactgctcacgggacctggatctacccctag

SEQ ID NO: 216481 - DNA, 474 bp, Artificial Sequence
  derived and/or modified sequence
atgcatccctggctggggtctgcccttggctttcctaagtgtagggggatacacctgtgcgcatgcggtaacggttggacacctggtgaaacactttctcagaataagacggaaataacaaagaataaggtcacatgttggagaccccatggctgtgagcctaacacgggcctcggctatcaaggatcccacacttctaagtataccctgctgccttggaacctgctcaagacaaagccactgccccccagccacggcaaggaaggcggcaaagaggctaaagtacctagtggtgataactctggacgcggagaggtccccagagcacaggaagggcaggccgcatgtggaagagctgcctctggcgattctcaagaaggtatgcggagaggatatgaggagcgggccacggcacagcgtccagcagtgagatctgccgaaaccactgcccacggaacatggatttacccttag

SEQ ID NO: 216482 - DNA, 1197 bp, Artificial Sequence
  derived and/or modified sequence
actaccctgtggtccctgaggagcattacactgagaagttttctcctattttgtctttcattctccacatcctcttttgttctagtgcatggcatgggaagccctctctaggaggatgctgtggccacacaagtgctggacgaaccgctggagtaggtgacttccaaggtgtcctgatgtagtagctattagacaagctcctgcatttggccagtaattagcatgctgctgcacattgccactaggtggtgctgctgctccattcccaagtaacccacatgcatccctggctggggtcagccttggggtttcccaagtgtagaggaatccatctctgtgcctgtggtaatggctggacaccaggtgagaccctgtctcaaaacaaaacagaaataacaaaaaataaggtgacttgctggaggccacatggctgtgagccaaatacaggtctgggttatcagggctcacatacttctaagtacaccctactgccttggaatctgctgaagaccaagcccctgcccccaagccatggcaaagaaggagggaaggaagcaaaggtgcccagcggggacaactcggggaggggcgaggtgcccagggcccaggaaggccaagcagcatgtggcagggcagcatcaggtgactcccaagaaggaatgaggagaggatatgaggaaagagccacagcacagaggcctgctgttaggtcagcggagaccacggcccatgggacctggatctacccttgatgctaacaatgttctttggggaaaaaatctataatcacaaagtttctgcaactggactgtagtcatggttgcagaactgtatagatttactaggaaccatcaaattgttcacttacaatgggtaaattgtacagtacataggttatccctcagtaaagctgtatgaaatttatagtcatgaaactaatagtgacaaacgagctgggtaagtaggtctcagctgttctgtaggcactttgagaagaggaagagtagcatctcggttttaataaaagaaagcctggcccatggcgtccagcttctgcttgaatactttcagtgcccgggagctcagtatctcaaagcagcccactcctgtttaagagaactctaaaccttagaatgttgaaatacatcattattattctagtactgctgtgaaaaataaatgtctttgttttgccac

SEQ ID NO: 216483 - DNA, 474 bp, Artificial Sequence
  derived and/or modified sequence
atgcacccctggctgggcagcgccctgggcttccccaagtgcagaggcatccacctgtgcgcctgcggcaacggctggacccccggcgagaccctgagccagaacaagaccgagatcaccaagaacaaggtgacctgctggagaccccacggctgcgagcccaacaccggcctgggctaccagggcagccacaccagcaagtacaccctgctgccctggaacctgctgaagaccaagcccctgccccccagccacggcaaggagggcggcaaggaggccaaggtgcccagcggcgacaacagcggcagaggcgaggtgcccagagcccaggagggccaggccgcctgcggcagagccgccagcggcgacagccaggagggcatgagaagaggctacgaggagagagccaccgcccagagacccgccgtgagaagcgccgagaccaccgcccacggcacctggatctacccctag

SEQ ID NO: 216484 - DNA, 474 bp, Artificial Sequence
  derived and/or modified sequence
atgcacccctggttagggtcagccctcggattcccgaaatgcaggggaattcatctgtgtgcatgcggcaacggttggacccctggcgagacgctttcccaaaacaaaacggaaattaccaagaataaggtcacttgctggaggcctcatgggtgcgaacccaataccggtctcggatatcaaggcagtcatactagtaaatacacactcttaccctggaacttgctcaagaccaaaccactcccccccagccacggcaaggaaggtggcaaggaggccaaggtgccctcaggcgacaactcgggccgcggagaggtccccagggcgcaggagggacaggctgcttgtgggcgcgccgccagcggagattcacaggagggaatgcgccggggctacgaggaaagagcaacagcacagcgtcctgccgtgcggagtgctgagacaacagcccatggcacctggatatacccctag

SEQ ID NO: 216485 - DNA, 474 bp, Artificial Sequence
  derived and/or modified sequence
atgcacccctggctgggcagcgccctgggcttccccaagtgccggggcatccacctgtgtgcctgtggaaatggctggaccccaggagagaccctgagccagaacaagacagagatcaccaagaacaaggtgacctgctggaggccccacggctgtgagcccaacacaggcctgggctaccagggcagccacaccagcaagtacaccctgctgccctggaacctgctgaagaccaagcccctgccccccagccacggcaaggagggcggcaaggaggccaaggtgcccagcggggacaacagcggccgcggggaggtgccccgggcccaggagggccaggccgcctgtggccgggccgccagcggggacagccaggagggcatgagaagaggctatgaggagcgggccacagcccagaggcctgctgtgcgctctgctgagaccacagcccacggcacctggatctacccctag

SEQ ID NO: 216486 - DNA, 474 bp, Artificial Sequence
  derived and/or modified sequence
atgcacccctggctgggcagcgccctgggcttccccaagtgccggggtatccacctttgcgcctgcggcaatgggtggacgccaggagagacactcagtcagaacaagaccgagatcaccaaaaacaaggtgacatgctggcgacctcacggttgtgagcccaacacaggcttgggatatcagggctcacatacaagcaaatacactcttctgccctggaatctgctgaaaaccaaaccacttcccccctcacacggcaaggagggggggaaggaggccaaagtaccatctggtgacaattccgggcggggtgaagtcccgcgagctcaggagggtcaggctgcctgtggtcgcgcagcttctggagactctcaggaggggatgagacgcgggtatgaggagcgggccaccgcccagcgtcccgctgtccgttctgcagaaactactgctcatggcacctggatttacccatag

SEQ ID NO: 216487 - DNA, 474 bp, Artificial Sequence
  derived and/or modified sequence
atgcacccctggctgggcagcgccctgggcttccccaagtgcagaggcatccacctgtgcgcctgcggcaacggctggacccccggcgagaccctgagccagaacaagaccgagatcaccaagaacaaggtgacctgctggagaccccacggctgcgagcccaacaccggcctgggctaccagggcagccacaccagcaagtacaccctgctgccctggaacctgctgaagaccaagcccctgccccccagccacggcaaggagggcggcaaggaggccaaggtgcccagcggcgacaacagcggcagaggcgaggtgcccagagcccaggagggccaggccgcctgcggcagagccgccagcggcgacagccaggagggcatgagaagaggctgcgaggagagagccaccgcccagagacccgccgtgagaagcgccgagaccaccgcccacggcacctggatctacccctag

SEQ ID NO: 216488 - DNA, 474 bp, Artificial Sequence
  derived and/or modified sequence
atgcatccttggctgggcagcgctcttgggtttcctaagtgccgtggcatccacctgtgtgcttgcggcaacgggtggacccctggggagactctctcccagaacaaaaccgaaattaccaaaaacaaagtgacctgctggaggccacacggatgcgaacccaatacggggctgggttatcaaggttcacacacaagcaaatacaccttgttgccttggaatttattgaagactaagccactgcccccaagtcacggtaaggaggggggcaaagaggccaaggtgccatcaggtgacaattctgggcggggagaggtgccccgagcccaggagggccaggctgcctgcggaagggccgctagcggagatagccaggaaggaatgagaaggggctgcgaagagcgcgctacggcacagcgcccggccgtgagatctgctgaaactactgcacacggcacctggatctatccctag

SEQ ID NO: 216489 - DNA, 474 bp, Artificial Sequence
  derived and/or modified sequence
atgcacccctggctgggcagcgccctgggcttccccaagtgccggggtatccatctgtgcgcctgcggcaatggctggacgcccggggaaaccctgagtcagaataaaaccgaaatcaccaaaaacaaggtgacatgctggaggcctcatggctgcgaaccaaacacaggcctcgggtatcagggctcacatactagcaagtataccctcttaccttggaatctcctgaagaccaagccattaccgccctcacatggaaaagaaggcggcaaggaagccaaagtgccatcaggagacaactcagggcgaggcgaggtccctcgagctcaagagggccaggcggcgtgtggtcgggctgcctccggggactctcaggaaggaatgaggcgaggctgtgaggagcgcgcaaccgctcaacgtccagcagttaggtcagccgagactaccgcccacggaacctggatctatccttag

SEQ ID NO: 216490 - DNA, 474 bp, Artificial Sequence
  derived and/or modified sequence
atgcacccgtggctgggcagcgcactcggattccctaaatgcagaggcatccatctttgcgcgtgcggaaacggctggacacccggagagacacttagccaaaacaaaacagaaattacaaagaacaaagtgacatgctggaggccccacggatgtgaacctaataccggactggggtaccaagggagccacacgtctaaatacacactcctgccctggaacctgctcaaaacaaaaccgcttcctccgtcgcatgggaaggaggggggtaaggaagcaaaagtgccatcaggcgacaactctggcagaggagaggtcccccgagcacaagaaggccaagcggcttgtgggagggcagctagtggcgactcacaggaagggatgcgaagaggatgcgaggagcgggctactgcacagcgccctgctgtgagaagcgctgagaccaccgcgcatggaacgtggatctatccatag

SEQ ID NO: 216491 - DNA, 2190 bp, Artificial Sequence
  derived and/or modified sequence
atgttctccgctctgaagaagctggttggctccgaccaggctcctggcagggacaagaatatccccgcggggctacagtctatgaatcaggccctgcagcggcgttttgccaagggcgtgcagtacaacatgaaaattgtgatcaggggcgaccgtaacacaggtaaaactgccctgtggcatagactgcagggtcgtccctttgtagaagaatacatccctacccaggagattcaggtgaccagtattcactggagttacaaaaccacagatgatattgtcaaggtggaggtttgggacgtggtagataagggtaagtgcaagaaaagaggagacggcctgaagatggagaacgaccctcaggaggcggagagtgagatggctttggatgccgaattccttgacgtatataagaattgtaatggcgtagtcatgatgtttgatataacaaagcagtggaccttcaattatatacttcgtgagctgccaaaggtgcctacgcacgtgccagtctgtgtgctggggaactatcgtgatatgggcgaacaccgcgtaattttgcctgacgatgtgcgtgacttcattgacaatttggaccggccccctggatccagctactttaggtatgccgagtcttcgatgaaaaacagttttggcttaaagtatctgcacaagttctttaatataccctttctgcaactgcagcgggaaaccctcttaaggcagctggagaccaatcaactggacatggacgctaccctggaagagctctctgtccagcaggagacagaagatcagaactatggcatcttcttggagatgatggaggcaaggtctcgtgggcacgcttcccccctggccgcgaatggacagtcgccttctccaggctcacagagccccgtagtgcctgcaggagctgtgtcaacaggttctagcagcccaggcacccctcaacctgccccacaactgcctctgaacgccgctccaccttcaagcgttcccccagtgcccccatccgaagcactcccacccccagcatgtcctagcgcccccgcaccacgacggtcaattatttcacgcttgttcggaacctctccggcgaccgaggcagctcctcctccgccggagccggtccccgccgccgaggggcctgcgaccgtccagtctgtggaagattttgttccagacgatcggctggaccggtccttcctggaggacacaactcccgcccgagacgaaaagaaggtgggagcaaaagccgcacagcaggattctgactctgatggggaggcattaggggggaaccccatggtggcaggcttccaggacgacgtggacttagaagatcagccccgcggcagtcctccccttcccgccgggcctgtaccatcgcaggatattacccttagcagcgaagaggaggctgaagtcgccgcccccaccaaaggacccgccccagctcctcagcagtgttctgagccagagaccaaatggtcaagtattcctgcttcgaagccgagaagagggacggctcctactcgcacggctgcccctccttggcccgggggcgtgtcagtaagaaccggccccgagaagcgcagttcgacccgcccccccgccgaaatggaaccgggaaagggcgagcaggcttcaagctccgagagtgatccggaaggacccattgcagcccagatgctgagttttgtgatggatgacccagactttgaatctgaaggaagcgatacacaacgccgagccgatgacttccctgtgagggacgatccatctgatgtgaccgacgaggacgaagggcccgctgagcctccccccccaccaaaactccccttacccgcattccgactgaagaacgactctgacttgttcggattaggtcttgaggaggcaggccccaaagaatccagcgaggagggcaaagaagggaagacgccctctaaagaaaaaaagaagaagaagaaaaaagggaaagaggaagaggaaaaagccgccaaaaagaaaagtaagcataaaaagagtaaggacaaggaagaaggaaaagaggagcgcagacgccgtcagcagcgcccacccagatctagggagaggactgctgccgacgaactggaggcgttcctgggtgggggagcccccggcggccggcacccgggtggcggcgattacgaggagctgtag

SEQ ID NO: 216492 - DNA, 1563 bp, Artificial Sequence
  derived and/or modified sequence
atgttcagcgcgctgaagaagctggtgggcagtgatcaggcccccggccgcgataaaaacatccctgccggactacaaagcatgaatcaggctttacagagacgattcgcaaagggggtgcagtataacatgaaaatcgtgatccgaggagaccgcaatactggaaaaaccgcactctggcatcgtttacagggaagacctttcgtcgaggagtatatccctactcaagaaatccaggtgaccagcattcactggagctacaaaacaactgatgacatcgtgaaggtggaagtctgggatgtggtggataaggggaagtgtaaaaagaggggcgatggtctgaaaatggaaaatgatccccaggaagcagaatccgagatggcgctggacgctgaatttctggacgtttataaaaattgtaacggcgttgtcatgatgtttgacataaccaagcagtggacgttcaactatatcctgagggaactgccgaaagtccctactcacgtccccgtgtgcgtccttggaaattatcgggacatgggtgagcatagggtaatactgccagacgacgtgcgtgacttcatcgataatttggatcgcccgcccggttcttcctatttccgctacgccgagtccagtatgaagaactcattcgggctgaagtatctgcacaaattctttaatatacccttcctgcagctgcagcgggagacgctgctccggcagcttgagaccaaccagctggacatggatgccacattagaggagttatccgttcagcaggagaccgaagaccagaattacggtatatttcttgaaatgatggaagcgagaagtcgcggtcacgcatctcccttggcagcaaatgggcagtctccatctccaggctcacaatcgcccgtcgtgccagccggtgctgtgagtaccggttcctcaagccctggcaccccccagcctgcaccccagctccccctgaatgcggccccgcccagtagcgtcccccctgtccccccaagcgaggctctgccaccaccagcttgcccctctgctcctgccccccgcagaagcataataagccggcctcccccctggggctggcgcctgagaggagccctcggaagaagagggcagtggcccccttggggcggaggacgggcctgtcactgtttaggcagacacctgccgctgtaccaccgcttatgccgatgccccgttgccgcagtctgcgcttctgagctggaagaggctggccactggtggtctccgggctgggcgctgcaggtactgggcctccaggcgcagtgcgagcccgccttgcaggagggccgagggcagctggctagtgcccggctgggtgggcaccctgggccacttggcgccgaacctcccgtgtttctgagagacgtgacagaggctcaggagggacccgtccgcgtatgcctgcagcggttgggccgcgggaggctcgccgtgggatgcgctctgccccgccatctcctagcactgagagctcatcttggtcctcaacacgcttacggatccgcatctgggagagaaccctag

SEQ ID NO: 216493 - DNA, 1845 bp, Artificial Sequence
  derived and/or modified sequence
atggaaaacgatccgcaggaggcagagtccgagatggctctggatgcagaattcctggatgtctacaaaaattgcaatggtgttgtgatgatgtttgacatcaccaagcagtggacttttaattatatcttgagagagctccccaaagtacctacgcacgttccagtgtgtgtgctgggcaactacagagacatgggcgagcacagagttatacttccagacgatgtgagagactttatcgacaacctagaccgtccgcccggttcgtcttatttcaggtacgcagagtcctcaatgaagaacagctttggcctgaaatatctgcacaaatttttcaacatcccttttctacaactgcagcgtgagaccctgttgaggcaacttgaaaccaatcagctagacatggacgccacactcgaggaattgtccgtgcagcaggaaactgaggaccagaactacgggattttcctcgaaatgatggaggccaggtcccgaggtcacgccagtccactcgccgccaacgggcaaagcccctcccctggatcccagagcccggttgttcccgctggagccgtaagtaccggctcgagcagtcccggaacccctcagccagctccacaactccctctgaacgccgcgccaccaagtagtgtgcccccagttccacctagtgaggccctgcccccgcccgcatgcccgtctgcacctgcaccccggcgctcgattatcagtcgactgttcgggactagtccagctacagaggccgcacccccacctcctgaacctgtcccggccgctgagggccccgcgacggtccagtcggtggaagatttcgttccagacgatcgattggaccggtctttcttagaggacactacacctgcccgagacgaaaagaaagttggggctaaggcggcccaacaggactcagactcggatggggaagccctcgggggcaatccaatggtggccgggttccaggacgacgtcgaccttgaggaccagccacgcggtagccctccgttacccgcgggcccggtgccaagccaggatattacacttagttctgaggaggaagcagaggtggccgcacctacaaaggggccagcccccgcgccccagcagtgcagcgaacctgagaccaaatggagcagcattccagcgagcaagccccggcgtggtacggcgccaacccggacagccgcgcctccatggcctggtggggtaagcgtacgtacaggccctgagaagcgcagttccacacgtccaccagccgagatggagcccgggaagggcgagcaagctagctcttctgaatccgatcctgagggccctatcgctgcacagatgttgtcatttgttatggatgatcccgatttcgaatcggaggggtccgatactcagagacgcgccgatgacttccccgttcgggacgatccttctgacgtgactgacgaagacgaggggcccgctgaacccccccctcctccaaaactgcctttgcccgcattccgattgaagaatgactcagacttgtttggcctaggtcttgaagaagccggcccgaaggagtcctcagaggagggtaaggagggaaaaacacccagtaaagaaaaaaagaaaaaaaagaagaagggtaaagaagaggaagaaaaggctgccaagaaaaaatcaaagcataaaaaatctaaggacaaggaggagggaaaggaggagcggcgtcggcggcaacagcgtccgccacgctcacgtgaaagaacagctgctgacgaactggaagctttcctaggcggtggcgccccaggagggcgccatcctggtggaggagactacgaggaattgtag

SEQ ID NO: 216494 - DNA, 1416 bp, Artificial Sequence
  derived and/or modified sequence
atgaccgtgggaacagtgaaaattgtcataagaggagatcggaataccgggaagacggccttgtggcatagactgcagggacgcccttttgtcgaagagtacattcctactcaggagattcaggtaactagcattcactggtcgtataaaacaaccgacgatattgttaaagtagaggtgtgggacgtcgtcgataagggcaaatgtaagaagcggggtgatggactgaagatggagaatgatccgcaagaggccgagtccgaaatggcactggacgccgaattcctcgacgtctacaaaaattgtaacggagtagtgatgatgtttgacatcacaaaacagtggacctttaactacatcctgcgcgaactgccaaaagtgcccactcacgtgcctgtatgtgttctggggaactacagagatatgggcgaacaccgcgtgatcctgccagatgatgtgcgggacttcattgacaatctggacaggccccccggttcctcatacttccgatacgctgagtcatccatgaagaactctttcgggctgaagtacctgcacaaatttttcaatataccttttcttcaactccagcgtgagacactactaagacagctggagaccaaccagctagatatggatgctaccttggaagagctatctgtacagcaggagaccgaagatcagaactacggaatttttctggaaatgatggaggctaggtcaaggggtcatgcgagtccactcgcagctaatggacagagtccctcacccggctctcagagcccagtcgtgcccgcgggtgcagtctcgactggcagctcatctccaggcactcctcagcctgctccccaactgccgctgaatgcagcccctccctcgagtgtaccccctgtgcctccctcagaggcactgcccccacccgcatgcccaagtgccccggcacccagacgatccattattagccggctttttggtaccagccccgccacggaagccgctccccccccaccggagcctgtgcccgccgcggagggcccagcaacagtgcagagtgtcgaagatttcgtgcctgacgatagactggaccgctccttcctggaggacaccacccccgcaagggacgaaaagaaggtgggcgcaaaggctgctcagcaggattccgactcagatggagaagccctcggggggaatcccatggtcgcggggttccaagacgatgtggatctggaagatcagcctcggggcagtcctccactgcctgctggccccgtgccatcccaggacatcaccctcagttctgaagaggaggcggaggtggcggccccaaccaaagggcccgcaccggcaccccagcaatgctcagaacctgaaacaaaatggtcgggcgaagcccagcagcaccaggcgccttgttag

SEQ ID NO: 216495 - DNA, 1347 bp, Artificial Sequence
  derived and/or modified sequence
atgtcacacagagcatggctagctctgttacccttggaggtggatggagacgacggcctctgcggcgccggaggtcccgagcattctgggtcctcccagccacaacagcagcaacaacgggctccctgccacctccgggcctcaggcagaggacgcggagcccgcttgttaacccgcttattgccgttctctttcctggaaatgatggaggcccgctccagggggcatgctagccctctggctgctaatggccagtccccctctcccggctctcagagccccgttgttccggccggtgcagttagcacgggctccagtagcccaggtacgccccagccagcccctcagctccctctcaatgccgcacccccttcctccgttcccccagtccctccttcggaagctctgccaccccccgcatgtccttcagcacccgcgcccagaagatccattatctcgcggctgttcgggacatctccagcgacggaggcggcccctccaccacctgagcctgttcctgccgccgaggggcctgccactgtacagtcagtggaagattttgtgccagatgataggcttgacagatcattcctcgaggacaccacacccgctagagacgagaaaaaggtgggggctaaggctgcgcagcaagattccgatagtgatggggaggctcttggaggaaacccaatggtggccggcttccaggatgacgtcgacctggaggatcagcctagggggtctcctcctttgccagccggccctgtcccctctcaggacattaccctctcctccgaggaggaggccgaggttgccgcccctacgaagggccccgccccagctccccaacaatgttctgagcccgagaccaaatggtctagcattcctgcctccaagcctaggcgagggactgcacctactcgtaccgctgctcctccctggcccggcggcgtgtctgtacgcacggggccagagaagcgcagcagcacacgccctccggccgaaatggagcccggcaaaggcgagcaggcctcttcttccgagtccgaccctgagggcccaatagccgcccagatgttatcattcgtgatggatgaccctgactttgagagtgaaggaagcgacacacagcggagggcagacgactttccagtacgggatgaccccagtgatgtaaccgatgaagacgaagggccagccgaaccaccaccaccaccaaaactgcctcttccggccttcaggctgaaaaacgactctgacctgtttggcttaggcctggaagaggccgggcctaaggaaagctcagaagagggtaaggagggaaagaccccctccaaggagaaatag

SEQ ID NO: 216496 - DNA, 2190 bp, Artificial Sequence
  derived and/or modified sequence
atgttttctgccctgaagaagctggtgggcagtgaccaggcccctggccgggacaagaacatcccagctggcctgcagagcatgaaccaggccctgcagaggagatttgccaagggcgtgcagtacaacatgaagatcgtcatccggggggacaggaacacaggcaagacagccctgtggcaccggctgcagggccggccctttgtggaggagtacatccccacccaggagatccaggtgaccagcatccactggagctacaagaccacagatgacatcgtgaaggtggaggtgtgggatgtggtggacaagggcaagtgcaagaagagaggagatggcctgaagatggagaatgacccccaggaggccgagagcgagatggccctggatgctgagttcctggatgtgtacaagaactgcaatggagtggtgatgatgtttgacatcaccaagcagtggaccttcaactacatcctgcgggagctgcccaaggtgcccacccacgtgcctgtgtgtgtgctgggcaactacagagacatgggagagcacagggtcatcctgcctgatgatgtgcgggacttcatcgacaacctggacaggcctcctggcagcagctacttccgctatgcagagagctccatgaagaacagctttggcctgaagtacctgcacaagttcttcaacatccccttcctgcagctgcagcgggagaccctgctgcggcagctggagaccaaccagctggacatggatgccaccctggaggagctgtctgtgcagcaggagacagaggaccagaactacggcatcttcctggagatgatggaggcccggagccggggccacgccagccccctggccgccaacggccagagccccagccctggcagccagagccctgtggtgcctgctggagctgtgtccacaggcagcagcagccctggcaccccccagcctgccccccagctgcccctgaatgctgccccacccagctctgtgccccctgtgcccccatctgaggccctgcccccaccagcctgccccagcgccccagccccccggcgcagcatcatcagccggctgtttggcaccagccctgccacagaggccgcccctcctcctcctgagcctgtgcctgctgctgagggccctgccaccgtgcagagcgtggaggactttgtgcctgatgaccggctggacaggagcttcctggaggacaccaccccagccagagatgagaagaaggtgggcgccaaggccgcccagcaggacagcgacagtgatggagaggccctgggcggcaaccccatggtggccggcttccaggatgatgtggacctggaggaccagccccggggcagcccccccctgcctgctggccctgtgcccagccaggacatcaccctgagcagcgaggaggaggccgaggtggccgcccccaccaagggccctgccccagccccccagcagtgcagcgagcctgagaccaagtggagcagcatcccagccagcaagccccggcggggcacagcccccaccaggacagctgccccaccctggccaggaggagtgtctgtgaggacaggccctgagaagaggagcagcacccggcccccagctgagatggagcccgggaagggggagcaggccagcagcagcgagagtgaccctgagggccccatcgccgcccagatgctgagctttgtgatggatgatcctgactttgaaagtgagggcagtgacacccagaggagagcagatgacttccctgtgagagatgaccccagtgatgtgacagatgaagatgagggccctgctgagcccccacctccacccaagctgcccctgcctgccttccggctgaagaatgacagcgacctgtttggcctgggcctggaggaggccggccccaaggagagcagcgaggagggcaaggagggcaagacccccagcaaggagaagaagaagaagaagaagaagggcaaggaggaggaggagaaggccgccaagaagaagagcaagcacaagaagagcaaggacaaggaggagggcaaggaggagaggagaagacggcagcagaggcctcccaggagccgggagaggacagctgctgatgagctggaggccttcctgggcggcggggcccctgggggccgccaccctgggggcggggactatgaggagctgtag

SEQ ID NO: 216497 - DNA, 1563 bp, Artificial Sequence
  derived and/or modified sequence
atgttttctgccctgaagaagctggtgggcagtgaccaggcccctggccgggacaagaacatcccagctggcctgcagagcatgaaccaggccctgcagaggagatttgccaagggcgtgcagtacaacatgaagatcgtcatccggggggacaggaacacaggcaagacagccctgtggcaccggctgcagggccggccctttgtggaggagtacatccccacccaggagatccaggtgaccagcatccactggagctacaagaccacagatgacatcgtgaaggtggaggtgtgggatgtggtggacaagggcaagtgcaagaagagaggagatggcctgaagatggagaatgacccccaggaggccgagagcgagatggccctggatgctgagttcctggatgtgtacaagaactgcaatggagtggtgatgatgtttgacatcaccaagcagtggaccttcaactacatcctgcgggagctgcccaaggtgcccacccacgtgcctgtgtgtgtgctgggcaactacagagacatgggagagcacagggtcatcctgcctgatgatgtgcgggacttcatcgacaacctggacaggcctcctggcagcagctacttccgctatgcagagagctccatgaagaacagctttggcctgaagtacctgcacaagttcttcaacatccccttcctgcagctgcagcgggagaccctgctgcggcagctggagaccaaccagctggacatggatgccaccctggaggagctgtctgtgcagcaggagacagaggaccagaactacggcatcttcctggagatgatggaggcccggagccggggccacgccagccccctggccgccaacggccagagccccagccctggcagccagagccctgtggtgcctgctggagctgtgtccacaggcagcagcagccctggcaccccccagcctgccccccagctgcccctgaatgctgccccacccagctctgtgccccctgtgcccccatctgaggccctgcccccaccagcctgccccagcgccccagccccccggcgcagcatcatcagccggcccccaccctggggctggaggctgcggggggccctgggccggcggggccagtggccaccctggggcggcggccgggcctgccactgcctgggccgccacctgcccctgtaccaccggctgtgccgctgccctgtggccgctgtgtgtgccagcgagctggaggaggccggccactggtggagccctggctgggccctgcaggtgctgggcctgcaggcccagtgtgagcccgccctgcaggagggccggggccagctggccagcgcccggctgggcggccaccctggccccctgggcgctgagccccctgtgttcctgagagatgtgacagaggcccaggagggccctgtgcgggtgtgcctgcagaggctgggccggggccgcctggccgtgggctgtgccctgcccaggcacctgctggccctgcgggcccacctgggcccccagcacgcctacggcagcgccagcggccgggagccctag

SEQ ID NO: 216498 - DNA, 1845 bp, Artificial Sequence
  derived and/or modified sequence
atggagaatgacccccaggaggccgagagcgagatggccctggatgctgagttcctggatgtgtacaagaactgcaatggagtggtgatgatgtttgacatcaccaagcagtggaccttcaactacatcctgcgggagctgcccaaggtgcccacccacgtgcctgtgtgtgtgctgggcaactacagagacatgggagagcacagggtcatcctgcctgatgatgtgcgggacttcatcgacaacctggaccggcccccaggcagcagctacttccgctatgcagagagctccatgaagaacagctttggcctgaagtacctgcacaagttcttcaacatccccttcctgcagctgcagcgggagaccctgctgcggcagctggagaccaaccagctggacatggatgccaccctggaggagctgtctgtgcagcaggagacagaggaccagaactacggcatcttcctggagatgatggaggcccggagccggggccacgccagccccctggccgccaacggccagagccccagccctggcagccagagccctgtggtgcctgctggagctgtgtccacaggcagcagcagccctggcaccccccagcctgccccccagctgcccctgaatgctgccccacccagctctgtgccccctgtgccccccagcgaggccctgcccccaccagcctgccccagcgccccagcccccaggaggagcatcatcagccggctgtttggcaccagccctgccacagaagctgcccctcctcctcctgagcctgtgcctgctgctgagggccctgccaccgtgcagagcgtggaggactttgtgcctgatgaccggctggaccgctccttcctggaggacaccaccccagccagagatgagaagaaggtgggcgccaaggccgcccagcaggacagcgacagtgatggagaggccctgggcggcaaccccatggtggccggcttccaggatgatgtggacctggaggaccagccccggggcagcccccccctgcctgctggccctgtgcccagccaggacatcaccctgagcagcgaggaggaggccgaggtggccgcccccaccaagggccctgccccagccccccagcagtgcagcgagcctgagaccaagtggagcagcatcccagccagcaagccccggcggggcacagcccccaccaggacagctgccccaccctggccaggcggcgtgtctgtgaggactggacctgagaagaggagcagcaccaggcctcctgctgagatggagcctggaaaaggagagcaggccagcagcagcgagagtgaccctgagggccccatcgccgcccagatgctgagctttgtgatggatgatcctgactttgagagcgagggcagtgacacccagaggagagcagatgacttccctgtgagagatgaccccagtgatgtgacagatgaagatgagggccctgctgagcccccacctccacccaagctgcccctgcctgccttccggctgaagaatgacagcgacctgtttggcctgggcctggaggaggccggccccaaggagagcagcgaggagggcaaggagggcaagacccccagcaaggagaagaagaagaagaagaagaagggcaaggaggaggaggagaaggccgccaagaagaagagcaagcacaagaagagcaaggacaaggaggagggcaaggaggagaggagaagacggcagcagaggcctcccaggagccgggagaggacagctgctgatgagctggaggccttcctgggcggcggggcccctgggggccgccaccctgggggcggggactatgaggagctgtag

SEQ ID NO: 216499 - DNA, 1416 bp, Artificial Sequence
  derived and/or modified sequence
atgacagtgggcaccgtgaagatcgtcatccggggggacaggaacacaggcaagacagccctgtggcaccggctgcagggccggccctttgtggaggagtacatccccacccaggagatccaggtgaccagcatccactggagctacaagaccacagatgacatcgtgaaggtggaggtgtgggatgtggtggacaagggcaagtgcaagaagagaggagatggcctgaagatggagaatgacccccaggaggccgagagcgagatggccctggatgctgagttcctggatgtgtacaagaactgcaatggagtggtgatgatgtttgacatcaccaagcagtggaccttcaactacatcctgcgggagctgcccaaggtgcccacccacgtgcctgtgtgtgtgctgggcaactacagagacatgggagagcacagggtcatcctgcctgatgatgtgcgggacttcatcgacaacctggacaggcctcctggcagcagctacttccgctatgcagagagctccatgaagaacagctttggcctgaagtacctgcacaagttcttcaacatccccttcctgcagctgcagcgggagaccctgctgcggcagctggagaccaaccagctggacatggatgccaccctggaggagctgtctgtgcagcaggagacagaggaccagaactacggcatcttcctggagatgatggaggcccggagccggggccacgccagccccctggccgccaacggccagagccccagccctggcagccagagccctgtggtgcctgctggagctgtgtccacaggcagcagcagccctggcaccccccagcctgccccccagctgcccctgaatgctgccccacccagctctgtgccccctgtgcccccatctgaggccctgcccccaccagcctgccccagcgccccagccccccggcgcagcatcatcagccggctgtttggcaccagccctgccacagaggccgcccctcctcctcctgagcctgtgcctgctgctgagggccctgccaccgtgcagagcgtggaggactttgtgcctgatgaccggctggacaggagcttcctggaggacaccaccccagccagagatgagaagaaggtgggcgccaaggccgcccagcaggacagcgacagtgatggagaggccctgggcggcaaccccatggtggccggcttccaggatgatgtggacctggaggaccagccccggggcagcccccccctgcctgctggccctgtgcccagccaggacatcaccctgagcagcgaggaggaggccgaggtggccgcccccaccaagggccctgccccagccccccagcagtgcagcgagcctgagaccaagtggagcggggaggcccagcagcaccaggccccctgctag

SEQ ID NO: 216500 - DNA, 1347 bp, Artificial Sequence
  derived and/or modified sequence
atgagccaccgggcctggctggccctgctgcccctggaggtggatggagatgatggcctgtgtggggccggcggccctgagcacagcggcagcagccagccccagcagcagcagcagagggccccctgccacctgcgggccagcggccggggccgcggggcccggctgctgacccggctgctgcccttctccttcctggagatgatggaggcccggagccggggccacgccagccccctggccgccaacggccagagccccagccctggcagccagagccctgtggtgcctgctggagctgtgtccacaggcagcagcagccctggcaccccccagcctgccccccagctgcccctgaatgctgccccacccagctctgtgccccctgtgcccccatctgaggccctgcccccaccagcctgccccagcgccccagccccccggcgcagcatcatcagccggctgtttggcaccagccctgccacagaggccgcccctcctcctcctgagcctgtgcctgctgctgagggccctgccaccgtgcagagcgtggaggactttgtgcctgatgaccggctggacaggagcttcctggaggacaccaccccagccagagatgagaagaaggtgggcgccaaggccgcccagcaggacagcgacagtgatggagaggccctgggcggcaaccccatggtggccggcttccaggatgatgtggacctggaggaccagccccggggcagcccccccctgcctgctggccctgtgcccagccaggacatcaccctgagcagcgaggaggaggccgaggtggccgcccccaccaagggccctgccccagccccccagcagtgcagcgagcctgagaccaagtggagcagcatcccagccagcaagccccggcggggcacagcccccaccaggacagctgccccaccctggccaggaggagtgtctgtgaggacaggccctgagaagaggagcagcacccggcccccagctgagatggagcccgggaagggggagcaggccagcagcagcgagagtgaccctgagggccccatcgccgcccagatgctgagctttgtgatggatgatcctgactttgaaagtgagggcagtgacacccagaggagagcagatgacttccctgtgagagatgaccccagtgatgtgacagatgaagatgagggccctgctgagcccccacctccacccaagctgcccctgcctgccttccggctgaagaatgacagcgacctgtttggcctgggcctggaggaggccggccccaaggagagcagcgaggagggcaaggagggcaagacccccagcaaggagaagtag

SEQ ID NO: 216501 - DNA, 2190 bp, Artificial Sequence
  derived and/or modified sequence
atgttcagcgccctgaagaagctggtgggcagcgaccaggcccccgggcgtgacaagaatatcccagcaggcctccagtccatgaaccaagctctgcagagacgtttcgcaaaaggggtgcagtacaatatgaagattgtgattagaggcgaccgcaatacgggcaagactgcattatggcatagactgcagggccggccctttgtcgaggaatacattccaacacaggagatccaggtcactagcatccattggagctacaagactaccgacgacatcgtgaaggtggaagtgtgggacgttgtggacaagggtaaatgcaagaagcgaggagatggcctaaaaatggaaaatgacccacaggaagctgagagcgagatggcacttgatgccgagttcctagatgtatataagaactgtaatggggtggtgatgatgttcgacatcacaaaacagtggaccttcaattatatcttgagggagctgccaaaagtgcctacccatgtgcctgtgtgcgtcctcggcaactatagggacatgggcgaacaccgcgtgattctccctgacgatgtgcgggacttcatcgataatcttgatagacccccgggcagcagttacttccgctacgccgagagcagcatgaagaacagcttcggcctgaagtatctgcataagttttttaacatcccattcctacagctccagcgcgagactttgcttaggcagcttgagaccaaccagttagatatggatgctacattagaggagttgagcgtgcagcaagagaccgaggaccaaaactacggcattttcctggaaatgatggaggctaggtcgcgcgggcatgccagccctctggcggcaaacggtcagtctcccagtcctggtagccaatcaccagtggtgccagctggtgcggtgagcacaggctccagttccccaggcacgccccaacctgcgccacaattgcccctgaacgccgctcccccttcttccgtcccacccgtgccacctagtgaagccctgcccccccccgcctgcccatccgcccccgcacctcgccgtagcattatctcccgcctatttgggaccagccctgctacggaggccgcccctcccccccctgaaccagttccagcagccgaagggccagccacagtacagagcgtcgaggatttcgtccccgacgatcgtcttgataggtccttcctggaggacacaacgccagcccgggacgaaaaaaaagtgggtgcaaaggcagctcagcaggacagtgattccgatggcgaggccctcggcggaaaccctatggtcgctggctttcaggacgatgttgatctcgaggatcaacctaggggaagcccccctttgcctgcggggccagttccctcacaagatattacattatccagcgaagaggaggctgaagtcgctgctcctacaaaaggccctgcccccgctccacagcagtgcagtgagccggagacaaagtggtcttccataccggccagtaagcctcgcagaggcaccgcacccacaaggaccgccgctcccccctggcctggtggcgtgagcgtcagaacaggaccagagaagcgctcctctacccgccctcctgccgagatggagccgggtaaaggggagcaagcatcctcaagcgagtcagacccagagggccccatcgcggcccagatgttgagtttcgtgatggacgaccccgactttgagtctgagggctccgatactcagcggcgtgccgatgactttcccgtcagagacgacccatcagacgtgacggatgaagacgaaggtcctgccgagccaccgcctccgcccaagcttcctcttcctgctttcagactaaaaaacgattcagacttgtttggactcgggctggaggaagccgggcccaaagagtccagcgaagagggtaaagaaggcaagaccccctccaaggagaaaaaaaagaaaaagaaaaagggcaaagaggaggaagaaaaagccgcaaagaaaaaatctaagcacaagaagagtaaagacaaagaggaaggaaaagaagagcgacggagaagacagcaacgaccaccaagatcaagggaacgaacggccgcggacgaactagaagcctttcttgggggtggcgcccccgggggtagacaccccggcggcggcgactatgaagagctttag

SEQ ID NO: 216502 - DNA, 1563 bp, Artificial Sequence
  derived and/or modified sequence
atgttcagcgccctgaagaagctggtgggcagcgaccaggcccccggaagagataagaacatcccagctgggctgcagagcatgaatcaggccttgcagaggcgcttcgctaagggggttcagtacaatatgaaaatcgtcatacgcggggatcgtaataccggaaaaacggcactgtggcatcgtctgcaagggcgtccattcgttgaggagtacatccccacacaggagatacaggtgacctcgatccattggagttataagactacggacgacatagtcaaagttgaagtctgggacgtggttgataagggcaaatgtaaaaagcggggcgatggtcttaagatggaaaatgatccccaggaggccgagtccgagatggccttagatgccgagttcctggacgtgtacaaaaattgcaacggggtggtaatgatgttcgacattacgaagcagtggacatttaattacattctaagggagctgccaaaagtgccaacacacgtacccgtgtgtgtcttggggaactaccgggatatgggggaacaccgcgtcatcctgcctgatgatgtgcgtgacttcatagacaacctggaccgtccacccgggtcgtcatatttcagatacgcagaaagtagcatgaaaaattcattcggcctgaagtacctgcacaagttctttaacatccctttcttgcagctgcagagggagacattgttacgccagctagagactaatcagctggatatggatgccacccttgaagaactgagcgtgcagcaagaaacagaagatcaaaactatgggatcttcctggagatgatggaggctcgcagccgcggacatgcctctccccttgcggctaacggccagtctccatcacccgggtctcagtctccagtggtgcccgctggggcagtctcaaccggctcaagctctcctggcactccgcaaccagcccctcagctgcccctcaatgctgcccccccgtccagtgtgcctccagttccgccatctgaggctctgcccccacccgcttgtccttccgcacccgcacctcgaagaagcatcatttccaggcctcccccctggggctggagactccggggagccctcggaagacgagggcaatggcccccatggggggggggaagggcttgtcactgtctgggtagacacctgcctctttatcaccggctttgtcgctgcccagtggccgcagtgtgtgcatccgaactcgaagaagccggccactggtggtctcccggctgggccctccaggtgctgggactccaggcccagtgtgagcctgccttgcaagaggggcgagggcagctggcttccgcccgcctaggagggcatcctgggcccctaggggccgagcccccagtgttcttgcgtgacgtcactgaagcccaagagggtccagttcgagtttgtttgcagcgtctagggagaggtagactggcggttggttgcgcacttccgcgtcacctgctggcactgcgggcacacttaggcccacagcatgcttacggctcggctagcggtcgcgaaccctag

SEQ ID NO: 216503 - DNA, 1845 bp, Artificial Sequence
  derived and/or modified sequence
atggagaacgacccccaggaggccgagagcgagatggccctggacgcagaatttctagacgtttacaaaaactgtaacggagtcgtgatgatgttcgatatcacaaaacagtggacattcaactacatcttacgggaactgccaaaagtgcccactcacgtccctgtttgtgttctgggaaactatcgggatatgggcgagcatcgggtcatcctgccggatgacgtccgagattttattgacaatcttgacaggccacccgggtcaagctactttaggtacgctgagtcatctatgaagaactcctttgggctgaagtacctccacaagttcttcaatatcccctttctgcagcttcagcgggagaccctgctgcgccaattagagaccaaccagctggatatggatgcaacgctggaagaactcagcgtgcagcaagagactgaggatcagaactatgggatatttctggagatgatggaagcccgctcaaggggccacgcgtcaccactcgcggcgaacggacagagtcccagccccggcagtcagtcacccgtggtgcccgctggggcagtttccacaggtagctcttctcctgggacccctcagcccgcgccccagttgcccctgaatgccgcacctccttccagtgttccaccagttccccccagcgaagctcttcctcctcccgcctgccctagcgcccccgctcctaggcggagcatcatttcccgtctcttcggaactagccctgccactgaggctgcccctcctccaccagaaccggttcctgccgccgagggccccgccacagttcaaagcgtcgaggattttgtgcccgatgaccgccttgaccgatccttcctggaggatacaacgcccgccagagacgagaagaaggttggcgcgaaggccgcccagcaggactcggacagcgacggggaggctctggggggcaatccaatggtggcaggctttcaggatgatgtggacctcgaagaccaaccccgcgggtcgcctccattgcccgcaggacctgtgccttcacaggatataaccctcagtagcgaggaagaggccgaggtggccgccccaacaaagggtccagccccagcaccgcaacagtgctctgaaccggagacaaagtggagttcaatccctgcttcaaaacccagacgtgggacggcacccactcgtacggctgcacctccctggccgggcggagttagcgtcagaactggccccgagaagagatcttctactcgcccacccgctgagatggaacctgggaagggcgaacaggcgagtagttcagaatctgaccctgaaggaccaatcgcggctcaaatgctgtccttcgtcatggacgacccagatttcgagagcgaggggtctgatacccagagaagggctgatgattttccggttcgggatgacccttccgatgtaacagatgaagacgaaggaccggcggagccgcctcccccccccaagctcccgctgccagccttcaggctaaaaaatgacagtgatttgttcggactgggactggaggaagccggaccaaaagagtcgtcagaagaaggcaaggaaggcaagacgccatcgaaggagaagaaaaaaaaaaagaaaaaagggaaggaagaggaggaaaaagcagcaaagaagaaatccaaacacaagaagtctaaagataaggaagaaggcaaagaagagcgcagaagacgccagcagcggccaccacgctcacgcgagagaaccgcggcagatgaactggaagcattccttggtgggggcgctcccggcgggaggcaccctggcggcggggattatgaagagctgtag

SEQ ID NO: 216504 - DNA, 1416 bp, Artificial Sequence
  derived and/or modified sequence
atgaccgtgggcaccgtgaagatcgtgatccggggcgaccggaacacgggaaagaccgctctgtggcacagactccagggacgccccttcgttgaggagtatatccccactcaagagatacaggtcacgtccattcattggagctataaaactaccgatgacattgtaaaggtcgaggtatgggacgtggtggataaaggaaagtgcaagaaacgtggcgacggtcttaagatggaaaacgacccgcaagaggctgaaagcgagatggctcttgatgctgagtttctcgacgtgtataaaaattgcaatggagtagttatgatgtttgacattactaaacagtggacattcaactatattctgagagaactgcccaaggtacctacccatgttccggtatgtgtccttggaaattaccgcgacatgggcgagcacagggtcatactgcctgatgatgtgagagatttcatcgacaatcttgaccggccccccgggagttcttacttcagatatgccgagtcttcaatgaagaactcttttggactgaaatatttgcataaattttttaacataccttttttgcagctccagagggagaccctgttgcgtcagctggagacaaatcagttggacatggatgctactctcgaagaactatcagtacaacaggaaactgaagaccagaattatggtatatttctagagatgatggaagccaggtctagggggcatgcctctccactcgcggccaatggccagagtccttcaccggggtcccaaagtcccgtggtgcccgctggcgctgtgtcaacaggatccagctcacctgggacccctcaaccggctccgcaactgccacttaacgccgcccctcctagttctgtgcccccagtcccacctagcgaggccctgcccccccccgcatgccccagcgcaccagcacccaggcggtccataatttcacgcctctttggtacatctcctgccaccgaggcggctccaccacctcccgaaccggtcccagcagcggagggtcccgcgaccgtccaatccgtagaggattttgtcccagacgataggttagaccggtcatttcttgaagatacgacccctgcccgggacgagaagaaggttggagcgaaggcggcacaacaagacagtgattccgacggggaggctctaggcgggaacccaatggtggcaggcttccaggacgacgttgatctggaggaccagccgcgaggctctcctccgctgcccgctggccctgttccttcccaggatattaccctttcctccgaggaggaagccgaagtggccgcccctaccaaggggcccgccccggccccacagcagtgtagtgagcctgaaacaaaatggagcggagaagctcagcagcaccaggcgccttgttag

SEQ ID NO: 216505 - DNA, 1347 bp, Artificial Sequence
  derived and/or modified sequence
atgagccaccgggcctggctggccctgctgcccctggaggtggacggggatgatggactgtgtggtgccggcggacctgagcattctggtagctctcagcctcagcagcagcagcagcgggccccgtgccatctgagggcctccggccgcggtaggggcgcccgcctgctgactcggctcctgccctttagttttcttgaaatgatggaggcccgatctagagggcatgcttctcctctggcagctaatgggcagtcacccagtcccggatctcagagcccagtcgtgcctgccggggcagtgtcaacaggtagctcgtctccaggcacccctcaacccgcacctcagttgcccctgaatgctgccccaccttcttccgtgccccctgtacctcctagtgaggccctcccacctccagcatgccctagtgcccctgcgccccgtcgctcaataatctcccgtcttttcggcacctctccggcgactgaagccgcaccacccccaccagaaccagtcccggctgcagaggggcctgccaccgtgcagagcgttgaggacttcgtcccagatgaccgtttggaccgttcttttctggaagacacaactcctgcccgggacgagaagaaggttggcgccaaagccgcacagcaggacagtgacagcgatggagaagctctgggggggaacccgatggtggccggttttcaggacgacgttgatttggaggatcagccccgtggctcccctcccctgccagctgggccggtcccaagccaagatattactctcagctcagaggaggaggccgaggtggcggcaccgactaaagggcccgcccctgcaccacagcagtgctcagaacctgaaacaaaatggagcagcatccctgcaagcaagccacggaggggcacagctcccacccggaccgctgctccaccatggcccggcggcgtgagtgtgcggacaggtccagagaaacgcagcagtacacgaccacccgctgaaatggagccaggcaaaggcgagcaggccagctcgagcgagagcgaccctgagggccccatagcagctcagatgctgtcctttgttatggatgaccctgacttcgagtccgaaggctcagacactcagcggcgagctgacgacttccccgtgagagatgacccatctgatgtaacagatgaagatgaggggccagcagaaccccctcctcctcccaagctgccccttcctgctttcagactaaagaacgactctgacctcttcggcctgggactggaggaagccggccctaaggagagcagcgaggaagggaaggagggcaaaacaccctctaaagagaaatag

SEQ ID NO: 216506 - DNA, 2190 bp, Artificial Sequence
  derived and/or modified sequence
atgttcagcgccctcaagaagctggtcgggtctgaccaagcacctggaagagataagaatatccctgctggtttacaatcgatgaaccaggccctgcaacgcagattcgctaagggtgtgcagtacaatatgaaaatcgttatccgaggcgaccggaacactggcaagacagctctctggcaccgcctgcaaggcaggcccttcgtggaagagtacatacccacccaggagatccaagtgaccagcattcattggagctacaaaactacggatgacatcgtcaaggtcgaagtgtgggatgtggtcgacaagggtaagtgcaagaagaggggcgacggcttgaaaatggaaaatgatccacaggaagccgaatccgaaatggccctcgacgcggagtttctcgatgtgtataagaattgcaacggcgttgtgatgatgttcgatatcacaaaacagtggactttcaactatattctgcgagagctccccaaggtgcctacccatgtgcctgtgtgcgtgctcggcaactatagggacatgggagagcatcgggtgatcctccctgatgatgtgagagattttatcgacaacctggacagacctcctggctcctcctactttcggtatgcagagtcttccatgaaaaactcattcgggctgaaatatctacacaaattcttcaacatccctttcctgcaacttcagagagagaccttactgcgtcagctggagactaaccagctggatatggatgctaccctcgaagagctgagcgtgcaacaagagactgaagaccagaattacgggatcttcctggaaatgatggaagccaggagtcgtggccatgccagccccctagccgctaacggtcagagtccttctcctggtagtcagagccccgtcgtgcccgcaggcgctgtgtctaccggttctagttcacccggaacaccccagccagcaccgcagttaccactgaacgcagcaccgccttcttccgtgcctcctgtgccaccgtctgaggcccttccaccgcctgcctgtccatcagcacccgctcctcggagaagtatcatctccaggctctttggcacgtctccagcaactgaggccgcacccccacctccggaacctgtgcccgcagccgagggtcccgcaacagtgcaatctgtcgaagatttcgtgcctgatgaccggttggacagaagttttttggaggataccacaccagctagagatgaaaaaaaggttggtgccaaggccgctcagcaggacagcgactctgatggggaagccctagggggtaacccaatggtggcgggtttccaggatgatgtggacttagaagatcagcctcgaggcagtccacctctgcctgccggaccagtgccctcacaggacatcaccctgtccagcgaggaggaggctgaagtcgccgctcccacaaagggcccagcgcctgcaccgcagcagtgcagcgaacctgagaccaaatggagctcaatacccgcaagcaaaccaaggcgcggaacggcacccacccgcaccgctgctccgccttggcccggaggtgtcagtgtgcgcacaggacctgagaaaaggagctccacacgaccgccagccgagatggagccgggtaaaggggaacaggcctccagcagcgaatccgatcccgagggcccaatcgctgcccagatgttgtcatttgtcatggatgacccagatttcgagagtgaaggctctgacacccagcggagggccgatgactttcctgttcgtgacgatcccagcgacgtgaccgatgaagatgaaggacccgcagaaccgccaccccctccaaagctacctcttcctgcttttagattaaaaaatgactctgacctttttgggctgggcctagaggaggctggcccaaaggagtcttccgaggaaggcaaagaaggaaagaccccctctaaggagaagaagaaaaaaaaaaaaaaaggaaaagaagaagaagaaaaggccgcaaagaaaaagtcaaagcacaaaaagagcaaagataaggaagaggggaaagaggaaagaaggaggaggcagcagagacctccacgcagcagagagcggacagcagccgacgagttggaggcgtttctaggaggcggagctcccggaggtcgccatcccggtggcggtgactatgaggagctgtag

SEQ ID NO: 216507 - DNA, 1563 bp, Artificial Sequence
  derived and/or modified sequence
atgttctccgcgctgaagaaacttgtaggctccgatcaagcccctggtcgggataagaacattccagctggactgcagtcaatgaatcaggctctacagcggaggtttgccaagggcgttcaatacaacatgaagatcgtgattcggggtgacaggaacactggcaaaaccgcactctggcaccggctgcaggggagaccctttgtagaggaatacatccctacacaggagattcaggtgaccagtatccactggtcatacaaaaccaccgatgatatcgtgaaggtggaggtttgggatgtcgtagataagggcaaatgtaaaaaaaggggagatgggctgaagatggagaatgatccccaagaggcagagagtgagatggcgctggatgcggagtttctcgacgtttacaagaattgcaacggtgttgtgatgatgttcgacattactaaacagtggacattcaactatattttaagggagttaccgaaggtaccaacccacgttccagtttgtgtgctgggcaactatagggatatgggagagcatcgggtgattttgcctgacgacgtgcgggatttcattgacaacttggacagacccccaggtagctcctattttaggtacgcagagtctagcatgaaaaactcttttggtctaaaatatttacataagttcttcaatatacccttcctccaattacagagagagacgttacttaggcagctcgagacaaatcagctggacatggacgccaccttagaggagctgagcgtacagcaagagaccgaagatcaaaattacgggatctttttagagatgatggaggctagaagcagggggcacgcctctccactggcagctaatggacagtccccaagccccggttcccagagccccgtggtaccggctggtgcagtttccaccggcagtagctctcctggtaccccccagccggctccacagctgccactaaacgctgccccaccatcgtcagtgccgcctgtcccgccatcagaagctttgcccccacctgcgtgtcctagtgcgcctgcaccacgtagaagtataatatctcgtccgccaccatggggctggaggcttaggggcgctctaggccgaaggggacagtggccaccctggggtggcggacgcgcttgtcactgcctgggaagacacctcccgctgtaccacagactgtgcagatgtcccgtggcggcagtgtgcgcctcggagctcgaagaggccggtcattggtggtcccccggttgggcgttgcaggttctcggtcttcaggcccaatgcgagccggctctacaggagggccgtggacagctggcgagcgctcgcctgggcggacaccccggtccgctgggggcagaaccacccgtgtttttaagggacgtaaccgaggcgcaggagggtccggtgagggtctgtctgcagagacttgggagaggcagattagcagtcggctgcgctctccctcggcatctgttggcattacgcgctcacctgggacctcagcatgcctatgggtccgcgtcagggagagaaccctag

SEQ ID NO: 216508 - DNA, 1845 bp, Artificial Sequence
  derived and/or modified sequence
atggaaaatgatcctcaggaggctgaatctgagatggccctggatgcagagttcctcgatgtttataaaaactgcaacggggtagtgatgatgtttgacataacaaaacagtggacatttaattacatcctccgggaattgccgaaggtgcccacacatgtacctgtttgtgttcttgggaattacagagatatgggcgagcacagagttatactgccagacgatgtacgagacttcattgacaacttggatagaccccctggatcctcctacttcagatatgcggaatcctccatgaagaactcctttgggctcaaatacctgcacaagttcttcaatataccttttctgcaattgcagcgggagacactccttcggcagctggagaccaaccagttggatatggatgctacactggaggaactctcagttcaacaagaaactgaggaccaaaattacgggattttcctggaaatgatggaagcgaggagccgtgggcatgctagtcccctggccgcaaacggacagtccccctctccgggttctcagagccccgtggtccctgccggtgccgtgagtactggctcttctagccccggtactccgcaacctgctccccagctgccccttaatgcggcacccccttcctctgtgccacccgtgccaccctccgaggccctgcccccacctgcctgcccctctgctcccgctccgcgtcgaagcatcatcagcaggttatttggcaccagtcccgcaactgaggccgctccacccccacctgaacctgtgcccgctgccgaaggtccagcaaccgtgcagagcgtggaggattttgtaccagacgatcggctggaccggtctttcctggaggacaccacaccggctagggatgagaagaaagtgggtgccaaggctgcgcagcaggactcagactctgacggcgaagctctcgggggtaacccgatggttgcagggtttcaggatgacgtggatctcgaggaccaaccaagagggtctccacctctacctgcgggacccgtgccatcgcaggacatcaccttatcttcagaggaggaagccgaagttgcagcacctacaaagggcccagcgcctgcccctcagcaatgcagtgaacctgaaactaaatggagcagcatacctgcttctaagcccaggcgtgggacagcaccaacgcgcaccgcagcaccgccttggcccggaggcgtatctgtaagaacaggcccagagaaacggtctagcacaaggcctcccgctgaaatggaacctgggaaaggggaacaggcctctagctctgagagtgatcccgaggggccaatcgcagcacagatgttgagcttcgtaatggatgatccggactttgaatcggaaggttccgatacccaacggagggctgatgacttccccgtgagagacgacccttctgacgtgacggatgaggatgaaggcccagctgaacctccacctcccccaaagctgcctcttcctgcctttaggctgaaaaacgactctgatctttttggtcttggtcttgaggaggcgggtccaaaggagtcatctgaggaagggaaggagggaaaaacaccctcgaaagaaaagaaaaaaaaaaagaagaaaggcaaggaagaggaagagaaagcagcgaagaagaagtctaagcataaaaagagcaaggataaggaggaaggcaaagaagaacgcagaaggagacaacagaggccccctagatctagggagcgaaccgcggctgacgaactggaggccttcctggggggaggcgcacccggaggtagacaccccggtggcggagactacgaggagttgtag

SEQ ID NO: 216509 - DNA, 1416 bp, Artificial Sequence
  derived and/or modified sequence
atgaccgtgggcactgtgaagattgtcataaggggcgaccgaaacacaggcaaaacggcattgtggcatcggcttcagggaaggccgttcgtcgaggagtacataccaacacaggagatacaggtgacctccattcattggtcatataaaacaacagatgacattgtaaaagtcgaggtgtgggacgtagttgacaaaggcaagtgtaagaaacgaggcgacggtctcaagatggaaaacgatccccaagaggccgagtccgagatggctttggacgccgagttcttagacgtatacaagaactgtaacggagtggtcatgatgttcgacatcacaaagcaatggactttcaactatattctgagggaactgccaaaggtcccaacacatgtgcccgtgtgcgtcttgggcaactacagggatatgggcgagcaccgagttattctccccgatgacgtgcgggactttatcgacaacctagaccgtcccccaggaagttcatattttcggtatgcagaaagttccatgaagaactccttcggactaaagtatctccataagttcttcaatataccctttcttcaattgcagcgagaaactttgctccggcagctggagacaaatcaactcgatatggacgcaactctggaggaactgtccgtgcaacaggagactgaagatcaaaactatggaatcttccttgagatgatggaggcgagaagcagggggcatgcctcaccactggccgcaaacggacaatccccgagcccaggatcccagagccccgtcgtacccgcaggcgctgttagcacagggtcctcgtccccaggcacgccacaacccgcaccccagctgccacttaacgctgccccaccctcaagtgttccgcctgtgcctccttccgaggccctgccaccccctgcctgcccttctgctccggcacctcgaagatccatcatctcacggttattcggaacaagcccggctaccgaggctgccccaccccctccagagcccgtgcctgcagcagaggggcctgccaccgtccagtcggtggaggatttcgtgcccgatgacagactcgatagatcctttctcgaggacacaactccagcacgcgacgaaaaaaaagtcggggcaaaggccgctcagcaggattcggatagtgacggcgaggccctaggaggcaacccaatggtggccggtttccaggacgacgtggatctggaagatcagcccagaggcagtcctcctctgcccgctggccctgttccctcacaagatattactctatcatctgaggaggaagcagaagtcgcagcccctaccaaggggcctgctccagcaccccagcaatgcagcgaacctgaaacgaaatggtccggagaagcccaacagcatcaggccccttgttag

SEQ ID NO: 216510 - DNA, 1347 bp, Artificial Sequence
  derived and/or modified sequence
atgtctcacagggcatggctggcccttctgccactggaggtggacggcgatgatggactctgtggcgctggcggacccgaacactcaggttcttcccagccacagcagcagcaacagagggccccttgccacttaagggcctccgggagaggccgaggtgcacgccttctcaccagactccttcctttcagttttttagagatgatggaggcccgttcccgtggacatgcctctccgttggctgcaaacggacagtccccatcccccggatctcagtcccctgtggtacccgcaggcgctgtttcaaccggctcctcctctccaggcacccctcagccagccccacagttacccttgaatgccgcaccgcctagttccgtgccccctgtgcctccttcagaagccttgcctccccctgcatgtccatccgccccagcgcctagaagatcaatcatatcacggctctttggaacctcgcctgccacagaagccgctcctcctccccctgagccagtacctgctgccgaaggcccagcaacagtccagtccgtggaggactttgtccccgacgaccgactcgaccgctccttcctcgaagataccacccctgctcgggatgaaaagaaggtcggagccaaggctgctcagcaggattcagatagcgacggcgaggcccttggaggtaatccaatggtggctgggttccaggacgacgttgacctggaggatcagcctcggggatcgccccctttgccggcagggccagtcccaagccaggacatcacgctcagctccgaagaagaagcagaggtggctgctccaacaaagggtccagctcctgctccacagcaatgctctgaaccggagaccaagtggtcctcaataccagcatctaagcctagacgcggtaccgccccaaccaggaccgctgccccaccatggcctggcggagtcagcgttcgcacggggcctgagaaaaggtcttctacgcgtccaccagcagagatggagccagggaaaggcgagcaagcttcttccagcgaatcagatccggaaggcccaattgccgctcagatgctatcattcgtcatggacgaccctgatttcgaatccgaagggtcagacacacaacgaagggccgatgattttccagtcagagatgatccatccgacgtgacagatgaagatgaagggcctgcagagcccccaccacctcccaagttgcccttacctgcgttccgactgaaaaacgactccgacctcttcggactgggactggaggaggccggacctaaggaatcttctgaagaagggaaagaggggaaaaccccctcaaaagaaaagtag

SEQ ID NO: 216511 - DNA, 3091 bp, Artificial Sequence
  derived and/or modified sequence
gactcctggagagcggtcgcgccggaggccgcgggggccggagcggagcagccgcggctgaggttcccgagtcgccgctcggggctgcgctccgccgccgggaccccggcctctggccgcgccggctccggcctccgggggggccggggccgccgggacatggtgccagtcgcaccccttccccgccgccgctgagctcgccggccgcgcccgggctgggacgtccgagcgggaagatgttttccgccctgaagaagctggtggggtcggaccaggccccgggccgggacaagaacatccccgccgggctgcagtccatgaaccaggcgttgcagaggcgcttcgccaagggggtgcagtacaacatgaagatagtgatccggggagacaggaacacgggcaagacagcgctgtggcaccgcctgcagggccggccgttcgtggaggagtacatccccacacaggagatccaggtcaccagcatccactggagctacaagaccacggatgacatcgtgaaggttgaagtctgggatgtagtagacaaaggaaaatgcaaaaagcgaggcgacggcttaaagatggagaacgacccccaggaggcggagtctgaaatggccctggatgctgagttcctggacgtgtacaagaactgcaacggggtggtcatgatgttcgacattaccaagcagtggaccttcaattacattctccgggagcttccaaaagtgcccacccacgtgccagtgtgcgtgctgggaaactaccgggacatgggcgagcaccgagtcatcctgccggacgacgtgcgtgacttcatcgacaacctggacagacctccaggttcctcctacttccgctatgctgagtcttccatgaagaacagcttcggcctaaagtaccttcataagttcttcaatatcccatttttgcagcttcagagggagacgctgttgcggcagctggagacgaaccagctggacatggacgccacgctggaggagctgtcggtgcagcaggagacggaggaccagaactacggcatcttcctggagatgatggaggctcgcagccgtggccatgcgtccccactggcggccaacgggcagagcccatccccgggctcccagtcaccagtggtgcctgcaggcgctgtgtccacggggagctccagccccggcacaccccagcccgccccacagctgcccctcaatgccgccccaccatcctctgtgccccctgtaccaccctcagaggccctgcccccacctgcgtgcccctcagcccccgccccacggcgcagcatcatctctaggctgtttgggacgtcacctgccaccgaggcagcccctccacctccagagccagtcccggccgcagagggcccagcaacggtccagagtgtggaggactttgttcctgacgaccgcctggaccgcagcttcctggaagacacaacccccgccagggacgagaagaaggtgggggccaaggctgcccagcaggacagcgacagtgatggggaggccctgggcggcaacccgatggtggcagggttccaggacgatgtggacctcgaagaccagccacgtgggagtcccccgctgcctgcaggccccgtccccagtcaagacatcactctttcgagtgaggaggaagcagaagtggcagctcccacaaaaggccctgccccagctccccagcagtgctcagagccagagaccaagtggtcctccataccagcttcgaagccacggagggggacagctcccacgaggaccgcagcacccccctggccaggcggtgtctctgttcgcacaggtccggagaagcgcagcagcaccaggccccctgctgagatggagccggggaagggtgagcaggcctcctcgtcggagagtgaccccgagggacccattgctgcacaaatgctgtccttcgtcatggatgaccccgactttgagagcgagggatcagacacacagcgcagggcggatgactttcccgtgcgagatgacccctccgatgtgactgacgaggatgagggccctgccgagccgcccccaccccccaagctccctctccccgccttcagactgaagaatgactcggacctcttcgggctggggctggaggaggccggacccaaggagagcagtgaggaaggtaaggagggcaaaaccccctctaaggagaagaagaagaagaagaaaaaaggcaaagaggaagaagaaaaagctgccaagaagaagagcaaacacaagaagagcaaggacaaggaggagggcaaggaggagcggcgacggcggcagcagcggcccccgcgcagcagggagaggacggctgccgatgagctggaggctttcctggggggcggggccccgggcggccgccaccctgggggtggcgactacgaggagctctaggccggcgtgggcagtggccgccctggggcggggggcgtgcctgtcactgcctggggaggcatttgcctctgtaccatcgcctttgccgctgccccgtggctgccgtgtgcgcttctgagctggaagaggccgggcattggtggtccccaggctgggccctgcaggtgctgggccttcaggcccagtgtgagcctgctctgcaagaagggaggggacagctggcttcagccaggctcggtggacaccctggccctctcggggcagagccgccagtgtttctcagggatgtgactgaggcccaggagggacctgtgagggtctgtttacagaggctgggcaggggccgcttggctgtggggtgtgcgctgccccggcacctgcttgccctccgcgctcatctggggccgcagcatgcctatggttccgcttccggccgggagccctgaacacgggtgtgcagactcaccctaaagggcggcccaggccccacgctagaaggctggcgagaccgaaggcagcatgtgaggcctctcctgggagtgggggttgtgtttcccacagtggcctcagctgcgcccccgctcaggtgagcccgaaggcaggagccgggaggcactcctcccaaacactccactcagaccataaagcactcctgtttcactctg

SEQ ID NO: 216512 - DNA, 1820 bp, Artificial Sequence
  derived and/or modified sequence
cgccggccgcgcccgggctgggacgtccgagcgggaagatgttttccgccctgaagaagctggtggggtcggaccaggccccgggccgggacaagaacatccccgccgggctgcagtccatgaaccaggcgttgcagaggcgcttcgccaagggggtgcagtacaacatgaagatagtgatccggggagacaggaacacgggcaagacagcgctgtggcaccgcctgcagggccggccgttcgtggaggagtacatccccacacaggagatccaggtcaccagcatccactggagctacaagaccacggatgacatcgtgaaggttgaagtctgggatgtagtagacaaaggaaaatgcaaaaagcgaggcgacggcttaaagatggagaacgacccccaggaggcggagtctgaaatggccctggatgctgagttcctggacgtgtacaagaactgcaacggggtggtcatgatgttcgacattaccaagcagtggaccttcaattacattctccgggagcttccaaaagtgcccacccacgtgccagtgtgcgtgctgggaaactaccgggacatgggcgagcaccgagtcatcctgccggacgacgtgcgtgacttcatcgacaacctggacagacctccaggttcctcctacttccgctatgctgagtcttccatgaagaacagcttcggcctaaagtaccttcataagttcttcaatatcccatttttgcagcttcagagggagacgctgttgcggcagctggagacgaaccagctggacatggacgccacgctggaggagctgtcggtgcagcaggagacggaggaccagaactacggcatcttcctggagatgatggaggctcgcagccgtggccatgcgtccccactggcggccaacgggcagagcccatccccgggctcccagtcaccagtggtgcctgcaggcgctgtgtccacggggagctccagccccggcacaccccagcccgccccacagctgcccctcaatgccgccccaccatcctctgtgccccctgtaccaccctcagaggccctgcccccacctgcgtgcccctcagcccccgccccacggcgcagcatcatctctaggccgccaccctgggggtggcgactacgaggagctctaggccggcgtgggcagtggccgccctggggcggggggcgtgcctgtcactgcctggggaggcatttgcctctgtaccatcgcctttgccgctgccccgtggctgccgtgtgcgcttctgagctggaagaggccgggcattggtggtccccaggctgggccctgcaggtgctgggccttcaggcccagtgtgagcctgctctgcaagaagggaggggacagctggcttcagccaggctcggtggacaccctggccctctcggggcagagccgccagtgtttctcagggatgtgactgaggcccaggagggacctgtgagggtctgtttacagaggctgggcaggggccgcttggctgtggggtgtgcgctgccccggcacctgcttgccctccgcgctcatctggggccgcagcatgcctatggttccgcttccggccgggagccctgaacacgggtgtgcagactcaccctaaagggcggcccaggccccacgctagaaggctggcgagaccgaaggcagcatgtgaggcctctcctgggagtgggggttgtgtttcccacagtggcctcagctgcgcccccgctcaggtgagcccgaaggcaggagccgggaggcactcctcccaaacactccactcagaccataaagcactcctgtttcactctg

SEQ ID NO: 216513 - DNA, 3395 bp, Artificial Sequence
  derived and/or modified sequence
ttttcactgcaaaaaaaaaaaaactagtgggttactagtgggaggcaaagatgagtttgagctgccacgtggtgacagctgacacttggactgctgtgcaggaacagccgtggagttgctgggcatctgctgctctctagggcctgggagggtggtgctgggctgacaggacacagagcccacagggccggcgcacagaagctctacctgccaccgcaccctcttcctggtttggggtgaggctgatggcagcgttcatgcccctctgctcaggcgacgtggatgtgattggtgtgggggcagatgcctggctgtgtgagggccccgggcgtgcctctcccctctggttctcccttccccttggaatccttgggtgggcgggaggctccatccatcagctcccccagtccccagcacgccccacaacagagcacagtcatgggagctcaggaggagtggttggcaccagcaggcccagctgcgatggtgcggtgtgaggcaggcctggggcctctcaggtggctccgaagggagggtccggcctccgccctcagtgattacttagattctgctccctcaaagtgaactagaggccagtcactggatgaagaaacagggtcagaaggtgacacaggcgggcccattcattcgcacctgtcagcagaagcgtactccatgggcaaaaacacagacatcgacccagccaggagggtccccttccaccacggatgacatcgtgaaggttgaagtctgggatgtagtagacaaaggggttttgtttgttgtcccagtccgtgactccaagactgggacccccagagttcccaggatggtctggagcctttatcctcaggaaaatgcaaaaagcgaggcgacggcttaaagatggagaacgacccccaggaggcggagtctgaaatggccctggatgctgagttcctggacgtgtacaagaactgcaacggggtggtcatgatgttcgacattaccaagcagtggaccttcaattacattctccgggagcttccaaaagtgcccacccacgtgccagtgtgcgtgctgggaaactaccgggacatgggcgagcaccgagtcatcctgccggacgacgtgcgtgacttcatcgacaacctggacagacctccaggttcctcctacttccgctatgctgagtcttccatgaagaacagcttcggcctaaagtaccttcataagttcttcaatatcccatttttgcagcttcagagggagacgctgttgcggcagctggagacgaaccagctggacatggacgccacgctggaggagctgtcggtgcagcaggagacggaggaccagaactacggcatcttcctggagatgatggaggctcgcagccgtggccatgcgtccccactggcggccaacgggcagagcccatccccgggctcccagtcaccagtggtgcctgcaggcgctgtgtccacggggagctccagccccggcacaccccagcccgccccacagctgcccctcaatgccgccccaccatcctctgtgccccctgtaccaccctcagaggccctgcccccacctgcgtgcccctcagcccccgccccacggcgcagcatcatctctaggctgtttgggacgtcacctgccaccgaggcagcccctccacctccagagccagtcccggccgcagagggcccagcaacggtccagagtgtggaggactttgttcctgacgaccgcctggaccgcagcttcctggaagacacaacccccgccagggacgagaagaaggtgggggccaaggctgcccagcaggacagcgacagtgatggggaggccctgggcggcaacccgatggtggcagggttccaggacgatgtggacctcgaagaccagccacgtgggagtcccccgctgcctgcaggccccgtccccagtcaagacatcactctttcgagtgaggaggaagcagaagtggcagctcccacaaaaggccctgccccagctccccagcagtgctcagagccagagaccaagtggtcctccataccagcttcgaagccacggagggggacagctcccacgaggaccgcagcacccccctggccaggcggtgtctctgttcgcacaggtccggagaagcgcagcagcaccaggccccctgctgagatggagccggggaagggtgagcaggcctcctcgtcggagagtgaccccgagggacccattgctgcacaaatgctgtccttcgtcatggatgaccccgactttgagagcgagggatcagacacacagcgcagggcggatgactttcccgtgcgagatgacccctccgatgtgactgacgaggatgagggccctgccgagccgcccccaccccccaagctccctctccccgccttcagactgaagaatgactcggacctcttcgggctggggctggaggaggccggacccaaggagagcagtgaggaaggtaaggagggcaaaaccccctctaaggagaagaagaagaagaagaaaaaaggcaaagaggaagaagaaaaagctgccaagaagaagagcaaacacaagaagagcaaggacaaggaggagggcaaggaggagcggcgacggcggcagcagcggcccccgcgcagcagggagaggacggctgccgatgagctggaggctttcctggggggcggggccccgggcggccgccaccctgggggtggcgactacgaggagctctaggccggcgtgggcagtggccgccctggggcggggggcgtgcctgtcactgcctggggaggcatttgcctctgtaccatcgcctttgccgctgccccgtggctgccgtgtgcgcttctgagctggaagaggccgggcattggtggtccccaggctgggccctgcaggtgctgggccttcaggcccagtgtgagcctgctctgcaagaagggaggggacagctggcttcagccaggctcggtggacaccctggccctctcggggcagagccgccagtgtttctcagggatgtgactgaggcccaggagggacctgtgagggtctgtttacagaggctgggcaggggccgcttggctgtggggtgtgcgctgccccggcacctgcttgccctccgcgctcatctggggccgcagcatgcctatggttccgcttccggccgggagccctgaacacgggtgtgcagactcaccctaaagggcggcccaggccccacgctagaaggctggcgagaccgaaggcagcatgtgaggcctctcctgggagtgggggttgtgtttcccacagtggcctcagctgcgcccccgctcaggtgagcccgaaggcaggagccgggaggcactcctcccaaacactccactcagaccataaagcactcctgtttcactctg

SEQ ID NO: 216514 - DNA, 2496 bp, Artificial Sequence
  derived and/or modified sequence
actcccgggaaagacccggagacgggaccaccgcatgtggaaaccaccgggaagcacagcgcgtgggccgcctgagcggtgccggggcggggaggcagggccgccgctcaggccgtggacctcggggccgcgggacggacgtggatggcgccgccgttctctcgcgggcccagcgaggctatgcgtgcgcggcccgggcagtctctgcgagcccgggctgctgctcatctgggggggacggcggccgcccgactgagcccagagctgtgggccgcgcccgggttcctgcctcgggccggaggagggagggcgccgcggcccgtctcgggcctcccgccgcgctggggcctggctccctcctggctgcgctgagcgcctgcggctccgcttggggctgctgtgctctccacaggccgggccgccgggctggagggcgctgcaggcggcctctgttctccaagttctccgcgggagagggaggggaacgagggcccagccttccgcggggtgggctcggccgggagaagcgcggagcctcctggctgcccccagccggtgcggccgccaccgtggccgtgagggcgcctgggtcccctctggaggttttgccgcagcgctggccggcgccgagatatgaccagaggcgttgaaagttggcgcgttgaggtacctaggatgggcgaggaaatgaacaagcttcaggggagaagaaatgactgtgggaacagtgaagatagtgatccggggagacaggaacacgggcaagacagcgctgtggcaccgcctgcagggccggccgttcgtggaggagtacatccccacacaggagatccaggtcaccagcatccactggagctacaagaccacggatgacatcgtgaaggttgaagtctgggatgtagtagacaaaggaaaatgcaaaaagcgaggcgacggcttaaagatggagaacgacccccaggaggcggagtctgaaatggccctggatgctgagttcctggacgtgtacaagaactgcaacggggtggtcatgatgttcgacattaccaagcagtggaccttcaattacattctccgggagcttccaaaagtgcccacccacgtgccagtgtgcgtgctgggaaactaccgggacatgggcgagcaccgagtcatcctgccggacgacgtgcgtgacttcatcgacaacctggacagacctccaggttcctcctacttccgctatgctgagtcttccatgaagaacagcttcggcctaaagtaccttcataagttcttcaatatcccatttttgcagcttcagagggagacgctgttgcggcagctggagacgaaccagctggacatggacgccacgctggaggagctgtcggtgcagcaggagacggaggaccagaactacggcatcttcctggagatgatggaggctcgcagccgtggccatgcgtccccactggcggccaacgggcagagcccatccccgggctcccagtcaccagtggtgcctgcaggcgctgtgtccacggggagctccagccccggcacaccccagcccgccccacagctgcccctcaatgccgccccaccatcctctgtgccccctgtaccaccctcagaggccctgcccccacctgcgtgcccctcagcccccgccccacggcgcagcatcatctctaggctgtttgggacgtcacctgccaccgaggcagcccctccacctccagagccagtcccggccgcagagggcccagcaacggtccagagtgtggaggactttgttcctgacgaccgcctggaccgcagcttcctggaagacacaacccccgccagggacgagaagaaggtgggggccaaggctgcccagcaggacagcgacagtgatggggaggccctgggcggcaacccgatggtggcagggttccaggacgatgtggacctcgaagaccagccacgtgggagtcccccgctgcctgcaggccccgtccccagtcaagacatcactctttcgagtgaggaggaagcagaagtggcagctcccacaaaaggccctgccccagctccccagcagtgctcagagccagagaccaagtggtccggagaagcgcagcagcaccaggccccctgctgagatggagccggggaagggtgagcaggcctcctcgtcggagagtgaccccgagggacccattgctgcacaaatgctgtccttcgtcatggatgaccccgactttgagagcgagggatcagacacacagcgcagggcggatgactttcccgtgcgagatgacccctccgatgtgactgacgaggatgagggccctgccgagccgcccccaccccccaagctccctctccccgccttcagactgaagaatgactcggacctcttcgggctggggctggaggaggccggacccaaggagagcagtgaggaaggtaaggagggcaaaaccccctctaaggagaagaagaagaagaagaaaaaaggcaaagagg

SEQ ID NO: 216515 - DNA, 3328 bp, Artificial Sequence
  derived and/or modified sequence
ctggatcacctgaggtcaggagttcgtgaggctccggcgtttgtatttcatttgaatctaaagtgagcagccacagggacccgcagctcatcagaccagcctggggttccaggccaggagggcagtggtttgctccagagccagctgcttgtgggtgtgggacggtggcgacgcgtgcaccggggatgtgtcctgccaccagaggaggtgtgcgtggcggggagcagaggggctttgtttcccaggtgaaggtgcggcttcttcactcttagaggtgcgtgtgtgggtgggggtgcttgctgttgaggtttatgcctgtgactgacagctgtcccccaagccatgctggcagtgtgtaggtgtcgtgccggccaccgcagaggaatcctctgggcttctgtggttcaagtggggcccagcgcagagctccatgagttgctgagcagccagccctgcagcatctcctggttttggcagcaggaggcgtcccctgtgcattcaggggctgtggggctggggcactcgcagcaggaaggagccctgctcaggcctgcgtgctccctttctgcagagggagacgctgttgcggcagctggagacgaaccagctggacatggacgccacgctggaggagctgtcggtgcagcaggagacggaggaccagaactacggcatgtatgtggccggacccgcccgtgcgggcggtgtgggggctgcgggcgtggccgtggtgcagggccatgggctgcaccaaggagacagcagaggggagtgtcccctgtttggggtaaattagtcacctttgggcacgggtggaggaggactcaggtttgcactgcccccagcagcccccccacagtcacccctggcgtggactcctcatacaggtcatgctgtgcctgccactctgagtaccgctgaccgtggccaggtgctggtgctcatggagtgctgctggggctgcctgcccatcaggggcttggcctcccagattgatgccagcatggggtgtgctttctggggagctgcttgactttgggaagctccctgtgttgaagaggcatacaggccaggacatggaggtctctggtcctcgatagcagagggcggctcagagcatcctcctgagtgggcctgggcagtgcatagccccggggttgcggccagtgggacagctggcccgttctctgcctcaggctcctgtacagctaggggcttggtgcctcccctgggacccaggcagggaccacggaatcagtggccctcctgaggccccccaggaggtctctgtttccagaaggagagccctgtgggtcaccttggatctggctgttggctcagacacagcaagagaccgagagggaaggcagtttgatgcctggagagggacccgtggcttccagctgccaggccagccccagaatggagccccccgcatgggcgcttctctgttgaaccaatcctggcatttcctgggcctgagagttgggtcagctggatgctgcgatggccgcacgtgctccaccaagccccagccccctcctcttcccagaaacccccgctcacgggaaggtccagttgctgccatctggccacctctgcatggagcccccaacagctgtgcctcagaacagatccgaagtgactttcaggggagctggacacatgtacgctggtgcctgctgtccccaccctttggcactgctgctctttctttttctgagatggagtctcgctctgtcgcccaggctggagcgcagtggtgtgatctcggctcaccgcaagctccgcctcccgggttcacgccattctcctgcctcagcctcccaagtagctggggctacaggcacccgccaccacacccggctaattttttttgtatttttagtagagacggggtttcactgcgttagccaggacggtctccacctcctgacctcgtgatctgcctgccttggcctcctacagtgctgggattacaggcatgagccaccgtgcctggctggcactgctgcccttggaagtggatggggatgatggcctctgtggggcgggtggcccagaacacagtggctcttcccagccccagcagcagcagcagagagccccctgtcacctgagggcctcagggagaggcaggggagccaggcttctcacccgccttctgcctttcagcttcctggagatgatggaggctcgcagccgtggccatgcgtccccactggcggccaacgggcagagcccatccccgggctcccagtcaccagtggtgcctgcaggcgctgtgtccacggggagctccagccccggcacaccccagcccgccccacagctgcccctcaatgccgccccaccatcctctgtgccccctgtaccaccctcagaggccctgcccccacctgcgtgcccctcagcccccgccccacggcgcagcatcatctctaggctgtttgggacgtcacctgccaccgaggcagcccctccacctccagagccagtcccggccgcagagggcccagcaacggtccagagtgtggaggactttgttcctgacgaccgcctggaccgcagcttcctggaagacacaacccccgccagggacgagaagaaggtgggggccaaggctgcccagcaggacagcgacagtgatggggaggccctgggcggcaacccgatggtggcagggttccaggacgatgtggacctcgaagaccagccacgtgggagtcccccgctgcctgcaggccccgtccccagtcaagacatcactctttcgagtgaggaggaagcagaagtggcagctcccacaaaaggccctgccccagctccccagcagtgctcagagccagagaccaagtggtcctccataccagcttcgaagccacggagggggacagctcccacgaggaccgcagcacccccctggccaggcggtgtctctgttcgcacaggtccggagaagcgcagcagcaccaggccccctgctgagatggagccggggaagggtgagcaggcctcctcgtcggagagtgaccccgagggacccattgctgcacaaatgctgtccttcgtcatggatgaccccgactttgagagcgagggatcagacacacagcgcagggcggatgactttcccgtgcgagatgacccctccgatgtgactgacgaggatgagggccctgccgagccgcccccaccccccaagctccctctccccgccttcagactgaagaatgactcggacctcttcgggctggggctggaggaggccggacccaaggagagcagtgaggaaggtaaggagggcaaaaccccctctaaggagaag

SEQ ID NO: 216516 - DNA, 2190 bp, Artificial Sequence
  derived and/or modified sequence
atgttcagcgccctgaagaagctggtgggcagcgaccaggcccccggcagagacaagaacatccccgccggcctgcagagcatgaaccaggccctgcagagaagattcgccaagggcgtgcagtacaacatgaagatcgtgatcagaggcgacagaaacaccggcaagaccgccctgtggcacagactgcagggcagacccttcgtggaggagtacatccccacccaggagatccaggtgaccagcatccactggagctacaagaccaccgacgacatcgtgaaggtggaggtgtgggacgtggtggacaagggcaagtgcaagaagagaggcgacggcctgaagatggagaacgacccccaggaggccgagagcgagatggccctggacgccgagttcctggacgtgtacaagaactgcaacggcgtggtgatgatgttcgacatcaccaagcagtggaccttcaactacatcctgagagagctgcccaaggtgcccacccacgtgcccgtgtgcgtgctgggcaactacagagacatgggcgagcacagagtgatcctgcccgacgacgtgagagacttcatcgacaacctggacagaccccccggcagcagctacttcagatacgccgagagcagcatgaagaacagcttcggcctgaagtacctgcacaagttcttcaacatccccttcctgcagctgcagagagagaccctgctgagacagctggagaccaaccagctggacatggacgccaccctggaggagctgagcgtgcagcaggagaccgaggaccagaactacggcatcttcctggagatgatggaggccagaagcagaggccacgccagccccctggccgccaacggccagagccccagccccggcagccagagccccgtggtgcccgccggcgccgtgagcaccggcagcagcagccccggcaccccccagcccgccccccagctgcccctgaacgccgccccccccagcagcgtgccccccgtgccccccagcgaggccctgcccccccccgcctgccccagcgcccccgcccccagaagaagcatcatcagcagactgttcggcaccagccccgccaccgaggccgccccccccccccccgagcccgtgcccgccgccgagggccccgccaccgtgcagagcgtggaggacttcgtgcccgacgacagactggacagaagcttcctggaggacaccacccccgccagagacgagaagaaggtgggcgccaaggccgcccagcaggacagcgacagcgacggcgaggccctgggcggcaaccccatggtggccggcttccaggacgacgtggacctggaggaccagcccagaggcagcccccccctgcccgccggccccgtgcccagccaggacatcaccctgagcagcgaggaggaggccgaggtggccgcccccaccaagggccccgcccccgccccccagcagtgcagcgagcccgagaccaagtggagcagcatccccgccagcaagcccagaagaggcaccgcccccaccagaaccgccgcccccccctggcccggcggcgtgagcgtgagaaccggccccgagaagagaagcagcaccagaccccccgccgagatggagcccggcaagggcgagcaggccagcagcagcgagagcgaccccgagggccccatcgccgcccagatgctgagcttcgtgatggacgaccccgacttcgagagcgagggcagcgacacccagagaagagccgacgacttccccgtgagagacgaccccagcgacgtgaccgacgaggacgagggccccgccgagcccccccccccccccaagctgcccctgcccgccttcagactgaagaacgacagcgacctgttcggcctgggcctggaggaggccggccccaaggagagcagcgaggagggcaaggagggcaagacccccagcaaggagaagaagaagaagaagaagaagggcaaggaggaggaggagaaggccgccaagaagaagagcaagcacaagaagagcaaggacaaggaggagggcaaggaggagagaagaagaagacagcagagaccccccagaagcagagagagaaccgccgccgacgagctggaggccttcctgggcggcggcgcccccggcggcagacaccccggcggcggcgactacgaggagctgtag

SEQ ID NO: 216517 - DNA, 1563 bp, Artificial Sequence
  derived and/or modified sequence
atgttcagcgccctgaagaagctggtgggcagcgaccaggcccccggcagagacaagaacatccccgccggcctgcagagcatgaaccaggccctgcagagaagattcgccaagggcgtgcagtacaacatgaagatcgtgatcagaggcgacagaaacaccggcaagaccgccctgtggcacagactgcagggcagacccttcgtggaggagtacatccccacccaggagatccaggtgaccagcatccactggagctacaagaccaccgacgacatcgtgaaggtggaggtgtgggacgtggtggacaagggcaagtgcaagaagagaggcgacggcctgaagatggagaacgacccccaggaggccgagagcgagatggccctggacgccgagttcctggacgtgtacaagaactgcaacggcgtggtgatgatgttcgacatcaccaagcagtggaccttcaactacatcctgagagagctgcccaaggtgcccacccacgtgcccgtgtgcgtgctgggcaactacagagacatgggcgagcacagagtgatcctgcccgacgacgtgagagacttcatcgacaacctggacagaccccccggcagcagctacttcagatacgccgagagcagcatgaagaacagcttcggcctgaagtacctgcacaagttcttcaacatccccttcctgcagctgcagagagagaccctgctgagacagctggagaccaaccagctggacatggacgccaccctggaggagctgagcgtgcagcaggagaccgaggaccagaactacggcatcttcctggagatgatggaggccagaagcagaggccacgccagccccctggccgccaacggccagagccccagccccggcagccagagccccgtggtgcccgccggcgccgtgagcaccggcagcagcagccccggcaccccccagcccgccccccagctgcccctgaacgccgccccccccagcagcgtgccccccgtgccccccagcgaggccctgcccccccccgcctgccccagcgcccccgcccccagaagaagcatcatcagcagaccccccccctggggctggagactgagaggcgccctgggcagaagaggccagtggcccccctggggcggcggcagagcctgccactgcctgggcagacacctgcccctgtaccacagactgtgcagatgccccgtggccgccgtgtgcgccagcgagctggaggaggccggccactggtggagccccggctgggccctgcaggtgctgggcctgcaggcccagtgcgagcccgccctgcaggagggcagaggccagctggccagcgccagactgggcggccaccccggccccctgggcgccgagccccccgtgttcctgagagacgtgaccgaggcccaggagggccccgtgagagtgtgcctgcagagactgggcagaggcagactggccgtgggctgcgccctgcccagacacctgctggccctgagagcccacctgggcccccagcacgcctacggcagcgccagcggcagagagccctag

SEQ ID NO: 216518 - DNA, 1845 bp, Artificial Sequence
  derived and/or modified sequence
atggagaacgacccccaggaggccgagagcgagatggccctggacgccgagttcctggacgtgtacaagaactgcaacggcgtggtgatgatgttcgacatcaccaagcagtggaccttcaactacatcctgagagagctgcccaaggtgcccacccacgtgcccgtgtgcgtgctgggcaactacagagacatgggcgagcacagagtgatcctgcccgacgacgtgagagacttcatcgacaacctggacagaccccccggcagcagctacttcagatacgccgagagcagcatgaagaacagcttcggcctgaagtacctgcacaagttcttcaacatccccttcctgcagctgcagagagagaccctgctgagacagctggagaccaaccagctggacatggacgccaccctggaggagctgagcgtgcagcaggagaccgaggaccagaactacggcatcttcctggagatgatggaggccagaagcagaggccacgccagccccctggccgccaacggccagagccccagccccggcagccagagccccgtggtgcccgccggcgccgtgagcaccggcagcagcagccccggcaccccccagcccgccccccagctgcccctgaacgccgccccccccagcagcgtgccccccgtgccccccagcgaggccctgcccccccccgcctgccccagcgcccccgcccccagaagaagcatcatcagcagactgttcggcaccagccccgccaccgaggccgccccccccccccccgagcccgtgcccgccgccgagggccccgccaccgtgcagagcgtggaggacttcgtgcccgacgacagactggacagaagcttcctggaggacaccacccccgccagagacgagaagaaggtgggcgccaaggccgcccagcaggacagcgacagcgacggcgaggccctgggcggcaaccccatggtggccggcttccaggacgacgtggacctggaggaccagcccagaggcagcccccccctgcccgccggccccgtgcccagccaggacatcaccctgagcagcgaggaggaggccgaggtggccgcccccaccaagggccccgcccccgccccccagcagtgcagcgagcccgagaccaagtggagcagcatccccgccagcaagcccagaagaggcaccgcccccaccagaaccgccgcccccccctggcccggcggcgtgagcgtgagaaccggccccgagaagagaagcagcaccagaccccccgccgagatggagcccggcaagggcgagcaggccagcagcagcgagagcgaccccgagggccccatcgccgcccagatgctgagcttcgtgatggacgaccccgacttcgagagcgagggcagcgacacccagagaagagccgacgacttccccgtgagagacgaccccagcgacgtgaccgacgaggacgagggccccgccgagcccccccccccccccaagctgcccctgcccgccttcagactgaagaacgacagcgacctgttcggcctgggcctggaggaggccggccccaaggagagcagcgaggagggcaaggagggcaagacccccagcaaggagaagaagaagaagaagaagaagggcaaggaggaggaggagaaggccgccaagaagaagagcaagcacaagaagagcaaggacaaggaggagggcaaggaggagagaagaagaagacagcagagaccccccagaagcagagagagaaccgccgccgacgagctggaggccttcctgggcggcggcgcccccggcggcagacaccccggcggcggcgactacgaggagctgtag

SEQ ID NO: 216519 - DNA, 1416 bp, Artificial Sequence
  derived and/or modified sequence
atgaccgtgggcaccgtgaagatcgtgatcagaggcgacagaaacaccggcaagaccgccctgtggcacagactgcagggcagacccttcgtggaggagtacatccccacccaggagatccaggtgaccagcatccactggagctacaagaccaccgacgacatcgtgaaggtggaggtgtgggacgtggtggacaagggcaagtgcaagaagagaggcgacggcctgaagatggagaacgacccccaggaggccgagagcgagatggccctggacgccgagttcctggacgtgtacaagaactgcaacggcgtggtgatgatgttcgacatcaccaagcagtggaccttcaactacatcctgagagagctgcccaaggtgcccacccacgtgcccgtgtgcgtgctgggcaactacagagacatgggcgagcacagagtgatcctgcccgacgacgtgagagacttcatcgacaacctggacagaccccccggcagcagctacttcagatacgccgagagcagcatgaagaacagcttcggcctgaagtacctgcacaagttcttcaacatccccttcctgcagctgcagagagagaccctgctgagacagctggagaccaaccagctggacatggacgccaccctggaggagctgagcgtgcagcaggagaccgaggaccagaactacggcatcttcctggagatgatggaggccagaagcagaggccacgccagccccctggccgccaacggccagagccccagccccggcagccagagccccgtggtgcccgccggcgccgtgagcaccggcagcagcagccccggcaccccccagcccgccccccagctgcccctgaacgccgccccccccagcagcgtgccccccgtgccccccagcgaggccctgcccccccccgcctgccccagcgcccccgcccccagaagaagcatcatcagcagactgttcggcaccagccccgccaccgaggccgccccccccccccccgagcccgtgcccgccgccgagggccccgccaccgtgcagagcgtggaggacttcgtgcccgacgacagactggacagaagcttcctggaggacaccacccccgccagagacgagaagaaggtgggcgccaaggccgcccagcaggacagcgacagcgacggcgaggccctgggcggcaaccccatggtggccggcttccaggacgacgtggacctggaggaccagcccagaggcagcccccccctgcccgccggccccgtgcccagccaggacatcaccctgagcagcgaggaggaggccgaggtggccgcccccaccaagggccccgcccccgccccccagcagtgcagcgagcccgagaccaagtggagcggcgaggcccagcagcaccaggccccctgctag

SEQ ID NO: 216520 - DNA, 1347 bp, Artificial Sequence
  derived and/or modified sequence
atgagccacagagcctggctggccctgctgcccctggaggtggacggcgacgacggcctgtgcggcgccggcggccccgagcacagcggcagcagccagccccagcagcagcagcagagagccccctgccacctgagagccagcggcagaggcagaggcgccagactgctgaccagactgctgcccttcagcttcctggagatgatggaggccagaagcagaggccacgccagccccctggccgccaacggccagagccccagccccggcagccagagccccgtggtgcccgccggcgccgtgagcaccggcagcagcagccccggcaccccccagcccgccccccagctgcccctgaacgccgccccccccagcagcgtgccccccgtgccccccagcgaggccctgcccccccccgcctgccccagcgcccccgcccccagaagaagcatcatcagcagactgttcggcaccagccccgccaccgaggccgccccccccccccccgagcccgtgcccgccgccgagggccccgccaccgtgcagagcgtggaggacttcgtgcccgacgacagactggacagaagcttcctggaggacaccacccccgccagagacgagaagaaggtgggcgccaaggccgcccagcaggacagcgacagcgacggcgaggccctgggcggcaaccccatggtggccggcttccaggacgacgtggacctggaggaccagcccagaggcagcccccccctgcccgccggccccgtgcccagccaggacatcaccctgagcagcgaggaggaggccgaggtggccgcccccaccaagggccccgcccccgccccccagcagtgcagcgagcccgagaccaagtggagcagcatccccgccagcaagcccagaagaggcaccgcccccaccagaaccgccgcccccccctggcccggcggcgtgagcgtgagaaccggccccgagaagagaagcagcaccagaccccccgccgagatggagcccggcaagggcgagcaggccagcagcagcgagagcgaccccgagggccccatcgccgcccagatgctgagcttcgtgatggacgaccccgacttcgagagcgagggcagcgacacccagagaagagccgacgacttccccgtgagagacgaccccagcgacgtgaccgacgaggacgagggccccgccgagcccccccccccccccaagctgcccctgcccgccttcagactgaagaacgacagcgacctgttcggcctgggcctggaggaggccggccccaaggagagcagcgaggagggcaaggagggcaagacccccagcaaggagaagtag

SEQ ID NO: 216521 - RNA, 474 nt, Artificial Sequence
  derived and/or modified sequence
augcaucccuggcuggggucugcccuuggcuuuccuaaguguagggggauacaccugugcgcaugcgguaacgguuggacaccuggugaaacacuuucucagaauaagacggaaauaacaaagaauaaggucacauguuggagaccccauggcugugagccuaacacgggccucggcuaucaaggaucccacacuucuaaguauacccugcugccuuggaaccugcucaagacaaagccacugccccccagccacggcaaggaaggcggcaaagaggcuaaaguaccuaguggugauaacaguggcagaggcgaaguaccacgggcacaggaagggcaagccgcuugcggcagagccgcuucuggcgacucccaagagggaaugagaagaggguacgaggaacgcgcuaccgcucagcgucccgccgugagaagcgcagagacuacugcucacgggaccuggaucuaccccuag

SEQ ID NO: 216522 - RNA, 474 nt, Artificial Sequence
  derived and/or modified sequence
augcaucccuggcuggggucugcccuuggcuuuccuaaguguagggggauacaccugugcgcaugcgguaacgguuggacaccuggugaaacacuuucucagaauaagacggaaauaacaaagaauaaggucacauguuggagaccccauggcugugagccuaacacgggccucggcuaucaaggaucccacacuucuaaguauacccugcugccuuggaaccugcucaagacaaagccacugccccccagccacggcaaggaaggcggcaaagaggcuaaaguaccuaguggugauaacucuggacgcggagagguccccagagcacaggaagggcaggccgcauguggaagagcugccucuggcgauucucaagaagguaugcggagaggauaugaggagcgggccacggcacagcguccagcagugagaucugccgaaaccacugcccacggaacauggauuuacccuuag

SEQ ID NO: 216523 - protein, 305 aa, Artificial Sequence
  derived and/or modified sequence
MGTEKESPEPDCQKQFQAAVSVIQNLPKNGSYRPSYEEMLRFYSYYKQATMGPCLVPRPGFWDPIGRYKWDAWNSLGKMSREEAMSAYITEMKLVAQKVIDTVPLGEVAEDMFGYFEPLYQVIPDMPRPPETFLRRVTGWKEQVVNGDVGAVSEPPCLPKEPAPPSPESHSPRDLDSEVFCDSLEQLEPELVWTEQRAASGGKRDPRNSPVPPTKKEGLRGSPPGPQELDVWLLGTVRALQESMQEVQARVQSLESMPRPPEQRPQPRPSARPWPLGLPGPALLFFLLWPFVVQWLFRMFRTQKR

SEQ ID NO: 216524 - DNA, 918 bp, Artificial Sequence
  derived and/or modified sequence
atgggcaccgagaaggagagccccgagcccgactgccagaagcagttccaggccgccgtgagcgtgatccagaacctgcccaagaacggcagctacagacccagctacgaggagatgctgagattctacagctactacaagcaggccaccatgggcccctgcctggtgcccagacccggcttctgggaccccatcggcagatacaagtgggacgcctggaacagcctgggcaagatgagcagagaggaggccatgagcgcctacatcaccgagatgaagctggtggcccagaaggtgatcgacaccgtgcccctgggcgaggtggccgaggacatgttcggctacttcgagcccctgtaccaggtgatccccgacatgcccagaccccccgagaccttcctgagaagagtgaccggctggaaggagcaggtggtgaacggcgacgtgggcgccgtgagcgagcccccctgcctgcccaaggagcccgccccccccagccccgagagccacagccccagagacctggacagcgaggtgttctgcgacagcctggagcagctggagcccgagctggtgtggaccgagcagagagccgccagcggcggcaagagagaccccagaaacagccccgtgccccccaccaagaaggagggcctgagaggcagcccccccggcccccaggagctggacgtgtggctgctgggcaccgtgagagccctgcaggagagcatgcaggaggtgcaggccagagtgcagagcctggagagcatgcccagaccccccgagcagagaccccagcccagacccagcgccagaccctggcccctgggcctgcccggccccgccctgctgttcttcctgctgtggcccttcgtggtgcagtggctgttcagaatgttcagaacccagaagagatag

SEQ ID NO: 216525 - DNA, 2017 bp, Artificial Sequence
  derived and/or modified sequence
gatctgcgtcgccatcccggccctgctggaccccggggtcagtaggaagccgcggggtggtggcgagagaggacccaggtgtcctggcagtgggcgccgcggggcacacgctgggccaaggtgcaggcggccagggtgggagactgttcgccccgccctgagtactcctatcttgtttctccacctgttcgggagttggagatgtgcacctaaaggaggcgcatctggggacggacacatctggcactgaggccctcgccacctgcctcgccacctggcgaccctgaccccaccacactgccttgaggtaggaaaaggaggctcctcaaccacaacttctgacctcccagggtgtctgaggcctctaaagagcttagtttgcccctctgggaagtgaatccttggcttatggtgccggggggaccctggaggccccctcacacgaaggctgcttcttgcagagtcgctcaaaagtagggccccagggctcgcagcagcatgggcaccgagaaagaaagcccagagcccgactgccagaaacagttccaggctgcagtgagcgtcatccagaacctgcccaagaacggttcttaccgcccctcctatgaagagatgctgcgattctacagttactacaagcaggccaccatggggccctgcctggtcccccggcccgggttctgggaccccattggacgatataagtgggacgcctggaacagtctgggcaagatgagcagggaggaggccatgtctgcctacatcactgaaatgaaactggtggcacagaaggtgatcgacacagtgcccctgggtgaggtggcagaggacatgtttggttacttcgagcccctgtaccaggtgatccctgacatgccgaggcccccagagaccttcctgagaagggtcacaggttggaaagagcaggttgtgaatggagatgttggggctgtttcagagcctccctgcctccccaaggaaccggcacccccaagcccagagtcccattcacccagggacctggactccgaggttttctgtgattccctggagcagctggagcctgagctggtttggacagagcagcgggcagcatctggaggaaagcgtgatcccaggaacagccccgtgccccccacaaagaaagaggggttgcggggcagcccgccggggccccaggagttggacgtgtggctgctggggacagttcgagcactacaggagagcatgcaggaggtgcaggcgagggtgcagagcctggagagcatgccccggccccctgagcagaggccgcagcccaggcccagtgctcggccatggccccttgggctcccggggcccgcgctgctcttcttcctcctgtggcccttcgtcgtccagtggctcttccgaatgtttcggacccaaaagaggtgactgtcagtggaggggtctctgcagccaactgagactatcttgctgtgccctgagccttcctagggtttagaagaacagcattcaaaattccccgtcctgtcagtgtttgccttcgcacctcctcccctaaagcagcgcggggggcaaataagaccccacccctccctgcagcttcacagggacgcttccttccctccccgcaaccaccccaggctcccctgggaggctgcagttgtggtacacgtccccggtgctgggttggccgtgactcgggggcggggcgatcgggtctcagcccctgccttccccagtctctgggtcacccgaattttcccacccctgcttctccccgaggaggttgagctcttgagcaagttgggacttgggccggggcctggaagaatgattggctgggaggccgcgggagggaggccaggaggcccggaccagttgggaggagtgagcaggccccgggggagggggatgagcgcagtttgctcgctttcctcccctgccggccccctccgcccccacacacactcgggacgtcttcattgaagattcacttacaaaggaatgtttcactaaataaaagaaaacc

SEQ ID NO: 216526 - DNA, 918 bp, Artificial Sequence
  derived and/or modified sequence
atgggtactgagaaggagagcccagaaccagattgtcagaaacaattccaggcagcagtcagcgtcattcagaacctcccaaagaacggatcttatcggccctcttacgaagagatgcttagattttattcatactataagcaagctaccatgggcccttgtttggtacctcgccctggtttctgggacccaattggccggtacaaatgggacgcttggaactcactggggaaaatgtcaagggaggaggccatgtcggcatatatcaccgagatgaagttggttgcacagaaagtaattgacactgtcccactaggcgaagtggccgaagacatgttcggctatttcgagccgttgtatcaggtgattccagatatgccccgcccccccgaaactttcctccgccgcgtgacagggtggaaagagcaagtcgtgaacggtgacgtaggagccgtgtctgagcctccttgtctgccaaaggagccagcacctccctccccagaaagccactccccacgcgatctggatagcgaggtcttctgtgattctctagaacagttggaaccagagctggtatggacggagcagcgcgccgcctccggggggaagcgagatcctcgtaatagtcctgtcccacccaccaagaaggagggcttaagagggtcaccaccaggcccccaagagctggatgtctggttgctcggaacagtgcgcgcactgcaggagtccatgcaagaagtgcaggcccgggttcaaagtctggagagcatgccacggcccccagagcaacgaccccagcccagacccagcgcccgaccctggccactcgggctgccgggcccagccctgctgttcttccttctatggcccttcgtcgtgcagtggctattccgcatgttccggactcaaaagcgttag

SEQ ID NO: 216527 - DNA, 918 bp, Artificial Sequence
  derived and/or modified sequence
atgggcacagagaaggagagccctgagccagactgccagaagcagttccaggccgctgtgtctgtcatccagaacctgcccaagaatggcagctaccggcccagctatgaggagatgctgcgcttctacagctactacaagcaggccaccatgggcccctgcctggtgcccaggcctggcttctgggaccccatcggccgctacaagtgggatgcctggaacagcctgggcaagatgagccgggaggaggccatgtctgcctacatcacagagatgaagctggtggcccagaaggtgattgacacagtgcccctgggggaggtggccgaggacatgtttggctactttgagcccctgtaccaggtgatcccagacatgcccaggcctcctgagaccttcctgcggcgggtgacaggctggaaggagcaggtggtgaatggagatgtgggcgctgtgtctgagcccccctgcctgcccaaggagcccgccccacccagccctgagagccacagcccccgggacctggacagcgaggtgttctgtgacagcctggagcagctggagcctgagctggtgtggacagagcagagagctgccagcggcggcaagagggaccccaggaacagccctgtgccccccaccaagaaggagggcctgcggggcagccccccaggcccccaggagctggatgtgtggctgctgggcaccgtgcgggccctgcaggagagcatgcaggaggtgcaggcccgggtgcagagcctggagagcatgccccggcccccagagcagaggccccagccccggcccagcgcccggccctggcccctgggcctgcccggccctgccctgctcttcttcctgctgtggccctttgtggtgcagtggctgttcaggatgttccgcacccagaagaggtag

SEQ ID NO: 216528 - DNA, 918 bp, Artificial Sequence
  derived and/or modified sequence
atgggcaccgagaaggagagccccgagcccgactgccagaagcagtttcaggcagccgtctccgtgatacagaacctgcccaaaaacggaagttacagacctagttacgaggagatgctgcgcttctattcctattacaagcaggcaacaatgggcccgtgtctggtgcccagacctggtttttgggatcccattggccgatataaatgggatgcctggaattcgctggggaaaatgagccgagaggaggctatgtccgcatacatcacagagatgaagttagttgctcaaaaagtgatagacacagtgcccctaggggaagtggccgaggatatgttcggttacttcgagccactgtatcaagtgatccccgatatgccacgccctccagagacattcttgcgccgagtcaccggatggaaagagcaagtggtgaacggggacgtgggggctgtctcagagcccccctgtttgcccaaagagcccgcacccccgtcgcccgagagtcattctccacgcgacctggattccgaagtgttctgcgactccttagaacagctggagccagagcttgtgtggaccgagcagcgtgccgcatccggtggaaagagggatccacggaattcaccggtacctcccactaagaaggaagggctcagaggctcccctcccggcccgcaggagctggacgtgtggctgcttggcaccgtgcgcgcgctgcaggaaagcatgcaagaggttcaggccagagtgcagtctttggagtccatgccacgccctccagaacagcgcccacagcctcgcccctctgctcgcccctggccgctggggctccccggccccgcgcttctcttttttcttctctggccttttgtcgttcagtggctgttccgtatgtttaggacacagaagcggtag

SEQ ID NO: 216529 - DNA, 918 bp, Artificial Sequence
  derived and/or modified sequence
atggggaccgagaaggaatctccagaacccgattgccagaaacaatttcaggctgctgtttctgtcatacaaaacttgcccaagaatgggtcgtacagaccctcttatgaagagatgttacggttctacagctactacaagcaggctacgatgggcccatgtctcgtgccacggccaggcttttgggacccgatcggccgttataagtgggacgcctggaacagccttggtaagatgtcacgcgaagaagcaatgtctgcttatattaccgagatgaagcttgtggcacaaaaggtgatcgacactgtacccctgggagaagtggcagaagacatgttcggctattttgagcccctctatcaagtgattcctgacatgccgcgaccgcctgagacattcctgcggcgtgtgacgggatggaaggaacaggtggtgaacggagatgttggtgccgtcagcgaacccccatgtctgcctaaggagccagcccctccatcgccagagtcccatagccctagggatctggatagtgaggtgttttgcgactccctggagcagctagagcctgaactcgtatggacagaacaaagagctgcttctggaggaaaacgcgaccccaggaactctcccgtccctcccacaaagaaagagggactcagggggtcgccacctggtccccaggagctcgatgtctggctcttaggaaccgtccgggcactgcaggaaagtatgcaagaggtccaggccagggttcagagcttagagtccatgccaagaccacccgagcaaagacctcagccccgacccagcgcccgaccgtggcctctgggtctgcctgggccagcactactattctttctcctttggccatttgtggtgcagtggctgttccggatgttccggacacagaagaggtag

SEQ ID NO: 216530 - protein, 1779 aa, Artificial Sequence
  derived and/or modified sequence
MAAVTMSVPGRKAPPRPGPVPEAAQPFLFTPRGPSAGGGPGSGTSPQVEWTARRLVWVPSELHGFEAAALRDEGEEEAEVELAESGRRLRLPRDQIQRMNPPKFSKAEDMAELTCLNEASVLHNLRERYYSGLIYTYSGLFCVVINPYKQLPIYTEAIVEMYRGKKRHEVPPHVYAVTEGAYRSMLQDREDQSILCTGESGAGKTENTKKVIQYLAHVASSPKGRKEPGVPGELERQLLQANPILEAFGNAKTVKNDNSSRFGKFIRINFDVAGYIVGANIETYLLEKSRAIRQAKDECSFHIFYQLLGGAGEQLKADLLLEPCSHYRFLTNGPSSSPGQERELFQETLESLRVLGFSHEEIISMLRMVSAVLQFGNIALKRERNTDQATMPDNTAAQKLCRLLGLGVTDFSRALLTPRIKVGRDYVQKAQTKEQADFALEALAKATYERLFRWLVLRLNRALDRSPRQGASFLGILDIAGFEIFQLNSFEQLCINYTNEKLQQLFNHTMFVLEQEEYQREGIPWTFLDFGLDLQPCIDLIERPANPPGLLALLDEECWFPKATDKSFVEKVAQEQGGHPKFQRPRHLRDQADFSVLHYAGKVDYKANEWLMKNMDPLNDNVAALLHQSTDRLTAEIWKDVEGIVGLEQVSSLGDGPPGGRPRRGMFRTVGQLYKESLSRLMATLSNTNPSFVRCIVPNHEKRAGKLEPRLVLDQLRCNGVLEGIRICRQGFPNRILFQEFRQRYEILTPNAIPKGFMDGKQACEKMIQALELDPNLYRVGQSKIFFRAGVLAQLEEERDLKVTDIIVSFQAAARGYLARRAFQKRQQQQSALRVMQRNCAAYLKLRHWQWWRLFTKVKPLLQVTRQDEVLQARAQELQKVQELQQQSAREVGELQGRVAQLEEERARLAEQLRAEAELCAEAEETRGRLAARKQELELVVSELEARVGEEEECSRQMQTEKKRLQQHIQELEAHLEAEEGARQKLQLEKVTTEAKMKKFEEDLLLLEDQNSKLSKSGSCWKIVWPSSHPRQLRRRRRSRASISYGSNMRPQSQTWRDRLRKEEKGRQELEKLKRRLDGESSELQEQMVEQQQRAEELRAQLGRKEEELQAALARAEDEGGARAQLLKSLREAQAALAEAQEDLESERVARTKAEKQRRDLGEELEALRGELEDTLDSTNAQQELRSKREQEVTELKKTLEEETRIHEAAVQELRQRHGQALGELAEQLEQARRGKGAWEKTRLALEAEVSELRAELSSLQTARQEGEQRRRRLELQLQEVQGRAGDGERARAEAAEKLQRAQAELENVSGALNEALLSSKDDVGKSVHELERACRVAEQAANDLRAQVTELEDELTAAEDAKLRLEVTVQALKTQHERDLQGRDEAGEERRRQLAKQLRDAEVERDEERKQRTLAVAARKKLEGELEELKAQMASAGQGKEEAVKQLRKMQAQMKELWREVEETRTSREEIFSQNRESEKRLKGLEAEVLRLQEELAASDRARRQAQQDRDEMADEVANGNLSKAAILEEKRQLEGRLGQLEEELEEEQSNSELLNDRYRKLLLQVESLTTELSAERSFSAKAESGRQQLERQIQELRGRLGEEDAGARARHKMTIAALESKLAQAEEQLEQETRERILSGKLVRRAEKRLKEVVLQVEEERRVADQLRDQLEKGNLRVKQLKRQLEEAEEEASRAQAGRRRLQRELEDVTESAESMNREVTTLRNRLRRGPLTFTTRTVRQVFRLEEGVASDEEAEEAQPGSGPSPEPEGSPPAHPQ

SEQ ID NO: 216531 - protein, 205 aa, Artificial Sequence
  derived and/or modified sequence
MSNFLHLKYNEKSVSVTKALTVRFLTKRFIGEYASNFESIYKKHLCLERKQLNLEIYDPCSQTQKAKFSLTSELHWADGFVIVYDISDRSSFAFAKALIYRIREPQTSHCKRAVESAVFLVGNKRDLCHVREVGWEEGQKLALENRCQFCELSAAEQSLEVEMMFIRIIKDILINFKLKEKRRPSGSKSMAKLINNVFGKRRKSV

SEQ ID NO: 216532 - DNA, 618 bp, Artificial Sequence
  derived and/or modified sequence
atgtcgaacttcctacatctaaagtataatgagaaatccgtatccgtcaccaaagccctgaccgttcggttcctcactaaacgttttatcggggagtacgcctccaatttcgagtctatatacaagaagcatctgtgcctagaacgcaagcaactgaacttggaaatctatgatccatgctcacaaacgcagaaggctaaattttcgctgacgtctgagctgcactgggccgatggatttgtaatcgtgtatgatatcagtgataggtcttcattcgccttcgccaaggcactgatttaccgaattcgggaacctcaaacaagtcactgtaagagggccgtggaatccgctgttttcctcgtgggaaataagagagacctttgccacgttagggaggtaggttgggaggaaggtcaaaagctggcactggaaaatagatgtcaattctgtgagctatctgcagcagagcagagcctggaggtggagatgatgttcattcgcatcataaaggacatcttaataaacttcaagttaaaagaaaagcgcagaccatctggcagcaagtctatggcaaaattaattaacaatgtctttggaaagcgccgtaagagtgtgtag

SEQ ID NO: 216533 - DNA, 618 bp, Artificial Sequence
  derived and/or modified sequence
atgagcaacttcctgcacctgaagtacaacgagaagagcgtgagcgtgaccaaggccctgaccgtgagattcctgaccaagagattcatcggcgagtacgccagcaacttcgagagcatctacaagaagcacctgtgcctggagagaaagcagctgaacctggagatctacgacccctgcagccagacccagaaggccaagttcagcctgaccagcgagctgcactgggccgacggcttcgtgatcgtgtacgacatcagcgacagaagcagcttcgccttcgccaaggccctgatctacagaatcagagagccccagaccagccactgcaagagagccgtggagagcgccgtgttcctggtgggcaacaagagagacctgtgccacgtgagagaggtgggctgggaggagggccagaagctggccctggagaacagatgccagttctgcgagctgagcgccgccgagcagagcctggaggtggagatgatgttcatcagaatcatcaaggacatcctgatcaacttcaagctgaaggagaagagaagacccagcggcagcaagagcatggccaagctgatcaacaacgtgttcggcaagagaagaaagagcgtgtag

SEQ ID NO: 216534 - DNA, 618 bp, Artificial Sequence
  derived and/or modified sequence
atgtctaatttcttgcacctcaaatataatgaaaagagcgtgagtgtcaccaaggcattgacggtacgcttcctgactaaacgcttcattggcgaatatgctagtaatttcgagtctatttacaagaagcacttgtgccttgagaggaagcagctgaacctcgagatctacgacccttgttcacagacacagaaagcgaagttctctctaacttccgagcttcattgggcagatggttttgtcattgtctacgatatttcggacaggtcctctttcgcattcgctaaagcactgatttacaggatccgcgagccgcagacctcccactgtaaacgagccgtggaaagtgccgtgttcttggtagggaacaagcgggatctctgtcacgtgcgagaggtgggttgggaagagggccagaagctggcgctagagaatagatgccagttttgtgaactgtctgcggctgaacagagtctggaagtcgagatgatgtttattagaattattaaggatattcttattaactttaaactaaaggagaagcgcaggcctagtggctccaaaagcatggccaaattgatcaacaacgtattcggtaagcgcagaaagtccgtatag

SEQ ID NO: 216535 - DNA, 618 bp, Artificial Sequence
  derived and/or modified sequence
atgagcaacttcctgcacctgaagtacaatgagaagtctgtgtctgtgaccaaggccctgactgtgcgcttcctgaccaagcgcttcatcggggagtatgccagcaactttgagagcatctacaagaagcacctgtgcctggagaggaagcagctgaacctggagatctatgacccctgcagccagacccagaaggccaagttcagcctgaccagcgagctgcactgggcagatggcttcgtcatcgtgtatgacatcagtgacaggagcagctttgcctttgccaaggccctgatctaccgcatccgggagccccagaccagccactgcaagagagctgtggagagcgctgtgttcctggtgggcaacaagagggacctgtgccacgtgcgggaggtgggctgggaggagggccagaagctggccctggagaaccgctgccagttctgtgagctgtctgctgctgagcagagcctggaggtggagatgatgttcatccgcatcatcaaggacatcctgatcaacttcaagctgaaggagaagaggcggcccagcggcagcaagtccatggccaagctgatcaacaacgtgtttgggaagaggaggaagtctgtgtag

SEQ ID NO: 216536 - DNA, 618 bp, Artificial Sequence
  derived and/or modified sequence
atgagcaacttcctgcacctgaagtacaacgagaagagcgtgagcgtgacaaaagccctcactgtaaggttcctgactaagaggtttattggagagtacgcgtcgaattttgaaagtatctataagaagcacttgtgcctggagcggaaacaattaaacctagagatttatgatccttgctcccaaactcagaaagccaagttcagcctgacatccgagctccattgggccgatggattcgtgatagtttacgatatatctgacaggagctcttttgccttcgcgaaagctctcatttatagaatccgggagccacagacaagtcattgtaagagagcggtcgaaagcgccgtcttccttgtgggaaataaaagggacctgtgccacgtgagggaagtaggctgggaagagggccagaagttggccctggagaaccgctgccagttctgtgagctctccgcagccgagcagagtcttgaggtggagatgatgttcatcaggattatcaaggacatcctaattaactttaagctcaaggagaaaagaagaccatcgggtagtaaaagtatggcaaagctaatcaataacgtgttcgggaaacgccggaaaagcgtatag

SEQ ID NO: 216537 - DNA, 1147 bp, Artificial Sequence
  derived and/or modified sequence
acagggcagtgtagttccagaaaataggactgaccaagaagcagaaaagcaagatgaatgatgtgaagcttgctgtcttgggtggtgaaggaacaggcaaatctggtccctacatccttaaataactgcaaatacttggtagtgtctttgtgactattacacatagtaccttgaagccagactgagtttgacagagaaaataaacagatgtcaaacttcttgcatctcaaatataatgagaaatctgtttctgttacaaaagcccttacagtgaggtttcttactaagcgattcattggagaatatgcttctaattttgaatctatctataagaagcacttgtgtttggaaaggaaacaactaaatctagaaatatatgacccttgttctcaaacacagaaagcaaaattctccctcacaagtgagcttcactgggcagatgggtttgttattgtgtatgacatcagtgataggtcttcatttgcttttgcaaaagcgctgatctacagaatccgggagccacaaactagtcattgtaaaagagctgtggaatcagcagtgtttttggttggcaacaaacgagatctttgtcatgtgcgagaggttggctgggaagaagggcaaaagctggcactggaaaaccgatgccaattctgtgaactgtctgcagcagagcagtctctggaggtggaaatgatgtttatcagaattatcaaggacatcctgataaacttcaaactcaaagaaaagagacgtcccagtggatctaaatcaatggccaaattgatcaataatgtatttggaaagagaaggaaatctgtttagtagacaggtaatcctgggagatttcctatatcagagagtttcaaacattcacatgataattaaactaacctttgtatgcaatttttttttggtaaaaagaattctcttggagatatgaaatgattgagtatgaaccacagctgtgttttcaaatatgtagtttgcctttttggttgttgtaccctgctcactctccttcacacagaacctttcatttattgtacaacatcacactcaccctaacctactggcggacagcgatcccagtttgccttgccaaataaactctgtttatgtgaatttattaaacgaccatgccata

SEQ ID NO: 216538 - protein, 1002 aa, Artificial Sequence
  derived and/or modified sequence
MAAHEWDWFQREELIGQISDIRVQNLQVERENVQKRTFTRWINLHLEKCNPPLEVKDLFVDIQDGKILMALLEVLSGRNLLHEYKSSSHRIFRLNNIAKALKFLEDSNVKLVSIDAAEIADGNPSLVLGLIWNIILFFQIKELTGNLSRNSPSSSLSPGSGGTDSDSSFPPTPTAERSVAISVKDQRKAIKALLAWVQRKTRKYGVAVQDFAGSWRSGLAFLAVIKAIDPSLVDMKQALENSTRENLEKAFSIAQDALHIPRLLEPEDIMVDTPDEQSIMTYVAQFLERFPELEAEDIFDSDKEVPIESTFVRIKETPSEQESKVFVLTENGERTYTVNHETSHPPPSKVFVCDKPESMKEFRLDGVSSHALSDSSTEFMHQIIDQVLQGGPGKTSDISEPSPESSILSSRKENGRSNSLPIKKTVHFEADTYKDPFCSKNLSLCFEGSPRVAKESLRQDGHVLAVEVAEEKEQKQESSKIPESSSDKVAGDIFLVEGTNNNSQSSSCNGALESTARHDEESHSLSPPGENTVMADSFQIKVNLMTVEALEEGDYFEAIPLKASKFNSDLIDFASTSQAFNKVPSPHETKPDEDAEAFENHAEKLGKRSIKSAHKKKDSPEPQVKMDKHEPHQDSGEEAEGCPSAPEETPVDKKPEVHEKAKRKSTRPHYEEEGEDDDLQGVGEELSSSPPSSCVSLETLGSHSEEGLDFKPSPPLSKVSVIPHDLFYFPHYEVPLAAVLEAYVEDPEDLKNEEMDLEEPEGYMPDLDSREEEADGSQSSSSSSVPGESLPSASDQVLYLSRGGVGTTPASEPAPLAPHEDHQQRETKENDPMDSHQSQESPNLENIANPLEENVTKESISSKKKEKRKHVDHVESSLFVAPGSVQSSDDLEEDSSDYSIPSRTSHSDSSIYLRRHTHRSSESDHFSYVQLRNAADLDDRRNRILTRKANSSGEAMSLGSHSPQSDSLTQLVQQPDMMYFILFLWLLVYCLLLFPQLDVSRL

SEQ ID NO: 216539 - DNA, 3009 bp, Artificial Sequence
  derived and/or modified sequence
atggctgctcatgagtgggactggtttcagagagaagaactaatcggccagatcagcgatatcagagtgcagaacttgcaggtggagagggagaatgtgcaaaagcggacgtttactaggtggataaatttgcacctggaaaagtgcaaccctccactggaggtaaaagacctgtttgtggatatccaggacggaaagatactgatggccctgctggaggttttatctggccggaacctgctgcacgagtataagagctccagccatagaatcttccgcctgaacaacattgccaaagcgctcaaatttctggaggatagcaatgtgaagctggtgtcaattgatgccgctgaaattgccgacggcaatccctcgctggtactcggcctgatctggaacatcattctgtttttccagattaaggaattaacaggcaatctgagtcggaactctccgtcaagcagcttgtcaccaggatcaggggggactgacagtgacagtagttttccccccactccaactgccgagagatctgtggctattagcgtaaaagatcagaggaaagcaatcaaagccctgctcgcatgggtccaacggaaaaccagaaagtatggagtggccgtgcaggattttgctggcagttggaggtctggacttgcatttctcgccgtcataaaggcgatcgacccgtcccttgtagatatgaagcaggctcttgagaacagtacccgcgagaacctcgagaaagcattttctatcgcacaggacgccctgcacataccccggctgctggaacccgaggacattatggtcgatacgcctgatgaacagtccatcatgacctacgtggcacagtttctggagcgcttcccagagctggaagctgaggacattttcgacagcgacaaagaagtcccaatcgaatccaccttcgtcaggataaaggaaactccctccgagcaagagagtaaggtgtttgtgctaacagagaacggcgagcgcacctacaccgtcaatcacgaaaccagtcatccgccaccttcgaaagtgtttgtgtgcgataagccggaatcaatgaaagaatttcggttggacggtgtgagctcccatgccctcagcgacagtagcacagagttcatgcaccagatcattgatcaggtcctccagggtgggcccggaaagaccagcgatatatcggagccatctcccgagtcctccattctctcgagtcgcaaggagaacggacgttctaactcactcccgattaagaagactgtgcattttgaggccgatacatataaggatccattctgctcgaaaaacttgtctctgtgcttcgaaggttcccctagagtcgctaaggaatcccttagacaggacggccatgtgttggccgtagaagttgccgaggagaaagagcagaagcaggagagctccaagattcccgagagtagctcagacaaagtggccggcgatatcttccttgtggaaggcactaacaataactcccagagctccagctgtaatggcgccttggagagtaccgcgcgccacgatgaggaatcccactccctcagccctcctggggaaaacacagttatggccgatagcttccagattaaagtgaacctcatgaccgtcgaggcactagaggaaggcgattacttcgaggcaattccccttaaagcatccaagtttaatagtgatttgatcgactttgccagcacttcccaggcgttcaataaagtgccttctccccatgagacaaagcccgatgaggacgccgaagcgttcgagaaccacgcagagaagctgggaaagcgctccatcaagagtgcacacaagaaaaaagactcacccgagccacaggtcaaaatggataagcacgagcctcaccaggactcaggtgaggaggctgagggatgcccaagtgcccccgaagagacaccggtggataaaaaacccgaagttcacgagaaagccaaaaggaagagtacgagaccccactatgaggaagagggcgaggatgacgaccttcagggtgttggcgaggaactttccagctctccccctagttcttgcgtcagtctggaaacgctggggagccattcggaggaagggctggactttaaaccttcacccccgctttctaaggtatcagtgatccctcacgatctgttctattttccccactacgaggtccccctggcagccgtgctggaggcttatgtagaagaccctgaggacttaaagaacgaggaaatggatctagaagaacctgaagggtatatgcccgacctggatagtcgagaggaggaggcagacggctcccagagctctagctctagctccgtgcccggcgagtccctccccagcgcctccgatcaggtgctatatttaagccgggggggagttggtaccactcccgcgtcggagcctgcaccacttgctccccatgaggaccatcagcaaagggagacaaaggagaacgacccgatggatagccatcagtcacaagagtcgccaaacttggaaaacatcgctaacccactagaagagaacgttacgaaggaaagtatctcgtcgaagaaaaaggaaaagaggaagcacgtcgatcatgtggagtccagtctgttcgtggccccggggtctgtgcagagttcagatgacctagaagaagattcctctgactactcaattccatcccggacaagccactccgacagtagtatttacttacgcaggcacacgcatcgctcaagtgaaagtgaccacttctcttatgtacagctcaggaatgcagccgacttagatgataggcgcaacaggattttaacgcggaaggcaaactcctccggtgaggcaatgagtctcggtagtcacagcccgcagtcagattctctcacccagctagtccagcaacccgatatgatgtattttatcctgtttctctggctcctcgtgtactgtctgctcctgtttccccagctcgacgtgtctcggctatag

SEQ ID NO: 216540 - DNA, 3009 bp, Artificial Sequence
  derived and/or modified sequence
atggccgcccacgagtgggactggttccagcgggaggagctgattggccagatcagtgacatccgggtgcagaacctgcaggtggagagagaaaatgtgcagaagaggaccttcacccgctggatcaacctgcacctggagaagtgcaacccccccctggaggtgaaggacctgtttgtggacatccaggacggcaagatcctgatggccctgctggaggtgctgagcggcaggaacctgctgcacgagtacaagagcagcagccaccgcatcttccggctgaacaacatcgccaaggccctgaagttcctggaggacagcaatgtgaagctggtgtccattgatgctgctgagattgctgatggcaaccccagcctggtgctgggcctcatctggaacatcatcctcttcttccagatcaaggagctgaccggcaacctgagcaggaacagccccagcagcagcctgagccctggcagcggcggcacagacagcgacagcagcttcccccccacccccacagctgagaggtctgtggccatctctgtgaaggaccagaggaaggccatcaaggccctgctggcctgggtgcagaggaagaccaggaaatatggagtggccgtgcaggactttgctggctcctggaggagcggcctggccttcctggccgtcatcaaggccatcgaccccagcctggtggacatgaagcaggccctggagaacagcacccgggagaacctggagaaggccttcagcatcgcccaggatgccctgcacatcccccggctgctggagcctgaggacatcatggtggacaccccagatgagcagagcatcatgacctacgtggcccagttcctggagcgcttccctgagctggaggccgaggacatctttgacagcgacaaggaggtgcccatcgagagcacctttgtgcgcatcaaggagaccccatctgagcaggagagcaaggtgtttgtgctgacagaaaatggagagaggacctacacagtgaaccacgagaccagccaccccccacccagcaaggtgtttgtgtgtgacaagccagagagcatgaaggagttccggctggatggagtgagcagccacgccctgagtgacagcagcacagagttcatgcaccagatcatcgaccaggtgctgcagggcggccctgggaagaccagtgacatcagcgagcccagccctgagagcagcatcctgagcagcaggaaagaaaatggccgcagcaacagcctgcccatcaagaagacagtgcactttgaggccgacacctacaaggaccccttctgcagcaagaacctgagcctgtgctttgagggcagcccccgggtggccaaggagagcctgcggcaggacggccacgtgctggccgtggaggtggccgaggagaaggagcagaagcaggagagcagcaagatccctgagagcagcagtgacaaggtggccggggacatcttcctggtggagggcaccaacaacaacagccagagcagcagctgcaatggagccctggagagcacagcccggcatgatgaggagagccacagcctgagccccccaggagagaacacagtgatggctgacagcttccagatcaaggtgaacctgatgacagtggaggccctggaggagggggactactttgaggccatccccctgaaggccagcaagttcaacagcgacctgattgactttgccagcaccagccaggccttcaacaaggtgcccagcccccatgagaccaagccagatgaagatgctgaggcctttgaaaatcatgctgagaagctgggcaagaggagcatcaagagcgcccacaagaagaaggacagccctgagccccaggtgaagatggacaagcatgagccccaccaggacagcggggaggaggccgagggctgccccagcgcccctgaggagacccctgtggacaagaagccagaggtgcatgagaaggccaagaggaagagcacccggccccactatgaggaggagggagaagatgatgacctgcagggcgtgggggaggagctgagcagcagcccccccagcagctgtgtgtccctggagaccctgggcagccacagcgaggagggcctggacttcaagcccagcccccccctgagcaaggtgtctgtcatcccccatgacctcttctacttcccccactatgaggtgcccctggccgctgtgctggaggcctacgtggaggaccctgaggacctgaagaatgaggagatggacctggaggagcctgagggctacatgccagacctggacagccgggaggaggaggctgatggcagccagagcagcagcagcagctctgtgcctggagagagcctgcccagcgccagtgaccaggtgctgtacctgagcagaggaggagtgggcaccaccccagccagcgagcccgcccccctggcccctcatgaggaccaccagcagcgggagaccaaggaaaatgaccccatggacagccaccagagccaggagagccccaacctggagaacatcgccaaccccctggaggagaatgtgaccaaggagagcatcagcagcaagaagaaggagaagaggaagcacgtggaccacgtggagagcagcctgtttgtggcccctggctctgtgcagagcagtgatgacctggaggaggacagcagtgactacagcatccccagcaggaccagccacagcgacagcagcatctacctgcggcggcacacccacaggagcagcgagagtgaccacttctcctatgtgcagctgagaaatgctgctgacctggatgacagaagaaaccgcatcctgaccaggaaggccaacagcagcggggaggccatgagcctgggcagccacagcccccagagcgacagcctgacccagctggtgcagcagcctgacatgatgtacttcatcctcttcctgtggctgctggtgtactgcctgctgctcttcccccagctggatgtgtcccggctgtag

SEQ ID NO: 216541 - DNA, 3009 bp, Artificial Sequence
  derived and/or modified sequence
atggccgcccacgagtgggactggttccagcgggaggagctgatcggacaaatatctgacatcagggtacaaaacttgcaggtggaaagagagaatgtccagaaacggacattcaccagatggattaacctgcacttggagaaatgtaacccacccctcgaggtgaaggacctgtttgtggacattcaggacggcaagattctgatggcactcttggaggtccttagtggacgcaaccttttacacgagtataagagttcttcccacagaatcttcagactgaataatatagcaaaggccttaaagtttttagaggattctaatgttaaattagtctccattgatgcggcagagatcgcagacggaaaccccagcctggtgttgggtctcatctggaacatcattctttttttccaaattaaggaactgacaggaaacctgtcccgcaacagtcctagctcttcactatcacctggaagtggtggtaccgactccgattcatccttcccgccaactcccacggccgagcgttctgtggcaatttctgtcaaggaccagcgcaaggcaataaaggctcttttggcatgggttcaaagaaaaacaagaaaatatggcgtggccgtgcaggatttcgccgggtcctggcgctccggacttgcattcctcgctgtgatcaaagcaatcgatccgagtttggtggacatgaagcaggccctagagaacagcacaagagagaacctggagaaagcatttagcatcgcccaagatgcactgcacatacctaggctgctggagcccgaggatatcatggtggacacacctgacgagcagtctatcatgacgtacgtggcccagttcctcgaaagatttccggaactggaggctgaggacatcttcgattctgataaagaagtgcctatcgaaagcacctttgtcagaataaaggagactcctagtgagcaggagtccaaggtcttcgtcctcaccgagaacggagaacgaacgtacacagttaaccatgagacctcacaccccccacccagtaaagtgttcgtttgtgacaagcccgaaagtatgaaggaattcagactcgatggagttagctctcacgcactgtccgatagctccacagagtttatgcatcaaattatcgaccaggtgttgcagggcggcccagggaagacttcagatatcagtgagcctagtcccgaaagctctatcctcagtagtagaaaagaaaacggaaggagcaattccctccccatcaagaaaacggtgcacttcgaagctgacacctataaagacccattctgttcaaagaatctgtctctgtgcttcgagggttcacctagggtcgctaaggaaagtctgcggcaagatggtcatgtgctcgcggttgaagtggccgaagagaaagaacagaagcaggaaagctccaagatccctgaatcctcatccgataaagtagcaggcgacatctttttagtggaaggaactaacaataactctcagtcaagctcctgcaacggcgccttagagagtactgctcgccatgacgaggagagtcactcgctgtcaccaccaggggaaaacaccgtgatggccgatagcttccagatcaaggttaacttaatgactgtggaggctcttgaagagggagattatttcgaggcgatccccttgaaagccagcaaatttaattctgaccttatcgactttgcatcaacctcccaggctttcaacaaagtccctagcccacacgaaaccaagccagatgaagacgccgaggcatttgagaaccatgcggagaagctgggaaaacgcagtattaaatctgctcacaaaaagaaagatagcccagagcctcaggtgaagatggacaaacatgaaccgcaccaggattctggcgaagaggctgaaggctgcccctccgccccagaagaaacccccgtagataagaagcccgaggtgcacgagaaggccaagcggaagtccacgaggcctcactatgaggaagaaggagaggatgacgatctacaaggggttggcgaagaactgagtagcagccctcccagcagctgcgtttccttggagactctgggaagtcatagcgaggaaggattggacttcaagccatctccccctctgtcaaaagtgtcggtgattcctcacgaccttttctatttcccacactatgaagtgcccctggcagcggtgttggaagcttatgtcgaagacccggaagacctgaagaacgaggaaatggacctggaggagccagagggctatatgccggatctcgactcccgtgaagaagaagctgatggctcccaaagcagtagttctagcagcgtccctggagaatcacttcccagtgccagtgatcaggtactctacctttctaggggcggggtgggaactacgcccgcttcagaaccagcgcccttagcaccccacgaagatcatcagcagcgagagacgaaagaaaacgaccccatggatagccaccagtcgcaggagtcacccaatttagagaacatagccaaccccctagaggaaaacgtgactaaggagagcatctcttccaagaagaaagagaaacgaaagcacgtggatcacgtagaatcctccctttttgtcgctccgggctctgtgcagagttccgacgacctggaggaagactcatccgattacagtatcccctcacggacgagccattcagatagtagcatctatctacgccggcatacccacaggtctagtgaatcggatcacttttcctatgtccagctcaggaatgcagccgatctggatgaccgtcgtaaccggattctcactaggaaagcgaattcgtccggcgaggccatgtcgctcggaagccactctccccagtccgactcactgacccaactcgtacagcagcctgacatgatgtatttcatcctgtttctgtggctccttgtgtactgtctcttgctcttcccccagctggatgtgtcaaggctatag

SEQ ID NO: 216542 - DNA, 3009 bp, Artificial Sequence
  derived and/or modified sequence
atggccgcacacgagtgggattggttccagagggaagagcttataggccaaatctcggatattagggtgcagaacctgcaagtcgaaagggagaatgtccaaaagcgaacctttacacggtggatcaatctacacctcgagaaatgcaaccctcctctcgaggtgaaggacctctttgtggatatccaagatgggaaaattctcatggccctcctggaggtcctgtctggaagaaacttgcttcacgaatataagagcagttcccatcgcatatttagattgaataacatagccaaagcgcttaagtttcttgaggacagcaacgtcaagttagtctcaatcgacgctgccgaaatagctgatggaaatccaagcctggttctcggtctcatctggaacattattttattttttcagattaaggaactgactggcaacctctcccgcaactctccaagctcttctttaagtcctgggtctggcggtaccgattctgactcttcatttccacctacgcctacagcagagcgctccgtggcaatcagcgtgaaggaccagcgcaaagcaatcaaggcactgcttgcttgggtgcagagaaagactcgcaagtacggcgttgcggtccaggacttcgcgggtagttggcggtccgggcttgcctttctcgccgtcattaaggctatcgatcctagtctggtggacatgaaacaggcactcgagaactcgactagagaaaaccttgagaaagcattttctattgcgcaggatgcactgcacattccacggttgcttgaacctgaggatatcatggtggatactcccgatgaacagtctataatgacatatgtcgcccagttcctggagcgttttcctgaactggaagctgaagatatctttgacagcgacaaggaagtcccaattgagtctaccttcgtgaggattaaagagacaccgtctgaacaggagagcaaggtgttcgtgctcacagaaaacggcgagcgaacatacaccgtcaaccacgaaacatcccacccccctcctagcaaggtgtttgtctgcgacaagccggagtccatgaaggagttcagactggacggcgtttcttcgcacgctctctctgattcctccaccgaattcatgcatcaaatcatcgaccaggtcttgcagggaggcccagggaaaacctcggatatttctgagccgtctccagagagttctattctcagctccaggaaagaaaatggcaggtccaattccttgccaatcaaaaagacagtgcattttgaggctgacacatataaggacccgttctgctcaaaaaacctctcgttatgcttcgaaggcagtcccagagtggcaaaggagagcttgaggcaggacggacacgtgcttgcagtggaggtggccgaagagaaagagcaaaagcaggaatcttcaaagatacctgagagcagctcagacaaagtcgcgggagacatcttcctggtggaaggtacaaacaataactcccagagttcatcctgtaacggcgctctggagtccaccgctcggcacgacgaggagagccacagtctctctcccccaggcgagaacacagtgatggccgatagttttcaaatcaaagtgaacctgatgactgtggaagccctcgaggagggggactatttcgaggccattccactgaaagcctccaaattcaactccgatctcatcgacttcgcgtccacgtcccaagcctttaataaggtcccctcgccacacgagactaaacctgacgaagacgccgaggcattcgagaaccacgccgagaaactaggcaaacgttccatcaagagcgctcataagaaaaaagatagccccgagccccaggtgaaaatggacaagcatgagccccatcaggacagcggagaagaggctgagggatgcccatcagccccagaagagactccagttgataaaaagcccgaggtgcacgaaaaagcaaaaaggaagtcaactaggccccattacgaagaagagggtgaggacgacgatctccaaggtgttggcgaggaactgtcgtctagtcctcctagttcatgtgtgtccttagagaccctgggaagtcactctgaagagggacttgattttaagccctccccgccattgtcaaaggtgtcagtgataccccatgatttgttctatttccctcattacgaggtcccactcgccgctgtgctggaggcatacgttgaagatcctgaagacctgaaaaacgaggagatggatctggaggaaccggagggctacatgccagacctggatagtagagaggaggaggcagatggctctcaatcgagcagttccagcagcgttcctggcgagagcttacccagcgcaagtgaccaggttctgtacctcagtagagggggtgttggcaccacacccgcatcggagcctgcccctctcgcacctcatgaggaccaccaacaaagggaaaccaaagagaatgatcccatggactcacatcagtcccaggagtcacctaatctggaaaatatcgctaaccccttggaggagaatgtgacaaaggaatcaattagctctaagaagaaagaaaagaggaaacacgtagaccacgttgagagctccttgtttgtggctccaggatcagtccagagttcagacgatctggaggaagacagcagtgattattctattccttctcggactagccactcagattctagcatttacctgaggcgccatacccatcgtagcagtgagtccgatcactttagctacgtgcagctgagaaatgccgctgatttggatgatagaagaaataggattctgaccagaaaagccaactctagcggggaggcaatgtcactgggctctcattcaccccagtctgatagccttacacagctggtacaacagcctgatatgatgtatttcatactctttctgtggttgctggtatactgcttgcttctgtttccccagctagatgttagccgattatag

SEQ ID NO: 216543 - DNA, 6289 bp, Artificial Sequence
  derived and/or modified sequence
gactccagctccgcggcgccctcgccgggtgcgtgccgctcgcgcgcccgccagccaggctctccgcgcccgccgcccgcgccgcgctggcccgggctctcccgcccgcgcttcatggctgcacacgagtgggactggttccaacgcgaggagctcatcgggcagattagcgacatccgagtgcagaacctgcaagttgagagggaaaatgtgcagaagaggacctttacacgatggataaatctacatctagaaaagtgcaacccacctctagaagttaaagatttattcgtcgatatacaagatggcaaaatcctaatggctttgttagaagtcctgtctgggcggaatctgctgcacgaatacaaatcctcgtcgcatcgtatttttcggttgaacaacatagcgaaagcacttaagtttttggaagatagcaatgtaaaactggttagcattgatgcagcagaaatagcagatggcaacccttctttggttcttgggctgatatggaacataatcctcttcttccagattaaggagctcacaggcaacctcagcagaaactctccatcttccagcttgtcccctggctcagggggcacagactcagactcatccttcccacccacacccactgcagagaggagcgtggcaatatcggtgaaagaccagaggaaggctatcaaggccctgttggcgtgggtgcagaggaaaacgagaaagtatggcgtggcggtgcaggactttgcgggcagttggaggagtgggctggctttcctggcggtgatcaaggccattgaccccagcctggtggacatgaaacaggccctggaaaattccacacgagaaaatctagagaaggctttcagcatcgcacaggatgccctgcacatccccaggctcctggagccagaagacatcatggttgacacaccagacgagcagtctatcatgacttacgtggcacagtttctagaacgttttccggagttggaagccgaagatattttcgattcagataaagaagttcctatcgaatccacttttgttcgcatcaaagaaactccttctgaacaggagagcaaagtcttcgttctgactgaaaatggggagcgtacctacactgttaaccatgaaaccagccacccaccaccctccaaagtctttgtctgtgacaagcccgagagcatgaaggaattccgcctggatggtgtttccagccatgcgctgtcagacagctccaccgagttcatgcaccagattattgaccaggtcctgcaagggggcccaggtaagaccagcgacatcagtgagccatctccagaatcctccattttatcatccagaaaggagaacgggaggtccaactctttgccgatcaagaaaacagttcactttgaggctgacacctacaaggatcctttctgcagtaagaacctgtccctttgctttgaagggagcccaagagtggcaaaggaatcattgaggcaggatggacatgtcttggcagttgaggttgctgaggaaaaggaacagaaacaggaatcctcgaagattccagaatcctcctctgacaaggtcgctggtgacatttttttggtggagggcacaaacaataattctcagtcttcttcctgtaatggtgctttagagagtacagcccgccacgatgaagaaagtcactctctttcacccccaggagaaaatactgtgatggccgattccttccagatcaaggttaacctgatgactgtagaagctttagaggagggagactattttgaagccatcccattaaaagcctcaaaatttaacagcgacctaatagattttgcttctaccagccaggctttcaacaaagttccttcacctcatgagacaaaacctgacgaggatgctgaggcttttgagaatcatgctgaaaaactaggtaaaaggagtattaaatctgctcacaaaaagaaggattcgccagagcctcaagttaagatggacaaacatgaacctcatcaggactccggagaagaagctgaaggctgtccttcagccccagaagagacaccagtggataaaaagccagaggtgcatgaaaaggccaagagaaagtccacccgtcctcattatgaggaagagggagaagacgatgacctccagggtgtgggcgaggaattatcttccagccccccaagcagctgtgtcagcttggagacccttgggagtcacagcgaagaaggcctggatttcaagccctccccacccctctcaaaggtttccgtcattccccacgacctcttctatttcccacactatgaggttcccctggctgcagttttggaggcttatgtagaagacccggaggatctaaaaaatgaagaaatggatctcgaagagccagagggctatatgccagacctggactccagggaggaggaggccgatggctctcagagcagctccagttcctcggtgccaggagagagcctccccagtgccagcgaccaggtgctgtatctcagcaggggtggtgtgggtaccacaccagcctcagaacccgctccactggccccccatgaggaccaccagcaaagggagaccaaagagaatgaccccatggacagccatcagtcccaggaatccccaaacctggaaaacatagcaaaccccctagaagaaaatgtaacgaaagaatcaatcagtagtaaaaaaaaggaaaaaaggaaacatgtggaccacgtagaaagttcactatttgtagcaccaggaagtgttcaatcctcagatgacctagaagaagacagtagcgactacagcattccttccaggactagtcacagtgactccagcatttaccttcgacgacatactcataggtcttcggaatcggatcattttagctatgttcagttgaggaacgcagcagatctggatgacagaagaaaccgaatattaaccaggaaggccaacagctcaggagaagccatgtcactggggagccacagcccgcagagtgactccctgacacagcttgtccagcagccggatatgatgtattttattctcttcctgtggctcctggtgtactgcttgctgctcttcccacaactggatgttagcaggctctgatacgtgtgtctggataataaaaaagacaggaccctgaccaggggcggggttacttcattttattttgggttctgggtggggcacttctacagacagttgaggacctccgaggaaacttagaccccctttctcgctattgtggtttttttttttttttcaggtttccttttttttctggacaacctgagcatgcttttttctttggctgtgtactcaaaactcaggcatgcagctggatccgtaggtggggttttgtccttgtgtgccttgctgggttggatagggagcattgttagtgatcattagcccgcctggatcttagcacaccccacattgcaggttcacacgctggatgaacttgagtttcttacctctcagatgaagggctgcttaatgagaaagagggtgggcaccccaggccaagccccagctggggagagagctgccacgttttcctccaagcgtgggtgtttgagagaaggtgctggggtccatgcacctgtcgcagtccggtaactggttgcattcactaggggaaatccgagcagccagctctgtgtaagcacatccaggaatggcagaatccagggaggaaggtgaaagctgtgttgagagccactgtgtgctctttttcaccctgttttttttgttgtttttttgttttgttttttgtttgaggggagataacacttgaaattcagttttccattgattggattgagatagaaccatgattttcaaaccagatcgccagggcccagcagggccatataaaagccatgaggagtggctgggctggaatcagctcccagcagtgctggagctgggtggtggggtagcttcctgcccactaaagctttggtgcacacctccctcagaatgcatgtcttggaacgggcattctttgtggtcacttgtaatgggtttcttgaagaggctttctggacagcactccgggagcaggccagcacaggaggtttgtgaaagaagagaggcatctctagcacccctgcccccagtcttcctcagccccaggctccctctgctctctcctccctgccaagactcaggtccgtggtgagtctctgcattggttcctcctccccttgctctccccttcagaaagcatgtaccaggcaacccttataaaatcacaaatgagtcaggaggggactcagtgagcatcttgtctagctggacccagagagacagagcagcttgaccaagatcatatagccgaccaggggcagacttgcagtgagcacacaggcacctgatgccctgtccagagctgtcaccccttgtaggaaacttccactgggcacaccaatgtcctgagaaaaagataaaatgactagattaaaatgtccacattcaagcaaaaccaaaaagtttagaccaactatcgacatttgttttgttcttgtatttttcccatgaggaattcttactcaccttcaagctcatccccaattccttctgaaatacccttgacagctgcaacagcttgtcatttgacataccagcgtcgctcttactccaggaatcacgtttctttctttgctagccaaggacttgctcatttcaagcagtgggtttcaagtttacagaattccagcatggccagaagaatttacatagcacatctgagtcgatgacagccaaaatctggcctctaaaccagtctgattatagtctgtctcccctcctgaaagaatttcagccttccaaccagaaagctgctgggagcttggagtgattccatctggaaggccaagagccccatggaaaatgagctaattaatgagctccctggcatcaatgaaagctcaaaggtacagataataaagattatgtgatagtttataactctgggcaccatgcagtccttgcctaaattagatgctcgaagagcctgggaagagccaacccaaatgtgaatcatttcattttatgggtctagaccttgttcagaaaaacctctgcaagatacttctctcacctattacaacttgtaatattgtttaaaacatctactggcaagatgcctgaaagtcatttggttcaggttggcagtcaactgatattttgcaaaggaaaaaaaaatctcatttgagtataggcttctatggaagaagctggatatagaaaatggatgtggaagtctgcaggacaaaccaccccattgcttgtaaattttttttaaattaaaagaaatacaataaggcttttaacaagaactagcagtcccctaagtctcgctgcttagaagtaaccactttcaactctcttatgtttgcatttctacataacgtgcttacactttattttttaatttagaaacatctactggcttgctgtcacagtagaggaggatttcactcttaccataccgtgctttggttttccagtatagctagatcacatcatttagtacatttctattaggtgttgacattacctggagcacttaaggattgttgactcccaagcccagcagtgtgttatggttacatgtcctttctcctccaaatgtccccattaatttgctattctctctctttactttttttttttttttggtgtggcacattctttaataacttcctgaggaagagaacatgggaagtaaatatggttgtaaatattttgagatttttgcatgacttaagatgtctgtattctgcccttaacagaaatgtggctgagcatagaatgacaggtggaaaataataccctcccctagcccctcccaagcgtgctggttgagatttctgatgccattctgattcccgtacctttatatgtgacttaggtttttttatccacccttcctggaaacatttaagatctctttattcttggtgttctgaactgtcatgatggtgttgtatcccgggtgttaaaccttgtgctgggccttcatgggaaatttcttaaattttcttgtgattatttacattctttctttctggaccacctattatttcaatgttggaccctcccctacacccaggctgatgctctaatattttttatcttttctatttttcgtctatgtttctgatctgctttcaggaagaattattcatttttatcttcccaatctgaatgttttattgaatttttattttccaagttaataaaacctttggttattatcctg

SEQ ID NO: 216544 - DNA, 3009 bp, Artificial Sequence
  derived and/or modified sequence
atggccgcccacgagtgggactggttccagagagaggagctgatcggccagatcagcgacatcagagtgcagaacctgcaggtggagagagagaacgtgcagaagagaaccttcaccagatggatcaacctgcacctggagaagtgcaacccccccctggaggtgaaggacctgttcgtggacatccaggacggcaagatcctgatggccctgctggaggtgctgagcggcagaaacctgctgcacgagtacaagagcagcagccacagaatcttcagactgaacaacatcgccaaggccctgaagttcctggaggacagcaacgtgaagctggtgagcatcgacgccgccgagatcgccgacggcaaccccagcctggtgctgggcctgatctggaacatcatcctgttcttccagatcaaggagctgaccggcaacctgagcagaaacagccccagcagcagcctgagccccggcagcggcggcaccgacagcgacagcagcttcccccccacccccaccgccgagagaagcgtggccatcagcgtgaaggaccagagaaaggccatcaaggccctgctggcctgggtgcagagaaagaccagaaagtacggcgtggccgtgcaggacttcgccggcagctggagaagcggcctggccttcctggccgtgatcaaggccatcgaccccagcctggtggacatgaagcaggccctggagaacagcaccagagagaacctggagaaggccttcagcatcgcccaggacgccctgcacatccccagactgctggagcccgaggacatcatggtggacacccccgacgagcagagcatcatgacctacgtggcccagttcctggagagattccccgagctggaggccgaggacatcttcgacagcgacaaggaggtgcccatcgagagcaccttcgtgagaatcaaggagacccccagcgagcaggagagcaaggtgttcgtgctgaccgagaacggcgagagaacctacaccgtgaaccacgagaccagccaccccccccccagcaaggtgttcgtgtgcgacaagcccgagagcatgaaggagttcagactggacggcgtgagcagccacgccctgagcgacagcagcaccgagttcatgcaccagatcatcgaccaggtgctgcagggcggccccggcaagaccagcgacatcagcgagcccagccccgagagcagcatcctgagcagcagaaaggagaacggcagaagcaacagcctgcccatcaagaagaccgtgcacttcgaggccgacacctacaaggaccccttctgcagcaagaacctgagcctgtgcttcgagggcagccccagagtggccaaggagagcctgagacaggacggccacgtgctggccgtggaggtggccgaggagaaggagcagaagcaggagagcagcaagatccccgagagcagcagcgacaaggtggccggcgacatcttcctggtggagggcaccaacaacaacagccagagcagcagctgcaacggcgccctggagagcaccgccagacacgacgaggagagccacagcctgagcccccccggcgagaacaccgtgatggccgacagcttccagatcaaggtgaacctgatgaccgtggaggccctggaggagggcgactacttcgaggccatccccctgaaggccagcaagttcaacagcgacctgatcgacttcgccagcaccagccaggccttcaacaaggtgcccagcccccacgagaccaagcccgacgaggacgccgaggccttcgagaaccacgccgagaagctgggcaagagaagcatcaagagcgcccacaagaagaaggacagccccgagccccaggtgaagatggacaagcacgagccccaccaggacagcggcgaggaggccgagggctgccccagcgcccccgaggagacccccgtggacaagaagcccgaggtgcacgagaaggccaagagaaagagcaccagaccccactacgaggaggagggcgaggacgacgacctgcagggcgtgggcgaggagctgagcagcagcccccccagcagctgcgtgagcctggagaccctgggcagccacagcgaggagggcctggacttcaagcccagcccccccctgagcaaggtgagcgtgatcccccacgacctgttctacttcccccactacgaggtgcccctggccgccgtgctggaggcctacgtggaggaccccgaggacctgaagaacgaggagatggacctggaggagcccgagggctacatgcccgacctggacagcagagaggaggaggccgacggcagccagagcagcagcagcagcagcgtgcccggcgagagcctgcccagcgccagcgaccaggtgctgtacctgagcagaggcggcgtgggcaccacccccgccagcgagcccgcccccctggccccccacgaggaccaccagcagagagagaccaaggagaacgaccccatggacagccaccagagccaggagagccccaacctggagaacatcgccaaccccctggaggagaacgtgaccaaggagagcatcagcagcaagaagaaggagaagagaaagcacgtggaccacgtggagagcagcctgttcgtggcccccggcagcgtgcagagcagcgacgacctggaggaggacagcagcgactacagcatccccagcagaaccagccacagcgacagcagcatctacctgagaagacacacccacagaagcagcgagagcgaccacttcagctacgtgcagctgagaaacgccgccgacctggacgacagaagaaacagaatcctgaccagaaaggccaacagcagcggcgaggccatgagcctgggcagccacagcccccagagcgacagcctgacccagctggtgcagcagcccgacatgatgtacttcatcctgttcctgtggctgctggtgtactgcctgctgctgttcccccagctggacgtgagcagactgtag

SEQ ID NO: 216545 - protein, 539 aa, Artificial Sequence
  derived and/or modified sequence
MAVCARLCGVGPSRGCRRRQQRRGPAETAAADSEPDTDPEEERIEASAGVGGGLCAGPSPPPPRCSLLELPPELLVEIFASLPGTDLPSLAQVCTKFRRILHTDTIWRRRCREEYGVCENLRKLEITGVSCRDVYAKLLHRYRHILGLWQPDIGPYGGLLNVVVDGLFIIGWMYLPPHDPHVDDPMRFKPLFRIHLMERKAATVECMYGHKGPHHGHIQIVKKDEFSTKCNQTDHHRMSGGRQEEFRTWLREEWGRTLEDIFHEHMQELILMKFIYTSQYDNCLTYRRIYLPPSRPDDLIKPGLFKGTYGSHGLEIVMLSFHGRRARGTKITGDPNIPAGQQTVEIDLRHRIQLPDLENQRNFNELSRIVLEVRERVRQEQQEGGHEAGEGRGRQGPRESQPSPAQPRAEAPSKGPDGTPGEDGGEPGDAVAAAEQPAQCGQGQPFVLPVGVSSRNEDYPRTCRMCFYGTGLIAGHGFTSPERTPGVFILFDEDRFGFVWLELKSFSLYSRVQATFRNADAPSPQAFDEMLKNIQSLTS

SEQ ID NO: 216546 - DNA, 96 bp, Artificial Sequence
  derived and/or modified sequence
atgtccgaaaagacgggtgagccggctgcagagaacagagacaaggaagcaagtgtagcaggggctcagattacactccagacacagaccccttag

SEQ ID NO: 216547 - DNA, 3614 bp, Artificial Sequence
  derived and/or modified sequence
tggagcgtgcgcacaggcggcagcagtggccgtcactgggcggcatggcggtgtgtgctcgcctttgcggcgtgggcccgtcgcgcggatgtcggcgccgccagcagcgccggggcccggccgagacggcggcggccgacagcgagccggacacagaccccgaggaggagcgcatcgaggctagcgccggggtcgggggcggcttgtgcgcgggcccctcgccgccgcccccgcgctgctcgctgctggagctgccgcccgagctgctggtggagatcttcgcgtcgctgccgggcacggacctacccagcttggcccaggtctgcacgaagttccggcgcatcctccacaccgacaccatctggaggaggcgttgccgtgaggagtatggtgtttgcgaaaacttgcggaagctggagatcacaggcgtgtcttgtcgggacgtctatgcgaagctgcttcaccgatatagacacattttgggattgtggcagccagatatcgggccatacggaggactgctgaacgtggtggtggacggcctgttcatcatcgggtggatgtacctgcctccccatgacccccacgtcgatgaccctatgagattcaagcctctgttcaggatccacctgatggagaggaaggctgccacagtggagtgcatgtacggccacaaagggccccaccacggccacatccagattgtgaagaaggatgagttctccaccaagtgcaaccagacggaccaccacaggatgtccggcgggaggcaggaggagtttcggacgtggctgagggaggaatgggggcgcacgctggaggacatcttccacgagcacatgcaggagctcatcctgatgaagttcatctacaccagtcagtacgacaactgcctgacctaccgccgcatctacctgccgcccagccgccccgacgacctcatcaagcctggcctcttcaaaggtacctatggcagccacggcctggagattgtgatgctcagcttccacggccggcgtgccaggggcaccaagatcacgggcgaccccaacatccccgctgggcagcagacagtggagatcgacctgaggcatcggatccagctgcccgacctcgagaaccagcgcaacttcaatgagctctcccgcatcgtcctggaggtgcgcgagagggtgcgccaggagcagcaggaaggcgggcacgaggcgggcgagggtcgtggccggcagggcccccgggagtcccagccaagccctgcccagcccagggcagaggcgcccagcaagggcccagatgggacacctggtgaggatggtggcgagcctggggatgccgtagctgcggccgagcagcctgcccagtgtgggcaggggcagccgttcgtgctgcccgtgggcgtgagctccaggaatgaggactacccccgaacctgcaggatgtgtttttatggcacaggcctcatcgcgggccacggcttcaccagccctgaacgcacccccggggtcttcatcctcttcgatgaggaccgcttcgggttcgtctggctggagctgaaatccttcagcctgtacagccgggtccaggccaccttccggaacgcagatgcgccgtccccacaggccttcgatgagatgctcaagaacattcagtccctcacctcctgaccggccacatccttgccgccacatcccgggtggctctggggctctgaactctgacctgtgaatagaagcagcatgcactttggaaatccggccttttgaccagaacgcacacctcgtcggggggcccagtccagccaccccccagcactttatgtagagagtgtgacatagacctgcatatttgtcagtgccatgatggaagaagctgagcatgtcttaccaaaaacagagagaacgagcctgaatacagcagatgtaggggacagccgtgggaccgcgtgagaattgaagcggtggggttcccgcaccctgggctggctggtggttttctcgggaagcaggaccctcctgactggtgctcttcctgtgagcggatagagtgatagactgggtcgtgtgtgagacgcatgtgctccaccccactccttttgggggaagccaggcaacagtggcctctgggagggggtcaggaagaggcgaacagctcaggcagcgcaggtgtgatgggcacagtacgcagagcaagctcgggaagttggtaggatctcaggcttggggccgggactctggagtgaatccccatttctctaccggcttgcttggagtttggacagaagcatttcacctctgatctcagcttccccacctgtggagtgggtttagtgacctgagtcactagggaatgtcacctgaatgcacagcccagcccatgcacctgccccagcccctccagctttggagccaaggccatcgttccagccacttgactgtcctcgacggcctgttccagacagggcgtttgttttgtccatgccttcctccctgcacgcacacggcgtcaaaaccaagctgccggccactgtctccagaacgcaaggctccaggcccgtgtgtctgaagcagtgagtggtccacacaggtgccaggagtgcccatatgagatgacgaggaaacccctttgcaggtgaggggacagctttctagaaaagccacacctgcatctggggacacactttggaaagtgggaccctccagcctggagaccccatggactgatgcctccactgctgtgtgccccatgttgtgttaacacctgcgtgtggggaccccatctgaggtcttggctgaggttggcatctcctgaagaacagagagcacggtgtccagagctggcccttcccccagcccacagccagctccgtgcccgagtgggcgtccccagcgagccttccctctctgccgcttgtccttgtgtctgggctgctccaagtccttgtgctgggcaccctggacacgtcctgctggtgagggacctcgggaaggtgacagtctgtgtgccttggtgtggagaccaacctgaggatgtcctgggaaatgttttcctgatgaatttctccttgactggcctttaaagaacataagaattcccattgcccagcctcagtgcatttggcaaatgcttactttgcttcccagagtcagagaattggcaaaggttcctaaatggtaatctggccggcctgggagaaagactcacgagaaaagccagtggagaaagcgcccttccagggcggcagcagcgggagccacgcagaccccgaggcgcacctgctggctcttgtgtgtggccccagtttctagcggcttttgcagcattagcctacaagctttgtcactccctgccctctgtggtggtcactgtttttctctcttgccaaatgaggcagtctctgagtgacggtgactgtggccttgaagcctggaggactgttgggcatgtagactggcaccttgaagattcaccattgtttaaataaaatcaagcaaatgcttttttaccaagagcccgagcctcgctctaagggacgcagtcctagaggcgtgccctttggggcttgaagagcacactgtgggacgcacgtgcttctgattaaaggaatctcagatctc

SEQ ID NO: 216548 - DNA, 1620 bp, Artificial Sequence
  derived and/or modified sequence
atggccgtatgcgcacgcctgtgtggcgtggggccttctcggggatgccgccgtcgccagcagcgtcgtggtcccgcagagacggcagcagccgactcagagccagacaccgaccccgaagaggaaaggatcgaagctagcgcaggggtgggtggcgggctgtgtgccggtccctcccctccaccaccgcggtgttctctgttagaactcccccctgagttactggtagaaatttttgcatccttacctggcacggacttgcccagcctcgcacaggtctgcacgaaattccgcaggatattgcataccgacactatttggcggcggaggtgtagggaggagtacggagtctgcgaaaacctgcggaaactagagattactggagtttcatgtcgggatgtatacgccaagttgctgcataggtaccggcatattctgggcctctggcagccggatatcggcccctacgggggcctgcttaacgtggtcgtagatggcttgtttatcatcggctggatgtacctcccccctcatgatcctcacgttgatgaccctatgcggtttaagccactgttccggattcatctcatggagcgcaaggccgcaacagtggagtgtatgtatggacacaaaggtccccatcacggtcatatccagattgtgaagaaggatgagttcagcacgaagtgcaaccaaacggatcatcacagaatgagcggcgggcggcaagaggagtttcggacctggctccgtgaggagtgggggagaaccctggaggatattttccatgagcatatgcaggaactgatactaatgaagttcatctacacatctcagtacgataattgtctcacatatagacgcatctacctgcccccatcccgccccgatgacttgataaagcctggactgtttaagggcacgtatggttctcatgggctagaaatcgtaatgctgtcttttcacggcagaagagctcgcggtactaagattaccggagatccaaatatccctgccggccagcagacagtagagattgacctcaggcacaggatccagctacctgaccttgagaaccaaaggaattttaacgagctaagcagaatcgtgctggaggttcgagaacgtgttagacaggagcaacaggagggggggcatgaagctggcgaggggagaggaaggcaaggccctagagaaagccagccgtctccggcccagccacgagctgaggcaccctcaaagggccctgacgggacgcctggagaggatggcggggagcctggtgacgcggtcgctgccgcggaacagccagcacagtgtggccaagggcagccatttgtgcttcctgtgggggtgtccagcagaaacgaggactatccaaggacatgtaggatgtgtttctatgggactgggctcattgcaggacatggctttacatctccagaacggaccccaggagtgtttatcctttttgatgaggaccggttcgggttcgtctggctggaactgaagtccttctctctgtactcaagggtgcaagccacattcagaaatgctgatgcccctagcccacaggccttcgatgaaatgttgaagaacatccaatcattgaccagttag

SEQ ID NO: 216549 - DNA, 1620 bp, Artificial Sequence
  derived and/or modified sequence
atggctgtgtgtgcccggctgtgtggggtgggccccagccggggctgcagaagacggcagcagaggcggggccctgctgagacagctgctgctgacagcgagccagacacagatcctgaggaggagcgcatcgaggccagcgctggggtgggcggcggcctgtgtgccggccccagccccccaccaccccgctgcagcctgctggagctgcccccagagctgctggtggagatctttgccagcctgcctggaacagacctgcccagcctggcccaggtgtgcaccaagttccgccgcatcctgcacacagacaccatctggaggcggcgctgccgggaggagtatggagtgtgtgagaacctgaggaagctggagatcactggagtgtcctgcagagatgtgtatgccaagctgctgcaccgctaccgccacatcctgggcctgtggcagcctgacatcggcccctacggcggcctgctgaatgtggtggtggatggcctcttcatcatcggctggatgtacctgccccctcatgacccccacgtggatgaccccatgaggttcaagcccctcttccgcatccacctgatggagaggaaggccgccaccgtggagtgcatgtatggccacaagggcccccaccacggccacatccagatcgtgaagaaggatgagttcagcaccaagtgcaaccagacagaccaccacaggatgtctgggggccggcaggaggagttccgcacctggctgcgggaggagtggggccgcaccctggaggacatcttccacgagcacatgcaggagctgatcctgatgaagttcatctacaccagccagtatgacaactgcctgacctaccgccgcatctacctgccccccagcaggccagatgacctgatcaagccaggcctcttcaagggcacctacggcagccacggcctggagatcgtgatgctgtccttccacggccggcgggcccggggcaccaagatcaccggggaccccaacatcccagctggccagcagacagtggagattgacctgcggcaccgcatccagctgcctgacctggagaaccagaggaacttcaatgagctgagcagaattgtgctggaggtgcgggagcgggtgcggcaggagcagcaggagggcggccacgaggccggggagggccggggccggcagggcccccgggagagccagcccagccctgcccagcccagggctgaggcccccagcaagggcccagatggcaccccaggagaagatggaggagagcctggagatgctgtggccgctgctgagcagcctgcccagtgtggccagggccagccctttgtgctgcctgtgggcgtgagcagcagaaatgaagactaccccaggacctgcaggatgtgcttctacggcaccggcctgattgctggccacggcttcaccagccctgagaggaccccaggagtcttcatcctgtttgatgaagatcgcttcggctttgtgtggctggagctgaagagcttcagcctgtacagccgggtgcaggccaccttcagaaatgctgatgcccccagcccccaggcctttgatgagatgctgaagaacatccagagcctgaccagctag

SEQ ID NO: 216550 - DNA, 1620 bp, Artificial Sequence
  derived and/or modified sequence
atggccgtgtgcgcccggctgtgcggcgtgggccccagccggggctgccgtaggaggcagcaacgcagaggacccgccgagaccgccgccgccgatagtgaacctgacacagacccagaggaggagagaattgaggcatctgctggagtcggtggaggtctgtgtgcgggaccaagccccccccctcctcggtgcagtcttctggagcttcccccagagctccttgtagagattttcgcctccttaccaggaacagatttgccttccttagcccaggtgtgcactaaatttagaaggatccttcacactgatacaatttggagaagaagatgtagggaagaatacggagtgtgtgaaaacctgcgcaagctggagattaccggagtatcttgtcgtgatgtttatgcgaaactgctgcacaggtatcgccacatcttaggactgtggcaacccgacatcgggccctatggaggcctgctgaatgtggtagttgatggcctctttatcattggctggatgtatttgcccccacacgaccctcatgttgacgaccctatgcggttcaagcccctgttccgtatccacctcatggaacggaaagcagccaccgtggaatgcatgtatggacataagggcccacaccatggccacattcaaatcgttaagaaagatgagtttagtactaagtgtaatcagactgaccatcaccgcatgtccggcggcaggcaggaagagtttcggacctggctacgagaggagtggggcaggacgttagaggacatattccacgagcacatgcaggaactcattctcatgaagtttatttacacttcccagtatgataattgtttgacttacaggaggatatacttgcctccaagcaggcctgacgatctgattaagccaggattgtttaaaggcacttacgggtcacacgggctcgaaattgtcatgctgtccttccacggtaggcgcgccaggggaactaaaataaccggcgatcccaatattcccgctggccaacagactgtggagatcgacttacggcatcggatccagctgccagacctcgaaaatcagagaaactttaatgagttgtctcgcattgtccttgaagtcagagagcgcgtgcggcaggagcagcaggagggaggacacgaggccggggaaggccgcgggaggcagggcccccgcgagagccagccatcccccgcccaacctcgggccgaggcaccatcaaaaggaccagatggtaccccaggcgaagacggcggagagccgggagacgcagtcgcagccgctgagcagcctgctcaatgcgggcagggccagccctttgttctgccagtcggggtgtcctcacggaatgaggattacccacgaacttgtcggatgtgtttttatggcaccggactgatcgctggtcatgggttcacatctcccgagcgcacccctggcgtctttatcctgttcgacgaggatagattcggtttcgtctggttagagcttaagtctttttcactatacagtcgcgtgcaggcgactttcagaaatgccgatgctcccagcccacaggctttcgacgagatgctcaagaacatccagtcattgacatcctag

SEQ ID NO: 216551 - DNA, 1620 bp, Artificial Sequence
  derived and/or modified sequence
atggcagtgtgcgctcggctgtgcggagtaggtcctagtagaggttgccgtagacgccagcagcgacgcggacccgcagaaacagctgcagccgatagtgagcctgatacagatcctgaagaggagaggatcgaggcctccgccggtgtggggggaggcttatgcgccggaccttcccctccacctccacggtgttccttgctggagctccctccagaactccttgtggaaatattcgcctccctacctggcacagatctgccgagcctcgcacaggtttgcacaaaattccggagaatcctgcataccgacactatatggcggaggcgctgtagagaggaatacggagtgtgtgaaaatcttcgcaaactggagatcacaggggtgtcgtgtcgcgacgtttatgctaagctccttcataggtaccggcacatactggggctatggcagcccgatatcggtccatatggagggctgctgaatgtcgtggtggatgggctctttattatcggatggatgtacctaccacctcatgatcctcatgtcgacgacccaatgaggttcaaacccctgttccggatccacctgatggagcgcaaagctgccactgttgagtgtatgtacggccacaaagggcctcaccatggccacatccagattgtgaagaaggacgaatttagcacaaaatgcaatcaaaccgatcaccaccgaatgtccggtggaaggcaggaggaatttaggacatggctgcgggaggagtggggaagaaccctggaggacatttttcatgaacatatgcaggagctgatcctgatgaagtttatctatactagtcagtacgacaattgcctaacctatagacgtatctacctgccaccctcacgccctgatgatctgattaaacctgggctctttaagggtacctatggaagtcatgggctcgagatcgtgatgcttagtttccacgggagaagagccagagggacaaagattactggggatcccaacatccctgccggtcagcagacagtggagatcgatctgcggcaccggatacagctgcctgacctagaaaatcagcgcaactttaatgagctgagccggatagtgcttgaagtcagggaacgcgttcggcaggaacagcaggagggcggacacgaagccggagagggtagaggaagacaaggtccccgtgagagtcagcctagccccgcacagccccgagccgaggcgccaagcaagggcccagacgggactccaggtgaggacggcggagaaccgggagacgccgtcgcagccgcagagcagcccgctcagtgtggtcagggtcagccatttgtcctccccgtgggtgtatcctcccggaacgaagactacccaagaacttgccggatgtgtttctacggaacggggctgattgcaggccatgggttcacctccccagaaaggacaccgggtgtgttcatcctcttcgacgaagatcgctttggttttgtctggttggagctcaaatcgttctccctgtatagtagggtccaggcgacctttagaaacgccgatgccccaagcccacaggcgttcgacgagatgctgaagaacattcagtcgctgacaagttag

SEQ ID NO: 216552 - DNA, 1620 bp, Artificial Sequence
  derived and/or modified sequence
atggccgtgtgcgccagactgtgcggcgtgggccccagcagaggctgcagaagaagacagcagagaagaggccccgccgagaccgccgccgccgacagcgagcccgacaccgaccccgaggaggagagaatcgaggccagcgccggcgtgggcggcggcctgtgcgccggccccagcccccccccccccagatgcagcctgctggagctgccccccgagctgctggtggagatcttcgccagcctgcccggcaccgacctgcccagcctggcccaggtgtgcaccaagttcagaagaatcctgcacaccgacaccatctggagaagaagatgcagagaggagtacggcgtgtgcgagaacctgagaaagctggagatcaccggcgtgagctgcagagacgtgtacgccaagctgctgcacagatacagacacatcctgggcctgtggcagcccgacatcggcccctacggcggcctgctgaacgtggtggtggacggcctgttcatcatcggctggatgtacctgcccccccacgacccccacgtggacgaccccatgagattcaagcccctgttcagaatccacctgatggagagaaaggccgccaccgtggagtgcatgtacggccacaagggcccccaccacggccacatccagatcgtgaagaaggacgagttcagcaccaagtgcaaccagaccgaccaccacagaatgagcggcggcagacaggaggagttcagaacctggctgagagaggagtggggcagaaccctggaggacatcttccacgagcacatgcaggagctgatcctgatgaagttcatctacaccagccagtacgacaactgcctgacctacagaagaatctacctgccccccagcagacccgacgacctgatcaagcccggcctgttcaagggcacctacggcagccacggcctggagatcgtgatgctgagcttccacggcagaagagccagaggcaccaagatcaccggcgaccccaacatccccgccggccagcagaccgtggagatcgacctgagacacagaatccagctgcccgacctggagaaccagagaaacttcaacgagctgagcagaatcgtgctggaggtgagagagagagtgagacaggagcagcaggagggcggccacgaggccggcgagggcagaggcagacagggccccagagagagccagcccagccccgcccagcccagagccgaggcccccagcaagggccccgacggcacccccggcgaggacggcggcgagcccggcgacgccgtggccgccgccgagcagcccgcccagtgcggccagggccagcccttcgtgctgcccgtgggcgtgagcagcagaaacgaggactaccccagaacctgcagaatgtgcttctacggcaccggcctgatcgccggccacggcttcaccagccccgagagaacccccggcgtgttcatcctgttcgacgaggacagattcggcttcgtgtggctggagctgaagagcttcagcctgtacagcagagtgcaggccaccttcagaaacgccgacgcccccagcccccaggccttcgacgagatgctgaagaacatccagagcctgaccagctag

SEQ ID NO: 216553 - protein, 484 aa, Artificial Sequence
  derived and/or modified sequence
MGSAFERVVRRVVQELDHGGEFIPVTSLQSSTGFQPYCLVVRKPSSSWFWKPRYKCVNLSIKDILEPDAAEPDVQRGRSFHFYDAMDGQIQGSVELAAPGQAKIAGGAAVSDSSSTSMNVYSLSVDPNTWQTLLHERHLRQPEHKVLQQLRSRGDNVYVVTEVLQTQKEVEVTRTHKREGSGRFSLPGATCLQGEGQGHLSQKKTVTIPSGSTLAFRVAQLVIDSDLDVLLFPDKKQRTFQPPATGHKRSTSEGAWPQLPSGLSMMRCLHNFLTDGVPAEGAFTEDFQGLRAEVETISKELELLDRELCQLLLEGLEGVLRDQLALRALEEALEQGQSLGPVEPLDGPAGAVLECLVLSSGMLVPELAIPVVYLLGALTMLSETQHKLLAEALESQTLLGPLELVGSLLEQSAPWQERSTMSLPPGLLGNSWGEGAPAWVLLDECGLELGEDTPHVCWEPQAQGRMCALYASLALLSGLSQEPH

SEQ ID NO: 216554 - protein, 114 aa, Artificial Sequence
  derived and/or modified sequence
MGSAFERVVRRVVQELDHGGEFIPVTSLQSSTGFQPYCLVVRKPSSSWFWKPRYKCVNLSIKDILEPDAAEPDVQRGRSFHFYDAMDGQIQGSVELAAPGQAKIAGGAAVSDSS

SEQ ID NO: 216555 - protein, 48 aa, Artificial Sequence
  derived and/or modified sequence
MGSAFERVVRRVVQELDHGGEFIPVTSLQSSTGFQPYCLVVRKPSSSW

SEQ ID NO: 216556 - protein, 164 aa, Artificial Sequence
  derived and/or modified sequence
MGSAFERVVRRVVQELDHGGEFIPVTSLQSSTGFQPYCLVVRKPSSSWFWKPRYKCVNLSIKDILEPDAAEPDVQRGRSFHFYDAMDGQIQGSVELAAPGQAKIAGGAAVSDSSSTSMNVYSLSVDPNTWQTLLHERHLRQPEHKVLQQLRSRGDNVYVVTEVL

SEQ ID NO: 216557 - protein, 154 aa, Artificial Sequence
  derived and/or modified sequence
MGSAFERVVRRVVQELDHGGEFIPVTSLQSSTGFQPYCLVVRKPSSSWFWKPRYKCVNLSIKDILEPDAAEPDVQRGRSFHFYDAMDGQIQGSVELAAPGQAKIAGGAAVSDSSSTSMNVYSLSVDPNTWQTLLHERHLRQPEHKVLQQLRSRG

SEQ ID NO: 216558 - DNA, 1455 bp, Artificial Sequence
  derived and/or modified sequence
atgggcagcgccttcgagagagtggtgagaagagtggtgcaggagctggaccacggcggcgagttcatccccgtgaccagcctgcagagcagcaccggcttccagccctactgcctggtggtgagaaagcccagcagcagctggttctggaagcccagatacaagtgcgtgaacctgagcatcaaggacatcctggagcccgacgccgccgagcccgacgtgcagagaggcagaagcttccacttctacgacgccatggacggccagatccagggcagcgtggagctggccgcccccggccaggccaagatcgccggcggcgccgccgtgagcgacagcagcagcaccagcatgaacgtgtacagcctgagcgtggaccccaacacctggcagaccctgctgcacgagagacacctgagacagcccgagcacaaggtgctgcagcagctgagaagcagaggcgacaacgtgtacgtggtgaccgaggtgctgcagacccagaaggaggtggaggtgaccagaacccacaagagagagggcagcggcagattcagcctgcccggcgccacctgcctgcagggcgagggccagggccacctgagccagaagaagaccgtgaccatccccagcggcagcaccctggccttcagagtggcccagctggtgatcgacagcgacctggacgtgctgctgttccccgacaagaagcagagaaccttccagccccccgccaccggccacaagagaagcaccagcgagggcgcctggccccagctgcccagcggcctgagcatgatgagatgcctgcacaacttcctgaccgacggcgtgcccgccgagggcgccttcaccgaggacttccagggcctgagagccgaggtggagaccatcagcaaggagctggagctgctggacagagagctgtgccagctgctgctggagggcctggagggcgtgctgagagaccagctggccctgagagccctggaggaggccctggagcagggccagagcctgggccccgtggagcccctggacggccccgccggcgccgtgctggagtgcctggtgctgagcagcggcatgctggtgcccgagctggccatccccgtggtgtacctgctgggcgccctgaccatgctgagcgagacccagcacaagctgctggccgaggccctggagagccagaccctgctgggccccctggagctggtgggcagcctgctggagcagagcgccccctggcaggagagaagcaccatgagcctgccccccggcctgctgggcaacagctggggcgagggcgcccccgcctgggtgctgctggacgagtgcggcctggagctgggcgaggacaccccccacgtgtgctgggagccccaggcccagggcagaatgtgcgccctgtacgccagcctggccctgctgagcggcctgagccaggagccccactag

SEQ ID NO: 216559 - DNA, 345 bp, Artificial Sequence
  derived and/or modified sequence
atgggcagcgccttcgagagagtggtgagaagagtggtgcaggagctggaccacggcggcgagttcatccccgtgaccagcctgcagagcagcaccggcttccagccctactgcctggtggtgagaaagcccagcagcagctggttctggaagcccagatacaagtgcgtgaacctgagcatcaaggacatcctggagcccgacgccgccgagcccgacgtgcagagaggcagaagcttccacttctacgacgccatggacggccagatccagggcagcgtggagctggccgcccccggccaggccaagatcgccggcggcgccgccgtgagcgacagcagctag

SEQ ID NO: 216560 - DNA, 147 bp, Artificial Sequence
  derived and/or modified sequence
atgggcagcgccttcgagagagtggtgagaagagtggtgcaggagctggaccacggcggcgagttcatccccgtgaccagcctgcagagcagcaccggcttccagccctactgcctggtggtgagaaagcccagcagcagctggtag

SEQ ID NO: 216561 - DNA, 495 bp, Artificial Sequence
  derived and/or modified sequence
atgggcagcgccttcgagagagtggtgagaagagtggtgcaggagctggaccacggcggcgagttcatccccgtgaccagcctgcagagcagcaccggcttccagccctactgcctggtggtgagaaagcccagcagcagctggttctggaagcccagatacaagtgcgtgaacctgagcatcaaggacatcctggagcccgacgccgccgagcccgacgtgcagagaggcagaagcttccacttctacgacgccatggacggccagatccagggcagcgtggagctggccgcccccggccaggccaagatcgccggcggcgccgccgtgagcgacagcagcagcaccagcatgaacgtgtacagcctgagcgtggaccccaacacctggcagaccctgctgcacgagagacacctgagacagcccgagcacaaggtgctgcagcagctgagaagcagaggcgacaacgtgtacgtggtgaccgaggtgctgtag

SEQ ID NO: 216562 - DNA, 465 bp, Artificial Sequence
  derived and/or modified sequence
atgggcagcgccttcgagagagtggtgagaagagtggtgcaggagctggaccacggcggcgagttcatccccgtgaccagcctgcagagcagcaccggcttccagccctactgcctggtggtgagaaagcccagcagcagctggttctggaagcccagatacaagtgcgtgaacctgagcatcaaggacatcctggagcccgacgccgccgagcccgacgtgcagagaggcagaagcttccacttctacgacgccatggacggccagatccagggcagcgtggagctggccgcccccggccaggccaagatcgccggcggcgccgccgtgagcgacagcagcagcaccagcatgaacgtgtacagcctgagcgtggaccccaacacctggcagaccctgctgcacgagagacacctgagacagcccgagcacaaggtgctgcagcagctgagaagcagaggctag

SEQ ID NO: 216563 - DNA, 1455 bp, Artificial Sequence
  derived and/or modified sequence
atgggttcagccttcgaaagagtggttaggcgggtagtccaggagctcgatcatggaggagagtttatcccagttacctccctccagtccagtacgggcttccagccttactgtctcgtggtccgtaaaccgtcttcaagctggttttggaagccccggtacaagtgtgtcaacctttcaatcaaggacatactagagcctgatgcggctgaacctgatgtgcagagaggaaggtcgttccatttttatgacgccatggatggccagattcaaggatcggttgaactggcagcaccagggcaagccaaaattgccggcggtgctgcagtaagcgactcttctagtacatccatgaacgtctacagcctttctgtagaccctaacacttggcagactcttcttcacgaaaggcaccttagacagcccgagcataaagtgttgcagcagctgcgttcccgtggggataatgtgtacgtagtgaccgaggtgctccagactcaaaaagaggtggaggtaaccagaacccataaacgggaagggtccggtcgcttttccttaccgggtgctacttgcctgcagggagaggggcagggtcaccttagtcagaagaagacagtaactatcccttcgggtagtaccttagcattcagggtggcccagctagtcattgactctgacctcgacgtgctgctgtttcccgacaagaaacaaagaacatttcagccgcctgcaacgggtcataaacgctctacatctgagggcgcctggccacaattgccaagcgggctgtcgatgatgagatgtttacataattttttgacggacggtgtacccgctgagggcgcttttacagaggacttccagggcctgagagcagaggtcgagaccattagtaaagaactcgagttgctggatagagagctgtgtcagctgctccttgagggactcgagggggttcttagagaccaactggctctcagagctctcgaagaggccttagaacaggggcagtccttggggccagtggagccattagacgggccagctggggccgtactggaatgcctagttttatcaagcggcatgcttgtgcctgagctcgccattcccgtggtgtatctgttaggggccctcacaatgctgagcgagacccagcacaaattgctcgccgaagcattggaatctcaaaccctgttagggcctttggagctggtaggcagtcttcttgaacagagtgccccctggcaggagagaagcaccatgtctctgcctcctggtctgctgggcaattcgtggggcgagggagcacccgcctgggttctcttagacgagtgtggcctcgaactgggagaagatactccacacgtgtgttgggagcctcaggctcagggacgaatgtgcgctctttacgcaagcttggcattgctctcaggcctctctcaggaaccccactag

SEQ ID NO: 216564 - DNA, 345 bp, Artificial Sequence
  derived and/or modified sequence
atgggcagcgcattcgagagagtggtgcgccgggttgttcaggaactggaccacgggggagagtttattcccgtgacaagcctgcagtctagcacaggattccaaccgtactgcctcgtcgttaggaaaccctcttcatcttggttttggaagcccaggtacaagtgtgtcaacctctccataaaggacattctagaacccgatgccgccgaaccagacgtacaacggggcagaagctttcacttttatgatgcaatggatgggcagatccagggatccgttgaattagcggctccgggccaggctaagatcgctggcggcgcagcggtgagcgacagcagctag

SEQ ID NO: 216565 - DNA, 1455 bp, Artificial Sequence
  derived and/or modified sequence
atgggaagcgcgtttgaacgagttgtgcgccgggtcgtgcaggaactggatcacggcggcgaatttattcccgtcaccagtctgcagtcaagcaccggcttccagccatactgtctcgtggttagaaagcccagctctagctggttctggaagcctcgatataagtgcgttaatctcagtatcaaggatatcctcgaacccgacgccgccgagccagatgtgcagcgagggaggtcttttcacttctatgatgccatggacggccaaatccaagggtcggtagagcttgcagctcctgggcaagcaaaaatcgctggtggcgctgctgtgtccgattcaagctcaacctcaatgaacgtgtacagcctatcagtcgaccccaacacgtggcagaccctgctacacgagcggcatctgagacagcccgagcataaggtgctacagcagctgcggagccggggagacaacgtctatgtcgttactgaggttttgcagactcagaaggaggttgaagtcacaagaacacacaaaagggagggttccggccgattctcactgcctggggctacttgcctacagggtgagggacaagggcacctttcgcaaaaaaaaacagtgacaattcctagtgggagcacactggccttcagagtggcacaattagtcatagatagcgacctggacgtcctattattccctgacaaaaaacagagaactttccagcctccggctacaggccataaacgtagtacaagcgagggcgcctggccacaactcccctccggcttgtctatgatgcgatgtctccataacttcctgaccgacggcgtgcccgccgaaggtgctttcaccgaagactttcagggtctacgggcagaggtggagactatctctaaggagttggagttgctggatagggaactttgtcaattactcctcgaggggttagaaggcgtgctgagggatcagttagccctgcgggcgctggaggaagcgctcgaacaggggcaaagcctgggacctgttgagccgctagacgggcctgcaggcgccgtgctggagtgcctggtgctgtcctccggtatgctggtccccgaactcgccatccctgtcgtctatctacttggagctctcacaatgcttagcgagacacagcacaaacttctggccgaggcactggagtcccagactctcctgggtccgctggagctcgtgggatccctgcttgagcaaagtgccccttggcaggaaaggagcacgatgtccttgccccctggcctgctaggcaatagttggggcgagggggccccagcttgggtcctcttagatgagtgtggcctcgagctgggggaggatacaccacacgtttgctgggaaccccaggcccagggcagaatgtgcgctctttacgcgtctctcgcgttactgtcaggactgtcacaggagccccattag

SEQ ID NO: 216566 - DNA, 147 bp, Artificial Sequence
  derived and/or modified sequence
atgggatcggcctttgaaagagtggtgcggagggtggtgcaggaacttgatcacgggggtgagtttatccccgtgaccagccttcaatcaagcactgggtttcaaccttactgcttggtcgtgcgaaaaccatcctcctcctggtag

SEQ ID NO: 216567 - DNA, 495 bp, Artificial Sequence
  derived and/or modified sequence
atgggctctgccttcgaacgggtagtccggcgagttgtccaggagttggaccatggaggcgagttcattcccgtaaccagtcttcagagcagtaccggtttccagccctattgcctcgtggtccgtaagccgagctcgagctggttttggaaaccgcggtacaaatgtgtcaacttgtccataaaggatattcttgaaccagacgctgccgagcctgatgtgcagcgggggagaagtttccatttctacgatgcgatggatgggcaaatccaaggctccgtagagctggctgctcccggtcaggctaagatcgcaggcggcgccgctgtgtccgactcctccagtacatcaatgaacgtatactccctcagtgtagatcccaatacttggcaaaccttactccacgaacggcatttgagacagcccgaacataaagtgctccaacagcttcgaagcagaggagacaatgtgtacgtcgttaccgaggtcctctag

SEQ ID NO: 216568 - DNA, 465 bp, Artificial Sequence
  derived and/or modified sequence
atgggaagcgcattcgagagagtagtacgacgtgttgtccaggaacttgatcacgggggggagttcattcccgtgacgtctttacagagcagcactggctttcaaccgtattgtctggtagtgagaaagccttcttcctcatggttttggaagccccggtacaaatgtgtaaacctctcaattaaagatatcctggagccagatgcagccgagccagatgtgcagcggggcaggtctttccatttctacgacgcgatggatggccagattcaaggtagcgtggagctggctgccccaggtcaagcaaagattgcgggtggagccgccgtctccgattctagttctacatccatgaacgtttactctctatctgttgaccccaatacctggcagaccctactgcacgagagacatctgagacagccagaacataaggtgctgcagcagcttagatctaggggctag

SEQ ID NO: 216569 - DNA, 1455 bp, Artificial Sequence
  derived and/or modified sequence
atgggcagcgcctttgagcgggtggtgcggcgggtggtgcaggagctggaccacggcggggagttcatccctgtgaccagcctgcagagcagcacaggcttccagccctactgcctggtggtgaggaagcccagcagctcctggttctggaagccccgctacaagtgtgtgaacctgagcatcaaggacatcctggagccagatgctgctgagccagatgtgcagaggggccgctccttccacttctatgatgccatggatggccagatccagggctctgtggagctggccgcccctggccaggccaagattgctggaggagctgctgtgtctgacagcagcagcacctccatgaatgtgtacagcctgtctgtggaccccaacacctggcagaccctgctgcacgagcggcacctgcggcagcctgagcacaaggtgctgcagcagctgcggagcagaggagacaacgtgtatgtggtgacagaggtgctgcagacccagaaggaggtggaggtgaccaggacccacaagcgggagggcagcggccgcttcagcctgcccggggccacctgcctgcagggcgagggccagggccacctgagccagaagaagacagtgaccatccccagcggcagcaccctggccttccgggtggcccagctggtgattgacagcgacctggatgtgctgctcttcccagacaagaagcagaggaccttccagcccccagccaccggccacaagaggagcaccagcgagggcgcctggccccagctgcccagcggcctgtccatgatgcgctgcctgcacaacttcctgacagatggagtgcctgctgagggcgccttcacagaggacttccagggcctgcgggcagaggtggagaccatcagcaaggagctggagctgctggaccgggagctgtgccagctgctgctggagggcctggagggcgtgctgcgggaccagctggccctgcgggccctggaggaggccctggagcagggccagagcctgggccctgtggagcccctggatggccctgctggagctgtgctggagtgcctggtgctgagcagcggcatgctggtgcctgagctggccatccctgtggtgtacctgctgggcgccctgaccatgctgtctgagacccagcacaagctgctggccgaggccctggagagccagaccctgctgggccccctggagctggtgggcagcctgctggagcagagcgccccctggcaggagaggagcaccatgagcctgcccccaggcctgctgggcaacagctggggcgagggcgccccagcctgggtgctgctggatgaatgtggcctggagctgggggaggacacccctcatgtgtgctgggagccccaggcccagggccgcatgtgtgccctgtatgccagcctggccctgctgagcggcctgagccaggagccccactag

SEQ ID NO: 216570 - DNA, 345 bp, Artificial Sequence
  derived and/or modified sequence
atgggcagcgcctttgagcgggtggtgcggcgggtggtgcaggagctggaccacggcggggagttcatccctgtgaccagcctgcagagcagcacaggcttccagccctactgcctggtggtgaggaagcccagcagctcctggttctggaagccccgctacaagtgtgtgaacctgagcatcaaggacatcctggagccagatgctgctgagccagatgtgcagaggggccgctccttccacttctatgatgccatggatggccagatccagggctctgtggagctggccgcccctggccaggccaagattgctggaggagctgctgtgtctgacagcagctag

SEQ ID NO: 216571 - DNA, 147 bp, Artificial Sequence
  derived and/or modified sequence
atgggcagcgcctttgagcgggtggtgcggcgggtggtgcaggagctggaccacggcggggagttcatccctgtgaccagcctgcagagcagcacaggcttccagccctactgcctggtggtgaggaagcccagcagctcctggtag

SEQ ID NO: 216572 - DNA, 495 bp, Artificial Sequence
  derived and/or modified sequence
atgggcagcgcctttgagcgggtggtgcggcgggtggtgcaggagctggaccacggcggggagttcatccctgtgaccagcctgcagagcagcacaggcttccagccctactgcctggtggtgaggaagcccagcagctcctggttctggaagccccgctacaagtgtgtgaacctgagcatcaaggacatcctggagccagatgctgctgagccagatgtgcagaggggccgctccttccacttctatgatgccatggatggccagatccagggctctgtggagctggccgcccctggccaggccaagattgctggaggagctgctgtgtctgacagcagcagcacctccatgaatgtgtacagcctgtctgtggaccccaacacctggcagaccctgctgcacgagcggcacctgcggcagcctgagcacaaggtgctgcagcagctgcggagcagaggagacaacgtgtatgtggtgacagaggtgctgtag

SEQ ID NO: 216573 - DNA, 465 bp, Artificial Sequence
  derived and/or modified sequence
atgggcagcgcctttgagcgggtggtgcggcgggtggtgcaggagctggaccacggcggggagttcatccctgtgaccagcctgcagagcagcacaggcttccagccctactgcctggtggtgaggaagcccagcagctcctggttctggaagccccgctacaagtgtgtgaacctgagcatcaaggacatcctggagccagatgctgctgagccagatgtgcagaggggccgctccttccacttctatgatgccatggatggccagatccagggctctgtggagctggccgcccctggccaggccaagattgctggaggagctgctgtgtctgacagcagcagcacctccatgaatgtgtacagcctgtctgtggaccccaacacctggcagaccctgctgcacgagcggcacctgcggcagcctgagcacaaggtgctgcagcagctgcggagccggggctag

SEQ ID NO: 216574 - DNA, 1762 bp, Artificial Sequence
  derived and/or modified sequence
gttccgggagggcgtcctgggcgggccctgcgtcaggttgcagtttcacttttagctctgggcacctccagctcctgctcgccggacggctcccagggagagcagacgcgccagacgcgccaccctcggggcgccgacggtcacggagcatggggtcggcctttgagcgggtagtccggagagtggtccaggagctggaccatggtggggagttcatccctgtgaccagcctgcagagctccactggcttccagccctactgcctggtggttaggaagccctcaagctcatggttctggaaaccccgttataagtgtgtcaacctgtctatcaaggacatcctggagccggatgccgcggaaccagacgtgcagcgtggcaggagcttccacttctacgatgccatggatgggcagatacagggcagcgtggagctggcagccccaggacaggcaaagatcgcaggcggggccgcggtgtctgacagctccagcacctcaatgaatgtgtactcgctgagtgtggaccctaacacctggcagactctgctccatgagaggcacctgcggcagccagaacacaaagtcctgcagcagctgcgcagccgcggggacaacgtgtacgtggtgactgaggtgctgcagacacagaaggaggtggaagtcacgcgcacccacaagcgggagggctcgggccggttttccctgcccggagccacgtgcttgcagggtgagggccagggccatctgagccagaagaagacggtcaccatcccctcaggcagcaccctcgcattccgggtggcccagctggttattgactctgacttggacgtccttctcttcccggataagaagcagaggaccttccagccacccgcgacaggccacaagcgttccacgagcgaaggcgcctggccacagctgccctctggcctctccatgatgaggtgcctccacaacttcctgacagatggggtccctgcggagggggcgttcactgaagacttccagggcctacgggcagaggtggagaccatctccaaggaactggagcttttggacagagagctgtgccagctgctgctggagggcctggagggggtgctgcgggaccagctggccctgcgagccttggaggaggcgctggagcagggccagagccttgggccggtggagcccctggacggtccagcaggtgctgtcctggagtgcctggtgttgtcctccggaatgctggtgccggaactcgctatccctgttgtctacctgctgggggcactgaccatgctgagtgaaacgcagcacaagctgctggcggaggcgctggagtcgcagaccctgttggggccgctcgagctggtgggcagcctcttggagcagagtgccccgtggcaggagcgcagcaccatgtccctgccccccgggctcctggggaacagctggggcgaaggagcaccggcctgggtcttgctggacgagtgtggcctagagctgggggaggacactccccacgtgtgctgggagccgcaggcccagggccgcatgtgtgcactctacgcctccctggcactgctatcaggactgagccaggagccccactagcctgtgcccgggcatggcctggcagctctccagcagggcagagtgtttgcccaccagctgctagccctaggaaggccaggagcccagtagccatgtggccagtctaccatggggcccaggagttggggaaacacaataaaggtggcatacgaaggaaa

SEQ ID NO: 216575 - DNA, 442 bp, Artificial Sequence
  derived and/or modified sequence
acttttagctctgggcacctccagctcctgctcgccggacggctcccagggagagcagacgcgccagacgcgccaccctcggggcgccgacggtcacgcatggggtcggcctttgagcgggtagtccggagagtggtccaggagctggaccatggtggggagttcatccctgtgaccagcctgcagagctccactggcttccagccctactgcctggtggttaggaagccctcaagctcatggttctggaaaccccgttataagtgtgtcaacctgtctatcaaggacatcctggagccggatgccgcggaaccagacgtgcagcgtggcaggagcttccacttctacgatgccatggatgggcagatacagggcagcgtggagctggcagccccaggacaggcaaagatcgcaggcggggccgcggtgtctgacagctcca

SEQ ID NO: 216576 - DNA, 2496 bp, Artificial Sequence
  derived and/or modified sequence
cttcccggctcggggattacctctctggctggtcccctcctccgtgctctgcgcgcctccaccctagcgcttgtcttggctcctagaaccaggggcctggacgctgctcagggcagaggcgccccctctgaggggctggcccctcagccgcactccgagacagccgcccccgggaccgcccttccttggagccccgccgcccgccgctcactctgcacacgcagcagaagggacgtggtgttccccaggctctggccccccaggacctgcgcggatctggcccagggcgcctcgccgacttccgtaaactgggcggagggatgaaccccgacccaggggacggaggcgctcgccctctcgctgcagggttctgccctcaacacttctggccccgcctgtgaatgggggccggagcgatggggcggggccggcctccctccctcctcccaggctgacctctgccctccttcgagcacttcccgttcggggtgatgattgaagaactgagtgtggacagagcacctgtcctcgccagcgcccagctggaagctgagttatttgtggctgcagcattccaacgcacacaccaccagaaatccccttcagcatactggcctcagacctaccagggcagagaccttgtcttgtttgctgctagaacccaggatcgctggaaaatcacctagcagcagccaggtgcggtgactcacgcctgtaatcccagcactttggaaggccaaggcgggtggatagcaaggtcaagagatcgagaccagcctggccaacatgctctgggcacctccagctcctgctcgccggacggctcccagggagagcagacgcgccagacgcgccaccctcggggcgccgacggtcacggagcatggggtcggcctttgagcgggtagtccggagagtggtccaggagctggaccatggtggggagttcatccctgtgaccagcctgcagagctccactggcttccagccctactgcctggtggttaggaagccctcaagctcatggttctggaaaccccgttataagtgtgtcaacctgtctatcaaggacatcctggagccggatgccgcggaaccagacgtgcagcgtggcaggagcttccacttctacgatgccatggatgggcagatacagggcagcgtggagctggcagccccaggacaggcaaagatcgcaggcggggccgcggtgtctgacagctccagcacctcaatgaatgtgtactcgctgagtgtggaccctaacacctggcagactctgctccatgagaggcacctgcggcagccagaacacaaagtcctgcagcagctgcgcagccgcggggacaacgtgtacgtggtgactgaggtgctgcagacacagaaggaggtggaagtcacgcgcacccacaagcgggagggctcgggccggttttccctgcccggagccacgtgcttgcagggtgagggccagggccatctgagccagaagaagacggtcaccatcccctcaggcagcaccctcgcattccgggtggcccagctggttattgactctgacttggacgtccttctcttcccggataagaagcagaggaccttccagccacccgcgacaggccacaagcgttccacgagcgaaggcgcctggccacagctgccctctggcctctccatgatgaggtgcctccacaacttcctgacagatggggtccctgcggagggggcgttcactgaagacttccagggcctacgggcagaggtggagaccatctccaaggaactggagcttttggacagagagctgtgccagctgctgctggagggcctggagggggtgctgcgggaccagctggccctgcgagccttggaggaggcgctggagcagggccagagccttgggccggtggagcccctggacggtccagcaggtgctgtcctggagtgcctggtgttgtcctccggaatgctggtgccggaactcgctatccctgttgtctacctgctgggggcactgaccatgctgagtgaaacgcagcacaagctgctggcggaggcgctggagtcgcagaccctgttggggccgctcgagctggtgggcagcctcttggagcagagtgccccgtggcaggagcgcagcaccatgtccctgccccccgggctcctggggaacagctggggcgaaggagcaccggcctgggtcttgctggacgagtgtggcctagagctgggggaggacactccccacgtgtgctgggagccgcaggcccagggccgcatgtgtgcactctacgcctccctggcactgctatcaggactgagccaggagccccactagcctgtgcccgggcatggcctggcagctctccagcagggcagagtgtttgcccaccagctgctagccctaggaaggccaggagcccagtagccatgtggccagtctaccatggggcccaggagttggggaaacacaataaaggtggcatacgaaggaaa

SEQ ID NO: 216577 - DNA, 511 bp, Artificial Sequence
  derived and/or modified sequence
gaactgagtgtggacagagcacctgtcctcgccagcgcccagctggaagctgagttatttgtggctgcagcattccaacgcacacaccaccagaaatccccttcagcatactggcctcagacctaccagggcagagaccttgtcttgtttgctgctagaacccaggatcgctggaaaatcacctagcagcagccaggtgcggtgactcacgcctgtaatcccagcactttggaaggccaaggcgggtggatagcaaggtcaagagatcgagaccagcctggccaacatgctcctgctcgccggacggctcccagggagagcagacgcgccagacgcgccaccctcggggcgccgacggtcacggagcatggggtcggcctttgagcgggtagtccggagagtggtccaggagctggaccatggtggggagttcatccctgtgaccagcctgcagagctccactggcttccagccctactgcctggtggttaggaagccctcaagctcatgg

SEQ ID NO: 216578 - DNA, 724 bp, Artificial Sequence
  derived and/or modified sequence
aagttgtttgtttgcttgtttgtttttgagacggagtctcactctgtcgcccaggctggagtacaatggcatgatctcggctcactgcaacctacacctcccaggttcaagcgattctcttgcctcagcctcccagctctgggcacctccagctcctgctcgccggacggctcccagggagagcagacgcgccagacgcgccaccctcggggcgccgacggtcacggagcatggggtcggcctttgagcgggtagtccggagagtggtccaggagctggaccatggtggggagttcatccctgtgaccagcctgcagagctccactggcttccagccctactgcctggtggttaggaagccctcaagctcatggttctggaaaccccgttataagtgtgtcaacctgtctatcaaggacatcctggagccggatgccgcggaaccagacgtgcagcgtggcaggagcttccacttctacgatgccatggatgggcagatacagggcagcgtggagctggcagccccaggacaggcaaagatcgcaggcggggccgcggtgtctgacagctccagcacctcaatgaatgtgtactcgctgagtgtggaccctaacacctggcagactctgctccatgagaggcacctgcggcagccagaacacaaagtcctgcagcagctgcgcagccgcggggacaacgtgtacgtggtgactgaggtgctgca

SEQ ID NO: 216579 - DNA, 576 bp, Artificial Sequence
  derived and/or modified sequence
cagaaggccccgcgccgcacacgggggcggaagctccaggcttcgggaaaggctgcccctggccagcccaggggcccggcctttggacctgggcttgggcttgactcccaggagcatggggtcggcctttgagcgggtagtccggagagtggtccaggagctggaccatggtggggagttcatccctgtgaccagcctgcagagctccactggcttccagccctactgcctggtggttaggaagccctcaagctcatggttctggaaaccccgttataagtgtgtcaacctgtctatcaaggacatcctggagccggatgccgcggaaccagacgtgcagcgtggcaggagcttccacttctacgatgccatggatgggcagatacagggcagcgtggagctggcagccccaggacaggcaaagatcgcaggcggggccgcggtgtctgacagctccagcacctcaatgaatgtgtactcgctgagtgtggaccctaacacctggcagactctgctccatgagaggcacctgcggcagccagaacacaaagtcctgcagcagctgcgcagccgcgg

SEQ ID NO: 216580 - DNA, 1455 bp, Artificial Sequence
  derived and/or modified sequence
atgggcagcgccttcgagcgggtggtgcggcgggtggtgcaggagcttgatcatggaggtgaatttattcccgtgactagtctccaatcatccaccggtttccaaccgtattgccttgtggtgcggaaacctagctcgtcttggttctggaagccaaggtacaagtgtgtgaacctttcaattaaagacatcctcgaacctgatgctgcggagccagacgtccagaggggaagatctttccacttttatgatgctatggatggccagattcagggttcagtggagctcgccgcccccgggcaggctaagatcgcaggcggggcggctgtttccgatagcagtagtacctctatgaatgtttacagtcttagcgtggacccaaacacttggcaaacacttttgcatgaacggcatctgcgccagcccgagcataaggtgctacagcaactacgatctcggggcgacaatgtgtacgtggttaccgaagtcctacagactcagaaagaggtggaagttacccgcacacacaagagggaaggttccgggaggttcagcctgccaggggcaacctgtctccagggtgagggccaagggcacctgtctcagaaaaagactgtgactataccttcaggctccaccctcgcctttagggtcgctcaactggtgattgattccgacctagatgttctcctcttcccagacaagaaacagagaaccttccagcctcctgcaacaggtcataaaagatccaccagcgagggcgcttggccccagttgccaagtggattgtctatgatgcgctgcctccacaactttcttaccgatggagtcccggcagaaggcgcttttactgaagactttcaaggtctacgagccgaagtggaaaccatttctaaagagctagaactcctggaccgggagctgtgccagcttttgctcgaggggcttgaaggtgtactcagagatcagctggccctccgagcgctcgaggaagcccttgaacagggacagtctctcggccctgttgaacctctggatggaccggctggcgccgtgctcgagtgcctcgtactttcgtctggtatgctggtccccgaactggcgattcccgttgtttacctcctcggcgccctgacaatgctgtccgagacacaacacaaactgctcgctgaggccctcgagtctcagaccctgttgggccccctggagcttgtaggttcccttttggagcagtccgctccttggcaggaacgcagcaccatgagcctgcctcccggcctacttggaaacagctggggggagggagctcccgcctgggtcctactggatgagtgtggtcttgaactcggcgaggacaccccacacgtgtgctgggagccgcaggcacaggggcgaatgtgcgctctctacgcctctctggccctgctgtcgggtctatctcaggagcctcattag

SEQ ID NO: 216581 - DNA, 345 bp, Artificial Sequence
  derived and/or modified sequence
atgggcagcgccttcgagcgggtggtgcggcgggtggtgcaggagctcgatcacgggggagaatttatccctgtaactagccttcagtcctccaccgggttccagccctattgcttggtggtgcgtaagccttcatcaagctggttctggaagccaagatataagtgcgtgaacctgagtatcaaagacattttggagcctgatgccgccgagcctgacgtacagcgcggaaggagtttccacttttatgacgcgatggacggtcagatccagggcagcgtggagctggcagccccaggacaggctaaaatcgctggtggcgcagccgttagtgacagttcgtag

SEQ ID NO: 216582 - DNA, 1455 bp, Artificial Sequence
  derived and/or modified sequence
atgggcagcgccttcgagcgggtggtgcggcgggtggtgcaggagctcgaccatggaggcgagtttattccagttacttccctacagagctctactggcttccaaccttactgcctcgtggtgcgaaagcctagttctagttggttttggaagccacgctacaagtgtgtcaatctatcaattaaagatattctggagcccgatgctgctgaaccggatgtccagcggggcagaagcttccacttctacgacgctatggacggccagatacaaggcagcgtggaattggcagccccgggtcaggccaagatcgcagggggcgctgcagtgagcgattcctccagcacgtccatgaatgtttactctctgagcgtagatccaaacacctggcagacactgctgcacgaacggcacttaagacaaccagagcataaggtcctgcaacagctcaggagcaggggagataacgtgtacgtcgtcactgaggtgttacaaacacaaaaagaggtcgaggttacccgaacacacaaacgggaagggtctggtcgcttctccctgccgggggcaacctgcctccaaggggaggggcaggggcatctgtcgcagaaaaagaccgtcacaatcccatcaggatctactctcgcgttcagggtggcccagctggtgatagattcagacctcgacgttctcctgtttcccgacaagaaacagcgcacttttcagcccccagctaccgggcacaagcggtccactagcgagggggcatggcctcaactccccagcgggctgtcaatgatgagatgcttacacaattttctgaccgacggagtgcctgccgagggcgccttcaccgaggatttccagggccttcgcgctgaagttgaaacaatttccaaagaactggaactcttagatcgggaattatgtcagttattgctcgaaggtctcgagggggtgttgcgggatcagctggcattgagagcactggaggaggctctggaacagggccagagcctcgggccagttgaacctctcgatgggccagccggtgcagtgttagagtgcttagttctgtcttccggcatgcttgttcctgagctcgcgataccagtggtatacctgctcggagcgcttaccatgctctcagaaacacaacataaactcttagcagaggccttggagtcccaaactctactcggaccactggaattggtaggatccttgctggaacagagcgcgccttggcaggagcggagcactatgagtctaccccccggcctccttgggaacagttggggggagggagctcctgcatgggtgttactcgatgaatgtggcctggagctgggggaggacacgccacatgtgtgttgggagccacaggcccagggaaggatgtgtgcactgtacgccagccttgccctcttgagtgggctgtctcaggaacctcactag

SEQ ID NO: 216583 - DNA, 147 bp, Artificial Sequence
  derived and/or modified sequence
atgggcagcgccttcgagcgggtggtgcggcgggtggtgcaggagctggaccacggcggagagttcattcccgtcaccagtctccagagcagcacagggttccagccatattgtcttgtagtccgcaagcccagttcttcatggtag

SEQ ID NO: 216584 - DNA, 495 bp, Artificial Sequence
  derived and/or modified sequence
atgggcagcgccttcgagcgggtggtgcggcgggtggtgcaggagttggatcatggaggagagttcatcccggtgaccagtctccaaagcagcacagggttccagccttactgcctggtagttcgcaagccaagctcatcatggttttggaaaccgcggtacaaatgtgtgaacctttccattaaggatatcctggagccggacgccgcagagccagacgtgcagagagggcgtagtttccatttctacgacgctatggacggccaaatccaggggtccgtggagctcgctgccccaggccaggccaaaatcgctgggggagccgccgtctccgactcatccagcacgagcatgaatgtctatagtttatcagtggatcctaatacatggcagactctactgcacgagcggcacctacgccagcctgaacacaaggtgttgcagcagcttcggtccagaggggataatgtctacgtagtgacagaggtgctttag

SEQ ID NO: 216585 - DNA, 465 bp, Artificial Sequence
  derived and/or modified sequence
atgggcagcgccttcgagcgggtggtgcggcgggtggtgcaggagctggatcacggtggcgagtttatccccgttacgtcacttcagtcaagtactggcttccagccgtattgcctcgtggttcgcaaaccatccagctcctggttctggaagccacgttacaaatgcgtcaacctgtcaatcaaggacattttggaacctgacgctgccgagcctgatgtccaacgggggcggtcgtttcatttttacgatgccatggacggacagatacagggaagcgttgagcttgccgcacctggccaggctaaaatcgccggcggagccgccgtcagcgacagttcgtcgacatcaatgaacgtgtacagcctctccgtggatcctaacacctggcagacccttctgcatgaacgacacttacgccaacccgaacacaaggtattacaacaactgcggtcccgaggttag

SEQ ID NO: 216586 - DNA, 1455 bp, Artificial Sequence
  derived and/or modified sequence
atgggtagtgcattcgagagagttgtcagaagagtggtgcaggaactggatcacggtggagaattcatcccagtcacttcccttcagagtagcaccggctttcagccttattgcttagtcgttcggaagcctagctcctcctggttttggaaaccgaggtataagtgcgtaaacttgtccatcaaggacattctggagcccgacgctgccgaacccgacgttcagagaggcagatccttccacttttacgatgcaatggatggccaaatacaaggctcagtggaactggccgctccgggacaagcaaagatcgcaggtggggcagccgtgtctgactcttcatcaacctctatgaacgtgtatagtctctctgttgacccaaatacctggcaaactctcctccatgagaggcatttacggcagcccgagcacaaggtgctgcaacagctgagatctcgcggagataatgtctacgtggtgaccgaggtactccagactcagaaagaggtggaggtgacccgtacacacaaaagggaggggtctggccgtttcagcttgccaggagcgacatgccttcaaggtgagggacagggccatctgagccagaagaagacagtgacaatcccgagtggatcaaccctggctttccgggtggcccagctggtgatcgactcagacctcgatgtactcctctttccagataagaagcagcgcacctttcaacctcccgctactggacacaagaggtctacttctgaaggcgcttggccccagctcccctccggacttagtatgatgagatgtctgcataattttctgactgatggggtgccagcggaaggagccttcacagaagactttcaaggcctccgtgcggaagtagaaaccatctctaaggaactcgaactgctcgaccgggagctttgtcagctgctgctggagggcttagagggggtgcttcgggaccagttggccttgcgggcactggaagaggcactggagcaggggcaaagtctcggcccagtggagccattggacgggccagcaggagccgtcttggaatgtttagtgctcagttcagggatgctggtaccagaactggccatcccggtcgtgtatctgctcggtgccctgactatgttaagcgaaacccagcataagttgctcgctgaggctctggagtctcaaacattgctgggcccactcgagctggtgggctctctgctggaacagagtgccccttggcaggagagatccaccatgtcacttccaccagggctgttgggcaatagttggggcgaaggcgctccggcttgggtgttattagatgaatgcgggctcgagttgggagaggacacgccacatgtatgttgggaaccacaggctcaggggagaatgtgtgcgctgtacgctagcctcgccctcctcagcgggctctctcaagagcctcactag

SEQ ID NO: 216587 - DNA, 345 bp, Artificial Sequence
  derived and/or modified sequence
atgggatccgcgtttgagagggtggtccgcagagtcgtccaggagctagaccacggcggtgagttcatacctgtcaccagcctgcagtcaagcactggatttcaaccttattgcttagtcgtccgaaaaccttccagtagctggttctggaaacctcggtacaagtgtgtgaatctcagcattaaggatatcctggagcccgacgccgctgagcccgatgttcaacgaggacgtagctttcacttctacgatgctatggatggtcagattcaggggtcagtggaactcgctgcccctggacaggctaagatagccggaggtgccgctgtgtcagactcatcttag

SEQ ID NO: 216588 - DNA, 1455 bp, Artificial Sequence
  derived and/or modified sequence
atgggttctgcatttgaacgggtggtgcgccgtgtagttcaggagttggatcacgggggagaatttatcccagtgactagcttacagagcagtactggtttccagccctattgcctggtggtgcgcaagccttcatcgtcctggttctggaaacctaggtataagtgtgtcaatctttcaatcaaagatattctcgagcccgatgccgcagaaccagacgtgcaacgtggccgatctttccatttctatgacgccatggacggccagatccagggctcagttgaactggccgctccgggtcaagcgaagatcgcgggtggggctgccgtgagcgactcctcctcaacttcaatgaacgtctatagtctgtcagtcgaccccaacacctggcagactctcctccacgaacgacacctccggcagccggagcataaggtcctgcagcagcttcggagcaggggtgacaacgtgtatgttgttaccgaggttctgcagacacagaaggaagtcgaagtcactcgcacacacaaaagggaaggttcagggagatttagtttgcctggggctacatgtctacaaggagagggccagggccacctttcccagaaaaaaaccgtcacaattccttctggctcaacgctcgcctttagagttgcccagctggtcattgacagtgacctcgatgtgctgctctttccagacaaaaagcaaagaacatttcagccgccagccaccgggcacaagcgaagcacctcagagggggcttggccccagttgccctctggtctcagcatgatgcggtgcctgcacaatttcctcacagatggagttcctgccgaaggagccttcactgaggacttccaagggctgagagctgaagtggaaactatctcaaaggaattggaactgcttgatagggaactatgccaactcctccttgaagggctggagggcgttttgagggatcagctcgcccttagggctctggaggaggcgctggagcaggggcaaagccttggaccggtggagccgctcgacggccctgccggagcagttttggagtgcctagtgctgtcctcaggaatgctggtgccggagttggccataccagtggtctatctgctgggggcactgacaatgttgtccgaaacccagcacaaactcctggctgaggccctggaaagccagacactattgggaccactggagctggtgggatcactgcttgagcagagtgcaccatggcaggaaagatctactatgtccctgccaccaggcttgctggggaacagttggggtgagggggctcctgcctgggttctcctggacgaatgtggcttggagcttggtgaggacaccccccacgtgtgttgggagccccaggcccagggcagaatgtgtgccctgtatgctagcctggcgctgttatcgggattatcccaagagcctcactag

SEQ ID NO: 216589 - DNA, 147 bp, Artificial Sequence
  derived and/or modified sequence
atggggagtgccttcgaacgcgtggttcggagagtggttcaggagctggaccacggaggtgagttcataccggtcaccagcctccaatcatcaacagggttccagccatattgcctggtagtacggaagccgtcctcgagttggtag

SEQ ID NO: 216590 - DNA, 495 bp, Artificial Sequence
  derived and/or modified sequence
atgggatccgctttcgaaagagtggttcgccgagtcgtgcaggagctagaccatggaggggagttcatcccggtgacctccttgcaaagcagcacagggttccagccctactgcctggtggtgcgtaagccgtctagttcttggttctggaagccccgatacaagtgtgttaatctgtccattaaagacattttggaacctgacgctgccgagcctgatgtgcagcgcggtcggagctttcatttttacgacgccatggatggtcagatccaagggtccgtggagctggctgcaccaggccaggcaaagattgccggtggggctgcagtaagtgactcctctagtacgtctatgaatgtgtactctttatctgtggaccccaacacctggcaaacgctgttacacgagagacacttgcgtcaaccagagcataaggtcctacagcaactgcggtctcggggagacaacgtgtatgttgtgactgaggtactctag

SEQ ID NO: 216591 - DNA, 465 bp, Artificial Sequence
  derived and/or modified sequence
atgggatccgccttcgaaagggttgtcaggcgcgttgtccaagagctggaccatggaggagaattcatccctgtcaccagcttgcagtcatctaccggatttcagccatactgcctagtggtcagaaaaccttcgtctagctggttttggaagcctcgatataagtgtgtaaatctcagcataaaggacatactcgagcctgacgcagccgagcccgatgtgcagagaggacgctcttttcacttttacgacgctatggatgggcagattcagggttcagtcgagttagcagcccctgggcaggctaagatcgccggtggcgctgccgtgtcagactcctcttccacatccatgaacgtctacagccttagtgtcgacccgaacacgtggcaaaccctgttgcatgaaaggcatctcaggcagccggaacacaaagttctccagcagctccgctccaggggctag

SEQ ID NO: 216592 - protein, 447 aa, Artificial Sequence
  derived and/or modified sequence
MMLAFLVLSTGMFCSSSAFLPSSFCMYTTLIAMTGWYMDKTSIAVLGVAAGAILGWPFSAALGLPIAFDLLVMKHRWKSFFHWSLMALILFLVPVVVIDSYYYGKLVIAPLNIVLYNVFTPHGPDLYGTEPWYFYLINGFLNFNVAFALALLVLPLTSLMEYLLQRFHVQNLGHPYWLTLAPMYIWFIIFFIQPHKEERFLFPVYPLICLCGAVALSALQHSFLYFQKCYHFVFQRYRLEHYTVTSNWLALGTVFLFGLLSFSRSVALFRGYHGPLDLYPEFYRIATDPTIHTVPEGRPVNVCVGKEWYRFPSSFLLPDNWQLQFIPSEFRGQLPKPFAEGPLATRIVPTDMNDQNLEEPSRYIDISKCHYLVDLDTMRETPREPKYSSNKEEWISLAYRPFLDASRSSKLLRAFYVPFLSDQYTVYVNYTILKPRKAKQIRKKSGG

SEQ ID NO: 216593 - DNA, 1930 bp, Artificial Sequence
  derived and/or modified sequence
tgaacataagggggaatgaataaagccatcaaaagcaatgaccttgttaagaaaagaaagaaaaggagaatgacagctttgtggccttcaagttatctgggaacaaagcaggacaagtctgggcacctgaaggatctactgctttcaagtgtctgctttcagcaaggttatgtgctgctctcctgagcaacatctctgactgtgatgaaacattcaactactgggagccaacacactacctcatctatggggaagggtttcagacttgggaatattccccagcatatgccattcgctcctatgcttacctgttgcttcatgcctggccagctgcatttcatgcaagaattctacaaactaataagattcttgtgttttactttttgcgatgtcttctggcttttgtgagctgtatttgtgaactttacttttacaaggctgtgtgcaagaagtttgggttgcacgtgagtcgaatgatgctagccttcttggttctcagcactggcatgttttgctcatcatcagcattccttcctagtagcttctgtatgtacactacgttgatagccatgactggatggtatatggacaagacttccattgctgtgctgggagtagcagctggggctatcttaggctggccattcagtgcagctcttggtttacccattgcctttgatttgctggtcatgaaacacaggtggaagagtttctttcattggtcgctgatggccctcatactatttctggtgcctgtggtggtcattgacagctactattatgggaagttggtgattgcaccactcaacattgttttgtataatgtctttactcctcatggacctgatctttatggtacagaaccctggtatttctatttaattaatggatttctgaatttcaatgtagcctttgctttggctctcctagtcctaccactgacttctcttatggaatacctgctgcagagatttcatgttcagaatttaggccacccgtattggcttaccttggctccaatgtatatttggtttataattttcttcatccagcctcacaaagaggagagatttcttttccctgtgtatccacttatatgtctctgtggcgctgtggctctctctgcacttcagcacagttttctgtacttccagaaatgttaccactttgtgtttcaacgatatcgcctggagcactatactgtgacatcgaattggctggcattaggaactgtcttcctgtttgggctcttgtcattttctcgctctgtggcactgttcagaggatatcacgggccccttgatttgtatccagaattttaccgaattgctacagacccaaccatccacactgtcccagaaggcagacctgtgaatgtctgtgtgggaaaagagtggtatcgatttcccagcagcttccttcttcctgacaattggcagcttcagttcattccatcagagttcagaggtcagttaccaaaaccttttgcagaaggacctctggccacccggattgttcctactgacatgaatgaccagaatctagaagagccatccagatatattgatatcagtaaatgccattatttagtggatttggacaccatgagagaaacaccccgggagccaaaatattcatccaataaagaagaatggatcagcttggcctatagaccattccttgatgcttctagatcttcaaagctgctgcgggcattctatgtccccttcctgtcagatcagtatacagtgtacgtaaactacaccatcctcaaaccccggaaagcaaagcaaatcaggaagaaaagtggaggttagcaacacacctgtggccccaaaggacaaccatcttgttaactattgattccagtgacctgactccctgcaagtcatcgcctgtaacatttgtaataaaggtcttctgacatgaa

SEQ ID NO: 216594 - protein, 725 aa, Artificial Sequence
  derived and/or modified sequence
MAAAKPTLTDSLSFCLAQLAAAAGEALGGEKDPATNETPLSRALLALRTRHIKAAGGIERFRARGGLRPLLALLRRAAAAGSAPSQAGPGSAPSSAASGASSPAPASGPAPSAVSSSSPTPPVRLRKTLDLALSILADCCTEGACRTEVRRLGGILPLVTILQCMKTDSIQNRTARALGNLAMEPESCGDIHCAGAVPLLVESLTACQDSQCLQSVVRALRNLADSPQHRLALAQQGAVRPLAELLATAPDAALTLALVRALLELSRGCSRACAEQLSLGGGLGPLVSLASHPKRAVREGTILILANLCAQGLIRPALGNAGGVEVLVDELRQRRDPNGASPTSQQPLVRAVCLLCREAINRARLRDAGGLDLLMGLLRDPRASAWHPRIVAALVGFLYDTGALGRLQALGLVPLLAGQLCGEAGEEEEEGREAASWDFPEERTPERAQGGSFRSLRSWLISEGYATGPDDISPDWSPEQCPPEPMEPASPAPTPTSLRAPRTQRTPGRSPAAAIEEPWGREGPALLLLSRFSQAPDPSGALVTGPALYGLLTYVTGAPGPPSPRALRILSRLTCNPACLEAFVRSYGAALLRAWLVLGVAPDDWPAPRARPTLHSRHRELGEFPYPPVSLPPCESPSSPMASMGPEPHLPTHLSSPARPPDNLSPEWGGEQGVPVPPWAHRQSSAVSSALALGPRYPNSRCSPAPRIWAGLCFFPGSAIGSALS

SEQ ID NO: 216595 - DNA, 2178 bp, Artificial Sequence
  derived and/or modified sequence
atggccgccgccaagcccaccctgaccgacagcctgagcttctgcctggcccagctggccgccgccgccggcgaggccctgggcggcgagaaggaccccgccaccaacgagacccccctgagcagagccctgctggccctgagaaccagacacatcaaggccgccggcggcatcgagagattcagagccagaggcggcctgagacccctgctggccctgctgagaagagccgccgccgccggcagcgcccccagccaggccggccccggcagcgcccccagcagcgccgccagcggcgccagcagccccgcccccgccagcggccccgcccccagcgccgtgagcagcagcagccccaccccccccgtgagactgagaaagaccctggacctggccctgagcatcctggccgactgctgcaccgagggcgcctgcagaaccgaggtgagaagactgggcggcatcctgcccctggtgaccatcctgcagtgcatgaagaccgacagcatccagaacagaaccgccagagccctgggcaacctggccatggagcccgagagctgcggcgacatccactgcgccggcgccgtgcccctgctggtggagagcctgaccgcctgccaggacagccagtgcctgcagagcgtggtgagagccctgagaaacctggccgacagcccccagcacagactggccctggcccagcagggcgccgtgagacccctggccgagctgctggccaccgcccccgacgccgccctgaccctggccctggtgagagccctgctggagctgagcagaggctgcagcagagcctgcgccgagcagctgagcctgggcggcggcctgggccccctggtgagcctggccagccaccccaagagagccgtgagagagggcaccatcctgatcctggccaacctgtgcgcccagggcctgatcagacccgccctgggcaacgccggcggcgtggaggtgctggtggacgagctgagacagagaagagaccccaacggcgccagccccaccagccagcagcccctggtgagagccgtgtgcctgctgtgcagagaggccatcaacagagccagactgagagacgccggcggcctggacctgctgatgggcctgctgagagaccccagagccagcgcctggcaccccagaatcgtggccgccctggtgggcttcctgtacgacaccggcgccctgggcagactgcaggccctgggcctggtgcccctgctggccggccagctgtgcggcgaggccggcgaggaggaggaggagggcagagaggccgccagctgggacttccccgaggagagaacccccgagagagcccagggcggcagcttcagaagcctgagaagctggctgatcagcgagggctacgccaccggccccgacgacatcagccccgactggagccccgagcagtgcccccccgagcccatggagcccgccagccccgcccccacccccaccagcctgagagcccccagaacccagagaacccccggcagaagccccgccgccgccatcgaggagccctggggcagagagggccccgccctgctgctgctgagcagattcagccaggcccccgaccccagcggcgccctggtgaccggccccgccctgtacggcctgctgacctacgtgaccggcgcccccggcccccccagccccagagccctgagaatcctgagcagactgacctgcaaccccgcctgcctggaggccttcgtgagaagctacggcgccgccctgctgagagcctggctggtgctgggcgtggcccccgacgactggcccgcccccagagccagacccaccctgcacagcagacacagagagctgggcgagttcccctacccccccgtgagcctgcccccctgcgagagccccagcagccccatggccagcatgggccccgagccccacctgcccacccacctgagcagccccgccagaccccccgacaacctgagccccgagtggggcggcgagcagggcgtgcccgtgcccccctgggcccacagacagagcagcgccgtgagcagcgccctggccctgggccccagataccccaacagcagatgcagccccgcccccagaatctgggccggcctgtgcttcttccccggcagcgccatcggcagcgccctgagctag

SEQ ID NO: 216596 - DNA, 2178 bp, Artificial Sequence
  derived and/or modified sequence
atggcggcagcaaagccaacactgacagacagccttagcttctgcctcgctcagctggctgcagccgctggcgaggccctgggcggcgaaaaggaccctgctaccaacgagacacctttgtcccgcgctctcttggcactgaggactcgacatatcaaagcagctgggggaatcgagagattccgtgcacgcggtggtctccgccccctcttggccctgctgcggcgcgcagccgccgccggctccgcaccctctcaggcaggccccggctcggcgccgagcagtgctgcgagcggagcttcttctccagcccctgcctcagggcccgccccctccgctgtgagctcctccagtcccaccccccctgttagactgaggaaaactctggacctcgccctgagcattctcgctgactgttgcaccgagggagcctgcaggactgaggtccgccggttaggagggatattgccattggtgaccatcctgcagtgcatgaagacggacagcatccaaaatcgcaccgcgagggcacttggtaacctggctatggagcctgagtcctgtggcgatattcactgtgctggcgcagtcccattactggtagagtcgctgacagcctgtcaagatagccagtgcctacaaagtgttgtgcgagctctgaggaacctcgccgatagcccacaacaccgcctcgcattggcccagcaaggtgccgttcggcccctggccgaactgctggccactgctcctgacgcggctctgaccctggccctggtccgcgccctcctggagttatctcgcgggtgttcacgcgcgtgtgcagaacaactctcattaggcggaggcctggggcctctcgtcagtctcgccagccacccaaagcgagccgtccgcgaggggactatcctcatacttgccaacctttgtgcccagggcttgatccgccccgctttgggcaacgctgggggcgtggaggtcttagtcgatgagctcagacagaggcgcgaccccaacggcgcatctcctacctcgcaacagccattagtccgggcagtatgcctgctgtgtcgagaggcgatcaatagagcacgcttgagagatgccggaggcctcgatttattaatgggcttgctgcgggatccacgtgccagcgcttggcatcccagaatagtggccgctttggttgggtttctgtacgataccggcgctctgggcagactgcaagctctcggactggttccactgttagcaggccagctgtgcggggaagccggcgaagaagaggaagagggtagagaggccgcatcctgggactttcccgaggagagaactcccgagagagcccagggcggctcatttaggagccttcgcagctggttaatttccgagggatatgcgactggcccagacgacatttcgccagactggtcacctgaacaatgtccccccgagcctatggaacctgcaagtcccgcccctacacctacttcactacgagcgcctcggacccaacgtacccccggacgctcacctgcggccgctatcgaagagccgtggggcagggaaggccctgccctgttattgctctcccgattttcccaggcgcctgacccgtccggcgccctggtgaccgggcccgccctctatggcctcctgacatatgttacaggggcccctggccccccaagccctcgtgcactgcgtattctcagtcggctcacctgtaaccccgcctgtcttgaagccttcgtacgcagctatggagcagcactgctgcgggcgtggctggtactaggggtcgccccagatgactggccagcaccaagggcccgtccgaccctgcattctaggcatcgcgagctgggagaatttccgtatccgcccgttagtctgccaccttgtgagtctcctagcagcccgatggctagcatggggcccgagcctcacttaccaacgcatctcagttcacccgcacggcccccagacaacctgtccccagaatgggggggagagcagggtgtacccgtgcctccctgggcacatcggcagagtagcgctgtgagctctgccctggctttagggccaagatatcctaatagccgctgctctcctgccccccggatctgggccggtttgtgcttctttccaggctcagccatcgggtccgccctctcctag

SEQ ID NO: 216597 - DNA, 459 bp, Artificial Sequence
  derived and/or modified sequence
tgagggaggccacctcataagggcgcccccagattgggaagaggcgtgggagctttggtgccagctcctagggctggcagccaccctccagcaggtgtctgcgcaagtgtccataggaacgctgtcggagccggggggccagcaagggccggccaaccgggtttggacggcactggcaggcgtggggccagggccggtggtgaaaggccagaggggagggctccgaaggtctggaatcctcctagtcctctgtggagtgaggaggtgtattccacagccccatattataccagctgggcgagaggaccccgctgcccacccgagctttgtgctcctccattaaagcgcaaagaacagactgagcccactcccagcgtgaggcaccctaccatgatgcgctatctcgtcgagcaaaccaactccgccactgaaaacgatgaaagctgtctgaagaaatag

SEQ ID NO: 216598 - DNA, 2178 bp, Artificial Sequence
  derived and/or modified sequence
atggctgctgccaagcccaccctgacagacagcctgtccttctgcctggcccagctggccgctgctgctggggaggccctgggcggggagaaggaccctgccaccaatgagacccccctgagccgggccctgctggccctgcggaccaggcacatcaaggctgctgggggcatcgagcgcttccgggcccggggcggcctgcggcccctgctggccctgctgcggcgggctgctgctgctggcagcgcccccagccaggccggccctggcagcgcccccagcagcgctgccagcggggccagcagccctgccccagccagcggccctgcccccagcgctgtgagcagcagcagccccaccccacctgtgcggctgaggaagaccctggacctggccctgagcatcctggccgactgctgcacagaaggagcctgcaggacagaggtgcggcggctgggcggcatcctgcccctggtgaccatcctgcagtgcatgaagacagacagcatccagaacagaacagcccgggccctgggcaacctggccatggagcctgagagctgtggggacatccactgtgccggggctgtgcccctgctggtggagagcctgacagcctgccaggacagccagtgcctgcagagcgtggtgcgggccctgaggaacctggccgacagcccccagcaccggctggccctggcccagcagggcgctgtgcggcccctggccgagctgctggccacagccccagatgctgccctgaccctggccctggtgcgggccctgctggagctgagccggggctgcagccgggcctgtgccgagcagctgagcctgggcggcggcctgggccccctggtgtccctggccagccaccccaagagagctgtgcgggagggcaccatcctgatcctggccaacctgtgtgcccagggcctcatccggcctgccctgggcaatgctgggggcgtggaggtgctggtggatgagctgcggcagaggcgggaccccaacggggccagccccaccagccagcagcccctggtgcgggctgtgtgcctgctgtgccgggaggccatcaacagagcccggctgagagatgctgggggcctggacctgctgatgggcctgctgcgggacccccgggccagcgcctggcacccccgcatcgtggccgccctggtgggcttcctgtatgacacaggagccctgggccgcctgcaggccctgggcctggtgcccctgctggccggccagctgtgtggggaggccggggaggaggaggaggagggccgggaggccgcctcctgggacttccctgaggagaggaccccagagcgggcccagggcggcagcttccgcagcctgcgctcctggctgatcagcgagggctacgccactggaccagatgacatcagcccagactggagccctgagcagtgccccccagagcccatggagcccgccagccctgcccccacccccaccagcctgcgggcccccaggacccagaggaccccaggccgcagccctgctgctgccatcgaggagccctggggccgggagggccctgccctgctgctgctgagccgcttcagccaggccccagaccccagcggggccctggtgacaggccctgccctgtatggcctgctgacctacgtgactggagcccctggcccccccagcccccgggccctgcgcatcctgagccggctgacctgcaacccagcctgcctggaggcctttgtgcgctcctatggagctgccctgctgcgggcctggctggtgctgggcgtggccccagatgactggccagccccccgggcccggcccaccctgcacagccgccaccgggagctgggggagttcccctacccacctgtgtccctgcccccctgtgagagccccagcagccccatggcctccatgggccctgagccccacctgcccacccacctgagcagccctgcccggcccccagacaacctgagccctgagtggggcggggagcagggcgtgcctgtgcccccctgggcccaccggcagagcagcgctgtgtcctctgccctggccctgggcccccgctaccccaacagccgctgcagccctgccccccgcatctgggccggcctgtgcttcttccctggcagcgccatcggcagcgccctgtcctag

SEQ ID NO: 216599 - DNA, 2178 bp, Artificial Sequence
  derived and/or modified sequence
atggccgccgccaagcccaccctgaccgacagcctgagcttctgcctagcacagctcgctgccgctgctggagaagctcttgggggggagaaagatcccgccacgaacgaaaccccgctcagcagggcccttttggcattgcgcacccgccacattaaagcagcgggtggaatcgagcgcttcagggctcgtggtggtctcaggccactcttagctttactccgtcgggcagctgcagccggcagtgcccccagccaagcagggccaggctccgctccttcctccgctgccagtggtgcatcctcccctgctccggctagcggacccgctcccagcgccgtgtcctcatcttcaccaacaccccccgtccggctcaggaagactcttgatttagccctcagtatcttagcagattgttgcacggagggggcttgtcggactgaggtcaggcggcttgggggtattcttcccttggttacaatcttacaatgcatgaagaccgatagcatccaaaaccggacagcccgcgcactgggaaacctcgcaatggaacccgagagctgtggtgatatacattgtgcgggagccgtgcccctgttggtggagagccttacagcttgccaggattcccagtgcctgcaaagtgtcgttagggcactccgaaacctggccgattctccacagcaccgactcgccctggctcagcagggggcagtgcggcctctggcggagttactggcaacagccccggatgctgccctgacgcttgccctcgtgagagcccttctggagctgagtcggggctgttcaagagcatgcgcagaacagctcagccttggtggtggcttgggtccactggtgagcttggccagtcacccaaaacgggcggtgagggagggcactattctgattcttgctaatctgtgtgcacaaggactgatccggcctgccctgggtaacgcagggggagtggaggtgctagtcgacgagctccgacagagacgggacccgaacggtgcatccccaacatctcagcagccactggtcagagccgtgtgcttgctctgccgggaagctattaacagagccagactgagggacgccggaggtctcgacctgttaatggggctgctgcgggatccgcgagcctctgcctggcacccgcgcatagtggctgctctcgtcggatttctttacgataccggggccctgggtaggctacaggcacttggactggtgcctctgctcgctgggcaactgtgcggcgaagcaggggaggaagaggaggagggacgcgaagcggcctcctgggacttcccagaagagaggacccctgagcgtgctcagggggggtcctttcgatcactgaggtcatggctgataagcgaagggtatgccaccgggcccgatgacatctccccggattggagccccgaacaatgccctcctgaacctatggaaccggcgtccccagccccaacgcccaccagtttacgagcgcccagaacccaacgcaccccaggtaggtcaccagcggccgccattgaggagccttgggggagagagggacctgctctgctcttattgtcaagattctcacaagcccccgatccaagtggagctctggttactggcccagcattatacggcctgctgacttacgtcacgggggcccctggtcctccttcccccagagctttgcggatcctttccaggctgacttgtaaccccgcttgcttggaggcctttgtacgttcgtatggtgctgccctccttcgagcatggttggtgttgggggtagcgcctgatgattggcccgcccctagagcaagaccaacgctgcactcccgccaccgggagttgggagagttcccttatccccctgtgtcccttcctccctgcgaatccccttctagccccatggcttccatgggacctgaacctcacctcccaactcacttatcaagccccgccaggcccccggacaacctatcacctgaatggggaggggagcagggcgtgccagtacctccctgggctcatagacaatctagtgctgtgagcagcgcactggcattgggacctcgctacccaaattcccgttgcagtccagcacctagaatatgggcagggctgtgcttcttcccaggttctgctattgggtccgctctaagctag

SEQ ID NO: 216600 - DNA, 2178 bp, Artificial Sequence
  derived and/or modified sequence
atggccgcagctaagccaactctgaccgatagcctttcgttttgtttggcgcagctagccgctgccgctggagaagcactgggcggtgagaaggacccggcaaccaatgagacccccctcagccgagcgctgctggcccttagaacccgccatataaaggccgcaggaggaattgagcgctttagggcgcgaggcggactcaggccacttctcgcgctcctccgccgtgccgctgcggctggatcggcgcctagtcaggctgggccaggaagtgcgcctagttccgcagccagtggtgcctcttctcccgctcctgcatctggacccgctccatcagctgtttccagctcatcacccactcccccagtgcggctcaggaaaacccttgatctcgctctctccattctggctgactgttgtactgaaggggcttgcagaactgaggtcaggaggctaggaggtatcctcccactcgtgacaatccttcagtgcatgaagacagactcaattcaaaatcgtacagcaagagcactgggcaatctggcgatggagccagagagctgcggggatattcactgtgctggggctgtccctctactggtcgagtcccttaccgcatgccaggacagccagtgcttacaatccgtggtcagagccctaaggaacttagctgacagtcctcagcacagactggctcttgcgcaacaaggtgctgtgcggcctctggccgagctgctggcaaccgcaccagatgcagccctaaccctcgcgcttgtgagggctttgcttgagcttagtcgaggatgtagccgggcatgcgctgaacaattatcactcggagggggtcttggaccacttgtttcactggcttcccaccctaagcgcgcagtgcgagaaggtacaatactgatcttggctaacttatgcgcccaggggctaatccgccctgcattggggaatgccggaggagtagaggtgctcgtcgacgaattacggcagcggagggaccccaacggcgcatcccccacctcccaacaacccctggtgagagcagtgtgccttctgtgcagagaggccattaaccgggcaagactgcgggacgccggtggtttggatctgctgatggggctgctgagggaccccagggcctcagcttggcacccaaggatagtcgcagcactggtgggcttcctttatgataccggagccctcggtagactgcaggcactgggcctggtgcccctcctcgcaggccagttatgtggcgaggcaggcgaggaggaagaagagggaagagaagcagcctcttgggattttcccgaggaacgaacgcctgaacgagcccaagggggatcattccgaagcctgcgatcctggctcatctctgagggctacgccacaggcccagatgacatcagcccagattggagtcccgagcaatgcccccctgaaccaatggagcccgcttctccagcccctacccctacctcattaagagctcccaggacgcagagaacacctggcaggtccccagcagcagccatcgaagaaccctgggggcgagagggccctgcacttctgctcctctcaagattctcgcaggctccggatccctctggtgccctggtgaccggcccagctctctatggcctgcttacgtacgttacaggggctcccggaccccctagcccacgggctctcagaatcctttcccgactgacctgtaatccagcctgtctcgaggccttcgtgcggagctatggtgctgctctgttgagggcttggctcgtgttaggcgtggccccagatgactggccagcccctcgcgcacgtcctaccctgcattcacggcacagagaattgggcgagtttccttatcccccagtgtcccttcccccttgcgagtcaccctcgtcccctatggcctcaatgggccctgagccacatctgcccacacatctctcctctcctgctaggccaccagataatctatctcccgagtggggcggagagcagggggtccctgtgcccccatgggctcatagacaatcctccgctgttagctctgccctggcactcggaccaaggtaccccaactctaggtgcagcccagcccctaggatctgggctgggctctgttttttccccggatctgccattggatcagctctaagttag

SEQ ID NO: 216601 - DNA, 4670 bp, Artificial Sequence
  derived and/or modified sequence
tcctctgaccgagcgagggctccccgtctgcggcgcggtcaggaccccgcactttcggcccggctcggggttctcggagtccgtcccaaggccgggccgcaccaccgctggggggcagcgaagcgagcctagaggagaaaaggcggtccccgccgagtgcacgccgggggcggggcacggcacgaaggctccgtggtcggacttctgggctgttcggaggccctggcccacctggagggccctggaagagtttccagcgcttcccgaggtaggcgtgagaagctcgacgcggaccacatctccctcatgcaccgcccgcacgtcccaggatgcgctgcgattaaggtactgccgcgcctcgtgtgcaaggacagacttccggggtcgagaactacaacttccgacttgcatcactgcggtggcgctaaacagcgtcagcgaggcggtgcccgacgatttccctgtcttccagttccgctccctgggatcagcggcgagaagcggggcggagtctgaggcccgagccaagatggcggctgcgaagccaaccctcacggactcgctctcgttctgcctcgcgcagctcgcggcggcggccggggaggctctgggtggggaaaaggacccagcgaccaacgagacacccctgagccgcgcgctcctagccctccgcacgcgccacatcaaggcagcggggggaatcgagcgcttccgggcacgcggcgggctccgccccctactcgcgctgctacggcgagcggctgcagcgggttccgccccgtcccaggcaggccccggctccgccccctcgtcggccgcgtcgggagcttctagccccgcccccgcgtcgggccccgccccctccgctgtgtcgtcgtctagtcctacgccgccagtgcgcctgcgcaagacgctggacttggcgctcagcatcctagccgattgctgtacggaaggggcgtgccggaccgaagtgcgcagactcggaggcatactccctttggtgaccattcttcagtgcatgaagacagacagcatccagaaccgaacggcccgtgccctggggaacttagccatggaacctgagagctgtggggacatccactgtgctggtgctgttcccctgcttgtggagagcctgacagcctgccaggactcgcagtgcctacagagcgtggtgcgtgccctccgtaacctggcagactcaccccagcaccgcctggccttggcacagcagggagcagtgcgtccgctggccgagctcctggccactgccccagatgctgcactgaccttagccctcgtccgtgccctcctggaactcagccgaggctgctcccgggcctgtgctgagcagctaagtctgggtgggggattgggcccactcgtcagcctggcttcccaccccaagcgggcagtacgcgagggaaccattctgatcctcgccaacctgtgtgcccagggcctgattcggcctgcactgggcaatgctggtggcgtggaggtgctggtagatgagctccggcagcgccgggatcctaatggagctagcccaacctcccagcagcccctggtgcgggctgtgtgcctcctatgtcgtgaggccatcaaccgggcccgactgcgggatgctggtggcttggatctactgatgggcctgctgcgggaccctcgtgcaagcgcatggcaccctcgtattgtggctgcccttgtggggtttctgtatgacactggggccctgggccggctgcaggctctgggacttgtgcctctcctggctgggcagctgtgtggtgaggctggtgaggaggaagaagagggaagagaagctgcttcctgggactttcctgaggagaggacccctgagcgggcacagggtggaagcttccggagcctcaggtcgtggctgatctccgagggctatgccacaggccctgatgacatctcccccgactggtctcctgagcagtgtccgccggagcccatggagccggccagccccgccccgaccccgacctcgctgcgggcaccacgcacccaacgcactccgggccgcagccccgccgccgccatcgaggagccttggggacgcgaagggccagccctgctgctgctgtcgcgcttttcccaggcccctgacccaagtggggcacttgtgaccggcccggcgctgtacggcctgctgacctatgtgaccggcgcaccgggcccgcccagcccacgtgcactgcgcattctgtcacgcctcacctgcaaccctgcctgcctcgaggccttcgtgcgcagctatggcgcggcgctgctgcgggcctggctggtgctgggggtggcgcctgacgattggccggcaccacgtgcccggcccactctccacagccggcaccgagagctgggtgagttcccatacccacccgtctccttgcccccatgtgagtccccatcctcccccatggcttccatgggcccagaacctcaccttcccactcacctgtcctccccagcccgtcctccagacaacctgtcaccagagtggggtggggagcagggcgttccagtccctccatgggcccacaggcagagttctgctgtgtcctctgccctagccctgggacccagataccctaactctagatgcagccccgcgcccaggatctgggctggtctgtgcttctttcctggctctgccattggttcagcactgtcctgactgctccccaccagcacgctgacctgtgaaccccagcctcaccatcacccccagcactgccagggactgccctgtctgctgtgccctgaccacaggctgcttcatggcgttactgctagaccaaggagcccttctgctggccctgtccgggcataacagaaggctcgcactcttgtcttctggtcacacctcactatgtcccctcagctcctatctctgtatggcctggtttttcccaggttatgattatagagcgaggattattacaatattgggataaagagtaattactacaaactaatgattaatgatattcatatatctctaagatctatatctggtataactattcttgttttatattgtattatactggaacagctcgtgtcctccgtctcttgcctcggcgcctgggtggcttgccgcccacacttcaggggcccagacttacaccctgactgtcccaccttctgtccttgtcctggacctcaggttcccagcgtcccgagcccagcactgtctcttcagtgccctgatttctcacccagaggtttcaccctccttcatctcacgggcccagagccctgtctcactcaccccacctgtcttagaccccagttcccagcctgacaagctttccactcacaggggagaggctactgcagaacctgacggttcaggctgagtcgccctttggggttggggccctgacgcacctgctgctctctgggagccctgaggaccgagtggcctgcgcgctgaccctgcccttcatctgccggtgagtgggaagtgggtgccttgcggggttgggggaggagtgctgtgtttcccaggcccgttgcccaccttttgaaaggccctctcttccctgtaggaagccctctctgtggcgccggctgcttctggagcagggtggtctccggctcctccttgcggcgctgacccggccggccccacacccgctcttcctcttctttgccgcggactccctttcctgcctccaagacctggtgtctcccactgtgagcccagctgtcccacaggcagtccccatggacctagactcaccttccccttgcctctatgaacctctgctgggcccagcccctgtcccagctcccgacctgcacttcctgctggactcaggcctccagctccctgcccagcgagcggcctcagccaccgcctcccctttcttccgggccctgctgtcaggcagctttgcagaagcccagatggacctggtgcccctgcgaggtctgtcgcctggtgcagcctggcctgtcctgcatcatttgcatggttgtcgggggtgtggggctgccctggggcccgtgcccccaccaggccagcccctgctgggttcagaggccgaggaggcactggaggctgctggccgtttcctactgcctgggctggaggaggagctggaagaggccgtgggccgcatccacctgggaccccagggtggcccggagtcagtgggtgaggtgttccgcctgggccggccccggctggctgcccactgtgcccgctggacactggggtcagagcagtgcccgaggaagcggggtctggccctggtggggcttgtggaggcagcaggtgaagaggcagggcccctgacggaggctttgctggctgtggtgatggggattgagttgggggcaagggtccctgcctagactgttgacgtcccctgggaaggggacccaaggatgaattggctgtgaaggatcctccctgagactggcaagggaggaggctgagcagaaggagtcatcatggaggagcggtgagaacatggaaccggactccaagatgacgatctaaagacccgggagcgagaagccaaggccaggttctgggtgtagggcccagagaagcagaacagcccagagccccaggtgcctggcctggcctagacctctggaattgagattaaacaatttggagttgg

SEQ ID NO: 216602 - protein, 527 aa, Artificial Sequence
  derived and/or modified sequence
MRSDKSALVFLLLQLFCVGCGFCGKVLVWPCDMSHWLNVKVILEELIVRGHEVTVLTHSKPSLIDYRKPSALKFEVVHMPQDRTEENEIFVDLALNVLPGLSTWQSVIKLNDFFVEIRGTLKMMCESFIYNQTLMKKLQETNYDVMLIDPVIPCGDLMAELLAVPFVLTLRISVGGNMERSCGKLPAPLSYVPVPMTGLTDRMTFLERVKNSMLSVLFHFWIQDYDYHFWEEFYSKALGRPTTLCETVGKAEIWLIRTYWDFEFPQPYQPNFEFVGGLHCKPAKALPKEMENFVQSSGEDGIVVFSLGSLFQNVTEEKANIIASALAQIPQKVLWRYKGKKPSTLGANTRLYDWIPQNDLLGHPKTKAFITHGGMNGIYEAIYHGVPMVGVPIFGDQLDNIAHMKAKGAAVEINFKTMTSEDLLRALRTVITDSSYKENAMRLSRIHHDQPVKPLDRAVFWIEFVMRHKGAKHLRSAAHDLTWFQHYSIDVIGFLLACVATAIFLFTKCFLFSCQKFNKTRKIEKRE

SEQ ID NO: 216603 - DNA, 1584 bp, Artificial Sequence
  derived and/or modified sequence
atgagaagcgacaagagcgccctggtgttcctgctgctgcagctgttctgcgtgggctgcggcttctgcggcaaggtgctggtgtggccctgcgacatgagccactggctgaacgtgaaggtgatcctggaggagctgatcgtgagaggccacgaggtgaccgtgctgacccacagcaagcccagcctgatcgactacagaaagcccagcgccctgaagttcgaggtggtgcacatgccccaggacagaaccgaggagaacgagatcttcgtggacctggccctgaacgtgctgcccggcctgagcacctggcagagcgtgatcaagctgaacgacttcttcgtggagatcagaggcaccctgaagatgatgtgcgagagcttcatctacaaccagaccctgatgaagaagctgcaggagaccaactacgacgtgatgctgatcgaccccgtgatcccctgcggcgacctgatggccgagctgctggccgtgcccttcgtgctgaccctgagaatcagcgtgggcggcaacatggagagaagctgcggcaagctgcccgcccccctgagctacgtgcccgtgcccatgaccggcctgaccgacagaatgaccttcctggagagagtgaagaacagcatgctgagcgtgctgttccacttctggatccaggactacgactaccacttctgggaggagttctacagcaaggccctgggcagacccaccaccctgtgcgagaccgtgggcaaggccgagatctggctgatcagaacctactgggacttcgagttcccccagccctaccagcccaacttcgagttcgtgggcggcctgcactgcaagcccgccaaggccctgcccaaggagatggagaacttcgtgcagagcagcggcgaggacggcatcgtggtgttcagcctgggcagcctgttccagaacgtgaccgaggagaaggccaacatcatcgccagcgccctggcccagatcccccagaaggtgctgtggagatacaagggcaagaagcccagcaccctgggcgccaacaccagactgtacgactggatcccccagaacgacctgctgggccaccccaagaccaaggccttcatcacccacggcggcatgaacggcatctacgaggccatctaccacggcgtgcccatggtgggcgtgcccatcttcggcgaccagctggacaacatcgcccacatgaaggccaagggcgccgccgtggagatcaacttcaagaccatgaccagcgaggacctgctgagagccctgagaaccgtgatcaccgacagcagctacaaggagaacgccatgagactgagcagaatccaccacgaccagcccgtgaagcccctggacagagccgtgttctggatcgagttcgtgatgagacacaagggcgccaagcacctgagaagcgccgcccacgacctgacctggttccagcactacagcatcgacgtgatcggcttcctgctggcctgcgtggccaccgccatcttcctgttcaccaagtgcttcctgttcagctgccagaagttcaacaagaccagaaagatcgagaagagagagtag

SEQ ID NO: 216604 - DNA, 717 bp, Artificial Sequence
  derived and/or modified sequence
atggagaacttcgtgcagagcagcggcgaggacggcatcgtggtgttcagcctgggcagcctgttccagaacgtgaccgaggagaaggccaacatcatcgccagcgccctggcccagatcccccagaaggtgctgtggagatacaagggcaagaagcccagcaccctgggcgccaacaccagactgtacgactggatcccccagaacgacctgctgggccaccccaagaccaaggccttcatcacccacggcggcatgaacggcatctacgaggccatctaccacggcgtgcccatggtgggcgtgcccatcttcggcgaccagctggacaacatcgcccacatgaaggccaagggcgccgccgtggagatcaacttcaagaccatgaccagcgaggacctgctgagagccctgagaaccgtgatcaccgacagcagctacaaggagaacgccatgagactgagcagaatccaccacgaccagcccgtgaagcccctggacagagccgtgttctggatcgagttcgtgatgagacacaagggcgccaagcacctgagaagcgccgcccacgacctgacctggttccagcactacagcatcgacgtgatcggcttcctgctggcctgcgtggccaccgccatcttcctgttcaccaagtgcttcctgttcagctgccagaagttcaacaagaccagaaagatcgagaagagagagtag

SEQ ID NO: 216605 - DNA, 1584 bp, Artificial Sequence
  derived and/or modified sequence
atgcggtctgacaaatcagccctggtattcctgctactacagcttttttgtgtgggatgcggattctgcggaaaagtgctggtctggccctgtgatatgagccactggctgaacgttaaggtaattctcgaagagctgatcgtgaggggtcatgaagtcacggttctgacccattccaagccatcccttatcgactaccggaaacccagcgctctcaaattcgaggtggttcacatgccccaggatcggaccgaggagaacgaaattttcgtggatcttgcccttaacgtgctgcccggcctttctacatggcagtccgtgattaaactgaacgatttcttcgtggagatccggggcacgctgaagatgatgtgcgagtcattcatttataatcagactctgatgaagaagctgcaggagaccaactatgatgtcatgctgatcgacccggtgataccttgtggggacctcatggcagaactgcttgctgtcccctttgtgctgaccctgcgtatttccgttggaggcaatatggagcgctcatgtggcaagttacctgcgccactctcttacgtcccggtcccgatgaccggtctgacagatcgaatgacatttctggagagagtgaagaacagcatgcttagcgtgctgtttcatttttggatccaggattatgactaccacttttgggaggaattctactccaaagccctggggagaccaaccaccctttgcgaaaccgttgggaaggctgagatatggctcatcagaacctactgggacttcgagttcccccagccataccagccaaactttgaatttgtcggcggcctgcactgcaagcccgccaaagctctcccgaaggagatggagaatttcgtacaaagttctggtgaggacggcattgttgtgttttctctgggctctttgttccagaatgtaacagaagagaaggcaaacatcatagcaagtgcattggcacagatccctcagaaggtcctctggcggtacaaaggtaagaaaccatcaaccctgggcgctaacaccaggctgtacgactggattcctcaaaatgacttgctggggcaccctaagacaaaagctttcatcactcacgggggtatgaacgggatctatgaggcaatctaccatggggtacctatggtgggagtgcccatcttcggagatcagctcgataacatcgctcacatgaaagctaaaggcgctgctgtggagatcaactttaagaccatgacctcagaagacctcctacgggctttgcggaccgtgatcaccgatagttcttacaaggaaaacgctatgcgcctgagcaggatccaccacgatcagcccgtcaaaccactggatcgagcagtattttggatcgagtttgtgatgcgccataagggagctaagcatctccgctccgcggcacacgacttgacttggttccaacactactctatcgacgttataggcttcctacttgcctgcgtggctactgccatcttcctgttcacgaaatgtttcttattctcatgccagaaattcaataaaaccaggaagatagagaaacgggagtag

SEQ ID NO: 216606 - DNA, 717 bp, Artificial Sequence
  derived and/or modified sequence
atggaaaatttcgttcagtcctctggcgaggacggaattgtggtgttttcccttggtagcctctttcagaacgtgaccgaggaaaaagctaacatcattgcatcagctctcgctcagattccccagaaagtgttatggcggtacaagggcaagaaaccgagtacgttgggcgccaacactcggctgtacgactggattcctcagaacgatctgctgggacatcccaagactaaagcattcatcactcacggcgggatgaacggcatctatgaggctatataccatggagttccaatggtaggtgttcctatatttggggaccagctcgataatattgcccatatgaaagcaaagggtgcagccgtagagatcaacttcaaaacgatgacaagcgaagaccttttacgggccttacgtaccgtcattacagactcctcctataaggagaatgcaatgcgcctaagtcgaatccatcacgaccaacctgtcaagcctctcgatagggccgtgttctggattgaattcgtgatgcgtcataagggggcgaagcatttgcgctccgccgctcacgacctgacttggtttcaacattactcaatcgatgtaataggctttctgctcgcctgtgttgcaacagcaatctttttattcacaaagtgtttccttttttcttgtcagaaatttaacaagacaagaaaaattgaaaaaagggagtag

SEQ ID NO: 216607 - DNA, 1584 bp, Artificial Sequence
  derived and/or modified sequence
atgcgaagcgacaagagcgcactggtgtttttgctgctgcagctgttctgcgtcgggtgcgggttttgcggtaaggtcctagtgtggccctgcgatatgagccactggcttaacgtgaaggttatcttagaggagttgatagtgcggggccatgaggttacggtactgacacacagcaagccatccttgattgactaccggaagccctccgctctgaaattcgaggtggtccacatgccccaggatagaacagaggaaaacgaaattttcgttgacttagcgctgaacgtactacccgggctcagtacatggcaatccgtgattaagcttaatgatttcttcgtggaaataagagggacgctcaagatgatgtgtgagtcctttatttacaatcaaactcttatgaagaaactgcaggaaacgaattatgatgttatgctaattgatcctgttataccctgtggcgaccttatggccgagttgctggcagtgccatttgtgctgacattgcggatatccgttggggggaacatggaacgtagctgcggtaaattgcctgccccactgagttacgttccagtcccgatgaccggactaacggatcggatgaccttcctcgagagagtgaagaactctatgctgtcggtgctgtttcacttttggatccaagattacgactaccacttttgggaagaattctatagcaaggcgctcggtcggcctacgacgttgtgtgaaaccgtgggcaaggccgaaatatggctgatccggacttactgggatttcgaatttccacagccttatcagccaaactttgagtttgttggcggcttacattgtaaacctgctaaggcattgcccaaagagatggagaatttcgttcagagttctggggaggacgggatcgtcgtgttctcccttggctccctatttcagaatgtgactgaagaaaaggctaatattatcgccagtgcgctggcacagatccctcagaaggtcttgtggcgttacaagggcaaaaagcccagcacactgggcgcaaacactcggctctacgactggattccacagaacgatctgctcggacacccaaagaccaaggcctttataacccacggaggcatgaatggaatctatgaagctatctatcatggagttccgatggtaggcgtcccaattttcggggatcagctcgacaacatcgcccatatgaaggccaagggggcggccgtggagattaatttcaagacgatgacctccgaggacctcctaagagctcttcgcaccgtgataacggattccagctacaaagagaatgctatgagacttagtagaatccatcatgatcagccggtcaagccattggatagagcagttttctggatcgagttcgtgatgagacataaaggagcgaagcatcttcgtagcgcagcccacgacctgacatggtttcagcattactctattgatgtgatcgggtttttgctggcttgtgtggcaaccgccatttttttgtttacaaagtgctttctcttttcctgccagaaattcaacaagactcggaaaattgaaaaacgggaatag

SEQ ID NO: 216608 - DNA, 717 bp, Artificial Sequence
  derived and/or modified sequence
atggagaattttgttcagtcaagcggagaggatggcatcgtggtgttttctctcggaagcctattccaaaacgtgactgaggagaaggcaaatattatcgcctcggcactagcacagatcccacagaaggtgctgtggaggtacaagggcaaaaaaccctctacgcttggggccaatacacgactgtatgattggattccccagaacgacttgctaggacaccctaagaccaaggccttcatcacacacggggggatgaatgggatttacgaagcgatataccatggagtcccaatggttggcgtgcccatttttggcgaccagctggataacatcgctcatatgaaggctaaaggtgcagctgtcgagatcaactttaagaccatgacgtcagaggacctgctgcgggccctgaggacagtaatcaccgatagcagttataaagagaacgctatgaggttgtccaggattcaccatgaccagcccgtgaagccgttggacagagccgtcttttggattgaattcgttatgaggcataagggcgcaaaacacctgcgctctgcagctcacgatcttacatggttccaacactacagtattgacgtcattgggttcttgcttgcctgtgtggccaccgcaatatttctcttcacaaagtgttttcttttctcttgccaaaagtttaataagacccgcaagatagagaagcgcgagtag

SEQ ID NO: 216609 - DNA, 1584 bp, Artificial Sequence
  derived and/or modified sequence
atgagaagtgacaagagcgccctggtgttcctgctgctgcagctgttctgtgtgggctgcggcttctgtgggaaggtgctggtgtggccctgtgacatgagccactggctgaatgtgaaggtgatcctggaggagctgattgtgcggggccacgaggtgacagtgctgacccacagcaagcccagcctgattgactacaggaagcccagcgccctgaagtttgaggtggtgcacatgccccaggacagaacagaggagaatgagatctttgtggacctggccctgaatgtgctgcccggcctgagcacctggcagagcgtcatcaagctgaatgacttctttgtggagatccggggcaccctgaagatgatgtgtgagagcttcatctacaaccagaccctgatgaagaagctgcaggagaccaactatgatgtgatgctgattgaccccgtcatcccctgtggggacctgatggccgagctgctggccgtgccctttgtgctgaccctgcgcatctctgtgggcggcaacatggagaggagctgtgggaagctgcctgcccccctgtcctatgtgcctgtgcccatgacaggcctgacagacaggatgaccttcctggagcgggtgaagaacagcatgctgtctgtgctcttccacttctggatccaggactatgactaccacttctgggaggagttctacagcaaggccctgggccggcccaccaccctgtgtgaaacagtgggcaaggccgagatctggctgatccgcacctactgggactttgagttcccccagccctaccagcccaactttgaatttgtgggcggcctgcactgcaagccagccaaggccctgcccaaggagatggagaactttgtgcagagcagtggagaagatggcatcgtggtgttcagcctgggcagcctcttccagaatgtgacagaggagaaggccaacatcatcgccagcgccctggcccagatcccccagaaggtgctgtggagatacaagggcaagaagcccagcaccctgggcgccaacacccggctgtatgactggatcccccagaatgacctgctgggccaccccaagaccaaggccttcatcacccacggcggcatgaatggcatctatgaggccatctaccacggcgtgcccatggtgggcgtgcccatctttggagaccagctggacaacatcgcccacatgaaggccaagggagctgctgtggagatcaacttcaagaccatgaccagcgaggacctgctgcgggccctgaggacagtcatcacagacagcagctacaaggaaaatgccatgaggctgagccgcatccaccacgaccagcctgtgaagcccctggacagagctgtgttctggattgaatttgtgatgaggcacaagggggccaagcacctgcggtctgctgcccatgacctgacctggttccagcactacagcattgatgtgattggcttcctgctggcctgtgtggccacagccatcttcctgttcaccaagtgcttcctgttcagctgccagaagttcaacaagaccaggaagattgagaagcgggagtag

SEQ ID NO: 216610 - DNA, 717 bp, Artificial Sequence
  derived and/or modified sequence
atggagaactttgtgcagagcagcggggaggatggcatcgtggtgttcagcctgggcagcctcttccagaatgtgacagaggagaaggccaacatcatcgccagcgccctggcccagatcccccagaaggtgctgtggagatacaagggcaagaagcccagcaccctgggcgccaacacccggctgtatgactggatcccccagaatgacctgctgggccaccccaagaccaaggccttcatcacccatggaggcatgaatggcatctatgaggccatctaccatggagtgcccatggtgggcgtgcccatctttggagaccagctggacaacatcgcccacatgaaggccaagggagctgctgtggagatcaacttcaagaccatgaccagcgaggacctgctgcgggccctgaggacagtcatcacagacagcagctacaaggaaaatgccatgaggctgagccgcatccaccacgaccagcctgtgaagcccctggacagagctgtgttctggattgaatttgtgatgaggcacaagggggccaagcacctgcggtctgctgcccatgacctgacctggttccagcactacagcattgatgtgattggcttcctgctggcctgtgtggccacagccatcttcctgttcaccaagtgcttcctgttcagctgccagaagttcaacaagaccaggaagattgagaagcgggagtag

SEQ ID NO: 216611 - DNA, 1584 bp, Artificial Sequence
  derived and/or modified sequence
atgcggagcgacaagagcgccctggtgttcctgctgctgcagctgttctgtgtgggatgcggtttctgtggtaaggtcctagtgtggccttgtgacatgtctcactggctcaatgtgaaggtaatcttagaagagctgattgttcggggtcacgaagtgactgtcttgacccattcaaaacctagcctgattgattaccggaagccttctgcgcttaagtttgaggtggtccatatgccacaggatagaactgaagagaacgaaatcttcgtagacctagccttgaacgtactgccggggctgtctacttggcagagtgttatcaagctcaacgatttctttgtcgagatccgagggacactgaaaatgatgtgtgaaagtttcatttataatcagaccctcatgaaaaagctgcaggaaaccaactatgatgtcatgctgattgaccccgtgatcccctgtggcgatctcatggctgaactgctggcagtcccattcgttctgacgttgaggatttcagttggcggtaatatggaacggtcttgcggcaagctgcctgctccgctgtcatatgtgcccgttccgatgacaggcctcacagacaggatgaccttcttggaaagagtgaaaaactctatgttgtcggtgttgtttcatttctggatccaggattatgattatcatttctgggaggaattctactctaaggccttagggaggcccaccactctctgtgagaccgtaggcaaggccgagatatggttgatcaggacatattgggacttcgagttcccccagccttatcagcccaatttcgagtttgtgggggggcttcactgcaaacccgccaaggctctgccaaaggaaatggaaaacttcgtacagtcttcaggtgaggacggtattgtggtcttcagtttgggttctctttttcagaatgtcacagaggagaaggcaaatattatcgcctctgccctggcgcaaatcccccagaaagtcctgtggagatataaagggaaaaaaccttcaactctaggcgcgaacaccaggctttatgattggatcccacagaatgatctgctgggtcatccaaaaaccaaggcttttataacacatgggggaatgaatggcatttacgaggccatctatcatggcgtgccaatggtcggtgtgccaattttcggcgatcaactcgataatattgcccacatgaaggccaaaggggccgcagtagaaatcaacttcaagaccatgaccagcgaggacttgctgagggcgctcagaacagtcattaccgactcatcatacaaggaaaatgccatgcgcctgagcaggatccatcatgatcagcctgtaaaaccactggatcgagctgtcttttggatagaatttgtgatgcgccataagggcgctaagcatctgcggagcgcagcccatgatttaacatggtttcagcactatagcattgacgtcatcggttttctgctggcttgtgttgccaccgcgatcttcttatttaccaagtgtttcttgttttcttgtcaaaaattcaacaagacacgaaagatagaaaagcgcgagtag

SEQ ID NO: 216612 - DNA, 717 bp, Artificial Sequence
  derived and/or modified sequence
atggagaacttcgtgcagagcagcggcgaggacggcatcgtggtgtttagcctgggaagcctcttccagaatgtgacagaggagaaagccaatattatcgcgagtgccctggctcagatcccacagaaagttttatggaggtataaaggcaaaaagccatcaaccctaggggccaatactagactgtatgattggatcccacagaacgacttgctgggacatcccaaaactaaggcatttatcactcacggcggtatgaatggcatctacgaggcaatttaccatggagtccctatggttggcgtgccaatattcggtgaccagctagataacatagcccacatgaaggctaaaggtgctgcagtcgaaataaattttaagacaatgacaagtgaagacctgttgcgggctctgcgcacagtcatcaccgatagctcctacaaggagaacgcaatgcggctgagccggatccaccacgaccagcctgtgaaaccactggatcgtgctgttttttggattgagtttgtgatgaggcacaaaggcgccaagcaccttaggtctgccgctcacgacctgacatggttccagcattacagcatcgacgtgattggcttccttcttgcttgtgtcgcaactgctatcttcctgttcacaaagtgcttcctgttttcgtgccaaaaattcaataagacacgaaaaatcgaaaagcgcgagtag

SEQ ID NO: 216613 - DNA, 1584 bp, Artificial Sequence
  derived and/or modified sequence
atgcggagcgacaagagcgccctggtgttcctgctgctgcagctgttctgcgtgggctgcggcttttgcggcaaggtcctcgtgtggccatgtgatatgagccactggttaaatgtcaaggtcatattggaagaactaatcgtgcgtggccatgaggtgacggtgcttacacattccaaaccatctctgatcgattaccgaaagccgagtgcactgaaattcgaggtcgtccacatgccccaggataggactgaggagaacgaaatctttgtcgatttggctctgaacgttctccctggccttagtacgtggcagtcggtgattaagctcaacgactttttcgtggagatacgggggaccctgaagatgatgtgtgagagtttcatatataaccaaaccctgatgaagaaattacaagagacgaactatgatgttatgcttatcgatcctgtcattccgtgcggggatctgatggcagaactgctagccgtccctttcgtgcttaccttacgcatttcagtcggcggtaatatggagaggagctgcgggaagttgcccgcccctctgtcatatgtgcccgtccctatgaccggtttaacagacagaatgacgtttctggaaagggtaaagaactccatgctttcagtgctatttcacttttggatccaggactacgactatcacttctgggaggagttctacagtaaagcgctgggcagacccacgaccctgtgcgaaaccgtagggaaagccgaaatctggctgatccggacctattgggatttcgagttccctcagccctaccaacctaatttcgagtttgtgggaggacttcactgcaagccagccaaagccctacctaaggagatggagaattttgtccagtccagtggcgaggacggaatcgtagtgttctccttgggtagcctatttcagaatgtgaccgaagaaaaggcgaacataatcgccagcgccctggctcaaatcccacagaaggttctgtggcgttataagggaaaaaaaccatctacactgggagccaatacaagactttacgactggatcccccaaaacgacctactgggacacccaaaaacaaaggccttcatcacccacggcggtatgaacggcatctatgaagctatttatcacggggtccccatggtcggcgtcccaattttcggagaccaactggataatattgctcacatgaaggctaaaggggcagccgtggagatcaactttaagacaatgaccagcgaggacctgcttagggcgctccgaactgtgatcacagactccagctataaggagaacgctatgcggctgagccgcatccaccacgaccaacccgtgaaacctcttgaccgtgctgtgttttggatcgaatttgttatgcgacacaagggggccaagcatctaagatctgctgcccacgacctgacctggttccagcattactccatagatgtcataggtttcctgctagcctgcgtggccacagccattttcctcttcaccaagtgcttcctattttcttgccagaagttcaacaaaacgagaaagattgagaagcgggaatag

SEQ ID NO: 216614 - DNA, 717 bp, Artificial Sequence
  derived and/or modified sequence
atggagaacttcgtgcagagcagcggcgaggacggcatcgtggtgttcagtctggggagcttgtttcagaacgtgacagaagagaaagcgaatattatagcgagcgcactggcacagatacctcaaaaggtcctgtggcggtacaaagggaagaaaccctccacattgggcgccaacaccaggctgtacgattggattcctcagaatgacctcctggggcatcccaagaccaaagcctttatcactcatggaggcatgaatgggatctatgaagctatctatcatggggtcccgatggtgggcgtccctatcttcggtgatcagttggataatattgcacatatgaaggccaaaggtgcggcggtcgagatcaactttaagactatgaccagcgaagaccttttgcgagcactgcgcaccgtgatcaccgattcaagttacaaagagaacgcaatgaggttgtctagaatccaccacgaccagccagtgaaaccactggatagagccgtattttggatcgaatttgttatgagacacaagggcgccaaacacctccgttccgcagcgcacgaccttacctggttccaacactatagcatcgacgttataggatttctgctggcatgtgttgcgaccgctatcttcctcttcactaaatgctttttgttctcttgtcagaagtttaataagacccgtaaaattgaaaagcgtgagtag

SEQ ID NO: 216615 - DNA, 1584 bp, Artificial Sequence
  derived and/or modified sequence
atgagaagcgataagtccgcactagtttttctgctcctacagctgttctgtgtcggatgcggcttttgtgggaaagtgcttgtgtggccctgtgacatgtctcactggcttaatgttaaggtcatacttgaggagctgattgtgagaggccacgaggtaacggtgctgactcatagcaaaccttctctgatcgactacagaaagccctccgcacttaaattcgaagtcgtgcacatgcctcaggacagaactgaggagaatgaaatctttgtagatttagccctgaatgtgttgccaggtctctccacctggcagtctgtgatcaagcttaacgattttttcgtggagatccggggtaccctcaaaatgatgtgtgagagttttatctataatcagactctgatgaagaagctacaagaaacgaactacgacgtgatgttgatcgaccctgtgattccctgcggcgatttgatggccgaactcctcgcggttccctttgtcctgaccttgcggatatcagtcggcggtaacatggagagatcctgtggcaagctgcctgcccctctgtcctatgtaccagtgcccatgactggtcttactgaccgaatgaccttcttggagcgagtgaagaattcaatgctgtctgtgttgtttcacttttggatacaagactatgattatcatttctgggaggaattctatagcaaagccctcggacgaccaacgaccctgtgtgaaaccgtaggtaaggcagagatctggttaattcgaacctactgggactttgaattcccccagccctatcagcccaatttcgaattcgtgggcggattgcattgcaagccagccaaggcattgcccaaagaaatggaaaatttcgtgcagagcagcggcgaggatggaatcgtggttttctccctcggctcactgttccaaaacgtgactgaggaaaaggctaacatcattgccagtgcactggcacagatcccccagaaagtcctgtggcgctataaaggaaagaaaccttcaactctgggggcaaatacacgtctgtacgattggataccccaaaacgaccttttaggccaccccaagacaaaggccttcataacacacggcggtatgaacggtatttatgaagcgatatatcacggcgtgccaatggtgggggtcccaatttttggggatcagttggacaacattgcccacatgaaggccaagggcgctgccgtggagatcaacttcaagacaatgacctctgaggaccttctgcgggcactcaggaccgtcattacagactcctcttataaggagaatgctatgcggctcagccggattcatcatgaccagccagtaaagcccttggatagagcggtattctggattgagtttgttatgaggcacaaaggagctaaacacttgagaagcgccgcacatgacctgacttggtttcagcactacagcatcgatgtgatcggatttctgctggcctgtgtggctactgcgatcttcctgttcaccaagtgtttcctgttcagctgtcagaagttcaacaagaccaggaagattgagaagcgggaatag

SEQ ID NO: 216616 - DNA, 717 bp, Artificial Sequence
  derived and/or modified sequence
atggagaattttgtccagagctcgggcgaggatggaatagtggtattctctttggggtccttgtttcagaatgtcaccgaagaaaaggcgaacatcatcgcatctgcactggcccagattccccagaaggtactgtggcgctataagggtaagaaaccttctaccctgggagcaaatacgagattgtatgactggatacctcagaatgacctcctcggccaccccaagaccaaggcctttataactcacggaggtatgaacgggatttacgaagccatttatcatggcgtccctatggtgggagtccctattttcggagaccagttggataatatcgctcacatgaaggccaagggagcagccgtggagatcaattttaagacgatgactagtgaggacctactccgtgcattacggaccgtgatcactgattcgtcatacaaagagaacgcaatgcgtctgtcccgcattcaccatgaccagcctgtcaagcctcttgatagggctgtgttttggattgagtttgtcatgaggcataagggggctaagcacctaagaagtgccgcacacgacctgacctggtttcaacactattccatcgatgtcatcggtttcctgctggcctgtgtggctaccgccattttcctgtttactaaatgttttctattcagctgccagaagttcaataaaacccgcaagattgagaaaagagaatag

SEQ ID NO: 216617 - DNA, 1584 bp, Artificial Sequence
  derived and/or modified sequence
atgaggtcggacaagagcgccttggtgttcctgctgctgcagctcttctgtgttggctgcggattctgtggaaaggttctcgtgtggccgtgcgatatgagccactggcttaacgtgaaagtaatactggaggagcttattgtccgcggacacgaggtgacagtgctgacacactcaaagccgtcccttattgactaccgcaagccaagcgccctgaaattcgaagtggtgcacatgcctcaggataggacggaggagaacgagatttttgtggatctggctctgaatgtgctcccaggactctcaacatggcagagcgttattaagctgaacgacttctttgttgagatccggggaaccctcaagatgatgtgtgagagctttatatacaatcagaccctaatgaagaaactccaggagactaactatgacgtgatgcttattgatcccgttatcccatgcggggatcttatggcagaactgcttgccgtccccttcgtgctgaccctgcgcatttctgtgggtggtaacatggaaaggtcttgcggcaaactgccagccccactgtcatacgtccctgtccctatgaccggcctcacggaccggatgaccttcctggaaagagttaagaatagcatgctcagcgtcctgttccacttttggatccaggactacgattaccacttttgggaggaattttattccaaagccctagggagaccaacaacattatgcgagactgtgggcaaggccgagatctggcttatccgcacctattgggacttcgagtttccccagccctatcagcccaattttgagtttgttggtggcctacattgtaaacccgcaaaggcactgcccaaagagatggaaaactttgtgcagagttcaggcgaggatggtatcgtggtgttctcgctgggttctttattccagaacgtgacagaggagaaagctaacatcatcgcatctgccctggcacagattccgcagaaagtgctgtggcggtacaagggcaagaaaccctcgacgctcggggcaaatacccggctatatgattggatcccccagaacgatctactcggtcacccaaaaactaaggcattcatcacccacggcggaatgaacggcatatatgaggctatctaccatggagtgccgatggtgggagtgcccatctttggggatcagctggacaatattgcccatatgaaagcaaagggcgctgccgtggaaataaacttcaaaaccatgacatccgaggacttactgcgtgcccttaggaccgtgattaccgactcttcttacaaagagaatgcaatgcggctgagccggatccaccacgaccaaccagtgaaacccctggatcgtgccgtcttctggatagaatttgtgatgcggcacaaaggagccaagcacctccgcagtgccgctcacgacctgacttggtttcagcattactcgatcgatgtgatcggattcctcctggcctgcgtcgctacagcaatcttcctctttaccaagtgcttcctcttcagctgtcagaaattcaataaaactcgaaagattgaaaagagggagtag

SEQ ID NO: 216618 - DNA, 717 bp, Artificial Sequence
  derived and/or modified sequence
atggaaaattttgtccagagcagcggggaggatggaatcgttgtattctcactgggaagcttgtttcaaaatgtaaccgaggagaaggccaatattatcgcttctgcgctcgctcagattccacagaaggtcctctggagatacaaaggcaaaaaaccatccaccctgggggctaataccaggctctatgattggatcccacagaatgatttactggggcaccctaaaactaaagcatttatcactcatggtggtatgaacgggatatacgaggccatttatcacggagtgcccatggtgggcgtgcctatcttcggggatcagctggacaacatagcccacatgaaagcaaaaggcgcagccgtggaaattaattttaagactatgacaagtgaggaccttctgagggccttacgcacagtcatcactgactcgtcctacaaggagaatgctatgagattgtctcgcatacaccatgaccagcccgttaaacctctggaccgagcagttttctggatcgagttcgtaatgcgacataagggcgctaagcatctgaggtcagccgcacatgacttaacttggttccagcattacagtattgacgtgatcggcttcctccttgcctgcgtggctactgccatctttctcttcactaagtgtttcctattctcctgccagaaattcaacaagaccaggaagatcgaaaagagggagtag

SEQ ID NO: 216619 - DNA, 2965 bp, Artificial Sequence
  derived and/or modified sequence
ttgcagatcagtgtgtgagggaactgccatcatgaggtctgacaagtcagctttggtatttctgctcctgcagctcttctgtgttggctgtggattctgtgggaaagtcctggtgtggccctgtgacatgagccattggcttaatgtcaaggtcattctagaagagctcatagtgagaggccatgaggtaacagtattgactcactcaaagccttcgttaattgactacaggaagccttctgcattgaaatttgaggtggtccatatgccacaggacagaacagaagaaaatgaaatatttgttgacctagctctgaatgtcttgccaggcttatcaacctggcaatcagttataaaattaaatgatttttttgttgaaataagaggaactttaaaaatgatgtgtgagagctttatctacaatcagacgcttatgaagaagctacaggaaaccaactacgatgtaatgcttatagaccctgtgattccctgtggagacctgatggctgagttgcttgcagtcccttttgtgctcacacttagaatttctgtaggaggcaatatggagcgaagctgtgggaaacttccagctccactttcctatgtacctgtgcctatgacaggactaacagacagaatgacctttctggaaagagtaaaaaattcaatgctttcagttttgttccacttctggattcaggattacgactatcatttttgggaagagttttatagtaaggcattaggaaggcccactacattatgtgagactgtgggaaaagctgagatatggctaatacgaacatattgggattttgaatttcctcaaccataccaacctaactttgagtttgttggaggattgcactgtaaacctgccaaagctttgcctaaggaaatggaaaattttgtccagagttcaggggaagatggtattgtggtgttttctctggggtcactgtttcaaaatgttacagaagaaaaggctaatatcattgcttcagcccttgcccagatcccacagaaggtgttatggaggtacaaaggaaaaaaaccatccacattaggagccaatactcggctgtatgattggataccccagaatgatcttcttggtcatcccaaaaccaaagcttttatcactcatggtggaatgaatgggatctatgaagctatttaccatggggtccctatggtgggagttcccatatttggtgatcagcttgataacatagctcacatgaaggccaaaggagcagctgtagaaataaacttcaaaactatgacaagcgaagatttactgagggctttgagaacagtcattaccgattcctcttataaagagaatgctatgagattatcaagaattcaccatgatcaacctgtaaagcccctagatcgagcagtcttctggatcgagtttgtcatgcgccacaaaggagccaagcacctgcgatcagctgcccatgacctcacctggttccagcactactctatagatgtgattgggttcctgctggcctgtgtggcaactgctatattcttgttcacaaaatgttttttattttcctgtcaaaaatttaataaaactagaaagatagaaaagagggaatagatctttccaaattcaagaaagacctgatggggtaatcctgttaattccagccacatagaatttggtgaaaaccttgctattttcatattatctattctgttattttatcttagctatatagcctagaattccacgatcatgaggttgtgagtatatctcattctttcgttgtattttcctaggtgtctttactctcttctctcactttgtgacacaaggacatgaatacatctaaattttcctatttctgatatgactgttttgatgatgtcattacttctataaccttaagtgatagggtgacatgcaatatgattattcctggtgtgcgcccaaacacatggatataaagaggtaaaaaacttaaaattcacaaaattcagtaaaccacacaaatcaggtaagtgttctatgagattagctggctatgagaaacataatgatgtttctttttcaatttaaataagcccttctacatagccagcatcagtgatctcagaaaataaattgctaataatgatgacatggcattatgcttagaaaagtttgctgtatttccatagacctcatctagatgtcatggcctacatttctgccatcactcaaccaatacttttttctgttttcttgatgataaaaagacctttctcatgattgccatcaaataacaaaagaaactattttttttctcacatagagaacatgtcagtaagatattcaaggtgaacagattatttttgggattagtaactatttgaaatatgtggtgataattactgagtttataaaatttatttgatagtacacttaaagaagatttatatgtttattctttaaaaatgatgaatactcataattcttatctctataatcaaaagtataatttactgtagaaaaataaagagatgcttgttctgaaagtaagatcagtgaactgcttttcagtctcaatctttgagaattgtaaattcatcaaataattgcttacatagtaaaaatttaaggtattagaaaacctgcataacaaatagtattatatattaaatattttgatatgtaaagctctacacaaagctaaatatagtgtaataatgtttacactaataagcaaatatgttaatcttctcatttttttactgtcatataatcttagtgatatgcctattaatagttttaaataaataaattggctcatctggctttttgaaaattttgaaattcttacagatgttgattaggtatatctacaaattaatttcaattttaaaatgatgatataaaaataaatataagtatttttcttgtgtatgtatacaataaatataaataaaattgtttactgttttgaaa

SEQ ID NO: 216620 - DNA, 2969 bp, Artificial Sequence
  derived and/or modified sequence
ttgcagatcagtgtgtgagggaactgccatcatgaggtctgacaagtcagctttggtatttctgctcctgcagctcttctgtgttggctgtggattctgtgggaaagtcctggtgtggccctgtgacatgagccattggcttaatgtcaaggtcattctagaagagctcatagtgagaggccatgaggtaacagtattgactcactcaaagccttcgttaattgactacaggaagccttctgcattgaaatttgaggtggtccatatgccacaggacagaacagaagaaaatgaaatatttgttgacctagctctgaatgtcttgccaggcttatcaacctggcaatcagttataaaattaaatgatttttttgttgaaataagaggaactttaaaaatgatgtgtgagagctttatctacaatcagacgcttatgaagaagctacaggaaaccaactacgatgtaatgcttatagaccctgtgattccctgtggagacctgatggctgagttgcttgcagtcccttttgtgctcacacttagaatttctgtaggaggcaatatggagcgaagctgtgggaaacttccagctccactttcctatgtacctgtgcctatgacaggactaacagacagaatgacctttctggaaagagtaaaaaattcaatgctttcagttttgttccacttctggattcaggattacgactatcatttttgggaagagttttatagtaaggcattaggaaggcccactacattatgtgagactgtgggaaaagctgagatatggctaatacgaacatattgggattttgaatttcctcaaccataccaacctaactttgagtttgttggaggattgcactgtaaacctgccaaagctttgcctaaggaaatggaaaattttgtccagagttcaggggaagatggtattgtggtgttttctctggggtcactgtttcaaaatgttacagaagaaaaggctaatatcattgcttcagcccttgcccagatcccacagaaggtgttatggaggtacaaaggaaaaaaaccatccacattaggagccaatactcggctgtatgattggataccccagaatgatcttcttggtcatcccaaaaccaaagcttttatcactcatggtggaatgaatgggatctatgaagctatttaccatggggtccctatggtgggagttcccatatttggtgatcagcttgataacatagctcacatgaaggccaaaggagcagctgtagaaataaacttcaaaactatgacaagcgaagatttactgagggctttgagaacagtcattaccgattcctcttataaagagaatgctatgagattatcaagaattcaccatgatcaacctgtaaagcccctagatcgagcagtcttctggatcgagtttgtcatgcgccacaaaggagccaagcacctgcgatcagctgcccatgacctcacctggttccagcactactctatagatgtgattgggttcctgctggcctgtgtggcaactgctatattcttgttcacaaaatgttttttattttcctgtcaaaaatttaataaaactagaaagatagaaaagagggaatagatctttccaaattcaagaaagacctgatggggtaatcctgttaattccagccacatagaatttggtgaaaaccttgctattttcatattatctattctgttattttatcttagctatatagcctagaattccacgatcatgaggttgtgagtatatctcattctttcgttgtattttcctaggtgtctttactctcttctctcactttgtgacacaaggacatgaatacatctaaattttcctatttctgatatgactgttttgatgatgtcattacttctataaccttaagtgatagggtgacatgcaatatgattattcctggtgtgcgcccaaacacatggatataaagaggtaaaaaacttaaaattcacaaaattcagtaaaccacacaaatcaggtaagtgttctatgagattagctggctatgagaaacataatgatgtttctttttcaatttaaataagcccttctacatagccagcatcagtgatctcagaaaataaattgctaataatgatgacatggcattatgcttagaaaagtttgctgtatttccatagacctcatctagatgtcatggcctacatttctgccatcactcaaccaatacttttttctgttttcttgatgataaaaagacctttctcatgattgccatcaaataacaaaagaaactattttttttctcacatagagaacatgtcagtaagatattcaaggtgaacagattatttttgggattagtaactatttgaaatatgtggtgataattactgagtttataaaatttatttgatagtacacttaaagaagatttatatgtttattctttaaaaatgatgaatactcataattcttatctctataatcaaaagtataatttactgtagaaaaataaagagatgcttgttctgaaagtaagatcagtgaactgcttttcagtctcaatctttgagaattgtaaattcatcaaataattgcttacatagtaaaaatttaaggtattagaaaacctgcataacaaatagtattatatattaaatattttgatatgtaaagctctacacaaagctaaatatagtgtaataatgtttacactaataagcaaatatgttaatcttctcatttttttactgtcatataatcttagtgatatgcctattaatagttttaaataaataaattggctcatctggctttttgaaaattttgaaattcttacagatgttgattaggtatatctacaaattaatttcaattttaaaatgatgatataaaaataaatataagtatttttcttgtgtatgtatacaataaatataaataaaattgtttactgttttgaaagttt

SEQ ID NO: 216621 - protein, 672 aa, Artificial Sequence
  derived and/or modified sequence
MADGSLTGGGLEAAAMAPERMGWAVEQELASLEKGLFQDEDSCSDCSYRDKPGSSLQSFMPEGKTFFPEIFQTNQLLFYERFRAYQDYILADCKASEVQEFTAEFLEKVLEPSGWRAVWHTNVFKVLVEITDVDFAALKAVVRLAEPYLCDSQVSTFTMECMKELLDLKEHRLPLQELWVVFDDSGVFDQTALAIEHVRFFYQNIWRSWDEEEEDEYDYFVRCVEPRLRLHYDILEDRVPSGLIVDYHNLLSQCEESYRKFLNLRSSLSNCNSDSEQENISMVEGLKLYSEMEQLKQKLKLIENPLLRYVFGYQKNSNIQAKGVRSSGQKITHVVSSTMMAGLLRSLLTDRLCQEPGEEEREIQFHSDPLSAINACFEGDTVIVCPGHYVVHGTFSIADSIELEGYGLPDDIVIEKRGKGDTFVDCTGADIKISGIKFVQHDAVEGILIVHRGKTTLENCVLQCETTGVTVRTSAEFLMKNSDLYGAKGAGIEIYPGSQCTLSDNGIHHCKEGILIKDFLDEHYDIPKISMVNNIIHNNEGYGVVLVKPTIFSDLQENAEDGTEENKALKIQTSGEPDVAERVDLEELIECATGKMELCARTDPSEQVEGNCEIVNELIAASTQKGQIKKKRLSELGITQADDNLMSQEMFVGIVGNQFKWNGKGSFGTFLF

SEQ ID NO: 216622 - DNA, 2019 bp, Artificial Sequence
  derived and/or modified sequence
atggcagacgggtccctgacaggcggtggtctggaagccgctgcaatggcacccgagagaatgggctgggcagtggagcaggaactcgcttctttagaaaaagggctgtttcaggacgaagacagctgctcagattgttcttatcgagacaaacctggcagcagcctgcagtctttcatgccagagggcaagacattcttcccggaaatctttcagaccaatcagctcctgttttacgagcgctttagagcctatcaggattatatcctggctgactgcaaggccagcgaggttcaagaatttacagccgagttcttagagaaagtcctagaacccagcggatggagagctgtgtggcatacaaacgtgttcaaagtccttgttgagattacagacgtggacttcgctgctctgaaggccgtcgttagactcgcggagccatacctctgcgacagtcaggtaagcacgtttaccatggagtgcatgaaggaattgctggacttaaaagagcatcgattaccgctgcaagagctgtgggtcgtgtttgacgatagtggggtgtttgaccaaacggcactggctatcgaacacgtgcggttcttttatcagaacatatggaggtcctgggacgaggaagaggaggacgaatacgattattttgtgcggtgcgtggaaccacgtctgagacttcattacgacattctggaggacagggtcccttctggtctgatcgttgactaccataaccttcttagtcaatgcgaggaatcctatcgcaagttcctgaacctgagatccagccttagcaattgtaactcagactctgaacaagagaatatctctatggtggagggtctaaaattgtatagtgagatggagcaattgaaacagaagctcaagctcatcgagaaccctctgctccgctacgtgtttggctatcagaagaactctaatatacaggctaagggtgtgcgaagctccggtcagaaaatcacacacgttgtctctagtaccatgatggctggtctgctgcggagccttcttaccgacagactgtgccaggagcccggtgaggaggaaagggaaattcagtttcattctgaccccttgagcgcgattaacgcctgtttcgaaggggataccgtgattgtgtgccccgggcattacgtggtccacggcacattcagtatcgccgacagtatcgaactggaaggttacggcctgcccgatgacatagttatagagaagaggggaaagggagacacgttcgtggattgtaccggagccgatataaagatctccggaattaagtttgtacagcatgacgcggttgagggaattctgatcgttcacagaggcaagacaaccctggagaactgtgtgttgcagtgcgagactacaggcgtaacagtgcgcacatcagccgagtttctgatgaagaactcagatctgtatggcgctaaaggcgcaggtatcgagatatacccaggaagccagtgcacactctctgataacggtatacaccactgcaaagagggcatccttatcaaggacttcctggatgaacactacgacatcccaaaaatatcaatggtaaacaacatcatccataacaacgaaggctacggagtggtattggtcaagccaacaatctttagcgatcttcaggagaatgcagaagatggaacagaggaaaataaagccctcaaaattcagactagtggcgaacccgacgttgctgaacgggtagatttggaagaactgattgaatgcgccacaggcaagatggagctgtgcgcccgtaccgaccccagcgagcaggttgaggggaattgtgaaattgtgaatgaacttattgctgctagcactcagaaaggccaaattaaaaagaagaggctgtcggaactgggaatcactcaggccgacgacaacctgatgtcacaagagatgtttgtgggaatcgttggcaaccaatttaagtggaacggaaaaggatcattcgggacgttcctgttctag

SEQ ID NO: 216623 - DNA, 2019 bp, Artificial Sequence
  derived and/or modified sequence
atggctgatggcagcctgactggaggcggcctggaggccgccgccatggcccctgagaggatgggctgggccgtggagcaggagctggccagcctggagaagggcctcttccaggatgaggacagctgcagcgactgcagctacagagacaagccaggcagcagcctgcagagcttcatgcctgagggcaagaccttcttccctgagatcttccagaccaaccagctgctcttctatgagcgcttccgggcctaccaggactacatcctggccgactgcaaggccagcgaggtgcaggagttcaccgctgagttcctggagaaggtgctggagcccagcggctggagggctgtgtggcacaccaacgtgttcaaggtgctggtggagatcacagatgtggactttgctgccctgaaggctgtggtgcggctggccgagccctacctgtgtgacagccaggtgtccaccttcaccatggagtgcatgaaggagctgctggacctgaaggagcaccggctgcccctgcaggagctgtgggtggtgtttgatgattctggagtgtttgaccagacagccctggccattgaacatgtgcgcttcttctaccagaacatctggaggtcctgggatgaggaggaggaggatgaatatgactactttgtgcgctgtgtggagccccggctgcggctgcactatgacatcctggaggacagagtgcccagcggcctcatcgtggactaccacaacctgctgagccagtgtgaggagagctacaggaagttcctgaacctgcggagcagcctgagcaactgcaacagcgacagcgagcaggagaacatctccatggtggagggcctgaagctgtacagcgagatggagcagctgaagcagaagctgaagctgattgagaaccccctgctgcgctacgtgtttggctaccagaagaacagcaacatccaggccaagggcgtgcgcagcagcggccagaagatcacccacgtggtgagcagcaccatgatggccggcctgctgcggagcctgctgacagaccggctgtgccaggagcccggggaggaggagcgggagatccagttccacagcgaccccctgagcgccatcaatgcctgctttgaaggagacacagtgattgtgtgccccggccactacgtggtgcacggcaccttcagcattgctgacagcattgagctggagggctacggcctgcctgatgacatcgtcatcgagaagagaggaaaaggagacacctttgtggactgcacaggagctgacatcaagatcagcggcatcaagtttgtgcagcatgatgctgtggagggcatcctgattgtgcaccggggcaagaccaccctggagaactgtgtgctgcagtgtgagaccactggagtgacagtgaggaccagcgctgagttcctgatgaagaacagcgacctgtatggagccaagggggccggcatcgagatctacccaggcagccagtgcaccctgagtgacaatggcatccaccactgcaaggagggcatcctgatcaaggacttcctggatgagcactatgacatccccaagatctccatggtgaacaacatcatccacaacaatgaaggctacggcgtggtgctggtgaagcccaccatcttcagtgacctgcaggagaatgcagaagatggaacagaggagaacaaggccctgaagatccagaccagcggggagccagatgtggccgagcgggtggacctggaggagctgattgaatgtgccaccgggaagatggagctgtgtgccaggacagaccccagcgagcaggtggagggcaactgtgagatcgtgaatgagctgattgctgccagcacccagaagggccagatcaagaagaagaggctgtctgagctgggcatcacccaggctgatgacaacctgatgagccaggagatgtttgtgggcatcgtgggcaaccagttcaagtggaatggcaagggcagctttggcaccttcctgttctag

SEQ ID NO: 216624 - DNA, 2019 bp, Artificial Sequence
  derived and/or modified sequence
atggccgacggcagcctgaccggcggcggcctggaggccgccgccatggcgccagaaaggatggggtgggccgtggaacaagagttggcttcactggagaaggggctattccaggatgaagacagttgctcagactgctcgtatagggacaaacctggttcctccctccaaagcttcatgcctgaaggcaagactttcttcccagaaatcttccagaccaaccagctcctgttctacgagcgctttcgggcctaccaagactacatactggcggactgcaaagctagtgaagttcaggagttcacagcagagtttctcgaaaaggtgttagaaccttctggctggcgggccgtgtggcatactaatgttttcaaggtgctagtggaaataacagacgtagactttgcagctttaaaggcggtggtcagactggccgagccatatctctgtgattcccaggtctctacttttacgatggagtgtatgaaagaactacttgatctcaaggaacatcgcctgcctttgcaagagctgtgggtggtattcgatgacagcggcgtgttcgaccagacagcactggccatcgagcacgtcaggtttttctaccagaacatatggagatcatgggacgaggaggaggaagacgagtacgactattttgtaagatgcgtcgagccaaggctgcgcctgcactacgatatcttggaagacagggtcccaagcggcttaatcgtcgactaccacaaccttctgtctcaatgcgaagagtcctacagaaaattcctcaatctgaggtcctctttgagtaattgtaactccgatagtgaacaggagaatatctcaatggtggaaggattgaagctgtatagtgagatggagcagctcaagcagaaactgaagctgatcgagaaccctttgctgcgatacgtgtttggctaccagaaaaatagcaacatccaggcaaaaggagtcaggtcctctggccaaaaaataactcatgtggtcagttcgacaatgatggctgggctgttgaggagcctgttgacggaccgtctgtgtcaggaacctggggaagaggagagggagattcaattccactccgatcctctgtcggccatcaatgcttgctttgagggggacaccgtcatcgtgtgccccggacactatgtcgtacatggtaccttttcaattgccgactcaattgagctggagggctacggtttacctgatgatatcgtgatcgagaaaagagggaagggcgacacctttgtcgactgtactggagccgacataaaaattagtggcataaagtttgtgcaacacgatgccgtggagggtattctcatcgtgcacaggggcaagaccactctcgagaactgcgtgttgcaatgcgagaccaccggggtgacagtacgaacttcagccgaatttctgatgaaaaattcagatctctatggagccaagggagctggcattgagatatatccgggaagtcaatgcacgctgagcgataacggaatccatcactgtaaggaggggattctcatcaaggactttctggatgagcattatgatattcccaaaattagcatggtcaataatatcatccataacaatgagggatacggggtcgtcctcgtgaagccgactatcttttcagaccttcaggagaacgccgaagacgggaccgaagagaacaaggcgttgaagattcagacgtctggcgagcccgatgtggcagaaagggtggacctggaggagctcattgagtgcgctaccgggaagatggaactttgcgcacggacagatcccagtgagcaagtagaggggaattgtgagatcgtaaatgagctgattgctgcgagcacccaaaaaggtcagatcaagaaaaagaggctatccgagttgggcattacacaggccgacgacaacctcatgtctcaggagatgttcgttggcatagtgggcaaccagtttaagtggaatggaaaaggtagctttgggacatttctcttttag

SEQ ID NO: 216625 - DNA, 2019 bp, Artificial Sequence
  derived and/or modified sequence
atggccgacgggtcccttaccggcggtggactcgaggccgcagccatggcgccagagcgtatggggtgggcagtcgagcaggagctggcctccctggaaaaggggctgttccaagacgaggacagctgcagcgattgtagctatagagataagcccggttccagtctgcagtcttttatgcctgagggaaagacctttttcccagaaatttttcagaccaatcagctgctgttctacgagcgatttagggcgtaccaggactatatcctagctgattgtaaagctagtgaagtgcaagagttcactgccgagtttctcgagaaagtgctggagccctcgggatggcgggctgtctggcacacgaatgtcttcaaagtgttggtggagatcaccgatgtggatttcgcagcactaaaggcggtcgttagactcgcagagccctacttgtgtgattctcaagtatctacgttcaccatggagtgtatgaaggagctcctcgacctcaaagaacatagacttcccttgcaggaattgtgggttgtgttcgatgatagtggagttttcgaccagactgcactggccatcgagcacgtgcgattcttctaccagaacatctggaggtcctgggatgaggaggaagaagatgagtacgactattttgtgaggtgtgtggagccacgccttcgccttcactacgacatcctggaagatagagttccttccggcctgatcgtggattaccacaatctgttgagtcagtgtgaggagagttataggaagtttctgaacctgcgatcctccttaagtaattgtaacagtgatagtgagcaggagaatatttctatggtggagggattaaaactgtacagcgaaatggagcagctaaagcagaagctcaagctcattgagaatcccctcctgcggtatgtctttgggtaccaaaaaaacagcaacatccaggcaaaaggcgtcagaagttccgggcagaagattacccatgtggtgtcatccacaatgatggccggtctgctgcgctcattgctcactgaccgactttgccaggagcccggagaagaggaacgagagattcagttccattctgaccccctcagcgcgatcaacgcatgctttgaaggggacaccgtcattgtgtgtccagggcactatgttgtccatggcactttcagtatcgcagatagtatcgagctcgagggctacgggcttcctgacgacatcgtgatcgaaaagagagggaaaggcgacacattcgtggactgtaccggtgctgacattaagatctcagggatcaagtttgttcagcacgatgctgttgagggcatactcatcgtccacagaggcaagaccactctggaaaattgcgtactgcagtgtgagaccaccggggtcactgtccgtacctccgccgagttcttgatgaaaaactccgatctgtatggggctaagggcgctgggattgagatttatcccggaagccaatgtacgctgagcgacaatgggatccatcattgcaaagaagggattctaattaaggatttcctcgatgagcattatgacatcccaaagatcagcatggtgaataacattattcacaataatgagggttatggtgtggtactagttaagccgacgatctttagtgacctgcaggaaaacgctgaggacggcaccgaggaaaataaggccctgaagatccagacaagtggcgaacccgacgttgcagagcgcgttgatctcgaggagctcattgaatgcgcgaccgggaaaatggaattgtgtgccagaactgatccgtcagaacaggtggagggtaattgcgagatcgttaacgagctaatcgcagctagcacccaaaaggggcagattaagaaaaaaagactgtcggagctggggatcacccaagctgacgataatcttatgagtcaggagatgttcgtcggaatcgtgggcaaccagttcaaatggaatgggaagggtagttttggtacatttctgttctag

SEQ ID NO: 216626 - DNA, 3461 bp, Artificial Sequence
  derived and/or modified sequence
tatctcatttccaggcattgctggttcgtttttttcgaaaatcattccaaattatattccaattcgactttcttcaagttcatcccagaaaagcaaaggccgggcacttgaacaagaacagctgtcagcctggggcgagggggcagtgttggtgggggctggagcggggccggactctaattggtccacggcctcggcccgactatcaaatcagcagagcctgcgtcatcacgtcgttgcctgggctgccgtccgcggaaatttgaaatggctgacgggtcgctgacgggcggcggtctggaggcagcggccatggcgccggagcgcatgggctgggcggtggagcaggagctggcgtctctggagaaaggtttgttccaagatgaagattcatgcagtgattgtagctaccgtgataaaccaggttctagtttacaaagttttatgccagaaggaaaaacctttttcccagaaattttccaaacaaatcaacttttgttctatgagcgattcagagcctatcaagattacattttagctgactgcaaggcctctgaggtacaggaattcacagctgagttcttggagaaggtccttgagccatctggatggcgggcagtctggcacactaatgtgttcaaggtgctggttgagatcacagatgtggactttgcagccttgaaggcagtggtgaggcttgctgaaccatacctctgtgactctcaagtgagcacttttaccatggagtgcatgaaggagctccttgatctgaaggagcatcggttgcccctgcaggagctgtgggtggtgtttgatgattcaggagtgtttgaccagacagcccttgcaattgagcatgtcagatttttctaccaaaacatttggaggagttgggatgaagaagaggaggatgaatacgattattttgtcagatgtgttgaacctcgattaagattgcattatgacattcttgaagaccgagttccatcaggacttattgttgactaccacaatctgttgtctcaatgtgaggagagttacaggaaatttttaaatctgagaagcagtttgtcaaattgtaactctgattccgagcaggaaaatatctccatggtggaagggttaaaattgtattcggagatggaacagttgaaacaaaagctgaaactcattgagaatcctttgttgaggtatgtgtttggttatcagaagaattctaacatccaagcaaagggtgtccgttccagcggtcagaagatcactcatgtggtctcctccaccatgatggctggtctcctgcggtccctgcttacggacaggctttgccaggagcctggtgaggaagaaagagaaattcagttccatagtgatccattgtctgctataaatgcctgcttcgaaggtgacactgttattgtttgtcctggccattatgtggtacatggcactttctccattgctgactccattgagttggaaggatatggcctaccagatgacattgtgatagaaaagaggggcaaaggcgacacttttgtggactgcactggtgctgatattaaaatctcaggcataaaatttgttcagcatgatgctgtagagggaatcttaattgttcaccgtggtaagactacgctggaaaactgtgtgctgcagtgtgagacgaccggagtcacagtgcggacatcagcagagtttctaatgaagaactcggatttatatggcgccaagggtgctggtatagaaatctaccctgggagtcagtgcaccctgagtgacaatgggatccatcactgcaaggaagggatcctcattaaggacttcttagatgaacattatgacattcccaagatatccatggtgaataatataatacataataatgaaggttatggtgttgtcttggtgaaacctacaatcttctctgacctgcaagaaaatgctgaagatggaactgaagaaaataaagcgcttaaaattcagacaagtggagagccagatgtggctgaaagagtggatctagaagagctgattgagtgtgcaactggtaaaatggagctttgtgcaagaactgacccttctgagcaagtcgagggaaattgtgaaattgtaaatgaactaattgctgcctccacacagaaaggccagataaagaagaaaaggttgagtgaactggggatcacgcaagctgatgacaacttaatgtcacaggagatgtttgttgggattgtggggaaccagttcaagtggaatgggaaaggtagttttggcacatttcttttctgactacagtgatgtaagtagatagcaaaatactggattttgcacatgctgccctaagaatcactgctgccattgtagtttgctgtattgtctgtattttatatttgattatttgggcttgagtgaaaggtagatttatttccatttgcaggtgttgcacataaaacactccctctttataagaaaaatcataaatgcatataaaatagaaaatatttggagattgcttatctgaaagtcttgctttcttatacacatggttctctcatattaagcctggtagtaactttttagtgtaattacctttagcacttcaaagacgaggaagtaaggaagggaatgcaagactagtgcataaaaatgcaataggtgtcatatgtacagcattcttcttagagttgccttttcatcccaattacagtgagtctgatttccatcctgtatttgcataatacttgtcttaaaataaaagcttttatgattgggaatttatctgcctaatcagacttattattgagacgtcaatgggacgcatttttctgttgagctatgcagtcgtcaaaacagcgatagacagcataggaggtttgaagcagaaatgaaatgtgttattcagagccaatgttgtacatagagcattttcactattgctgaatgggaatgattaaaaacaaggtatttttcgggccaggcggtggctcacgcttgtaatcgcagcactttgggaggctgaggcaggaggatcacttgagcccaggagttcaagactagcctaggcaacatagtgagaccctgtctctactaaaaataaatttaaaaaaaattagctgagtgtggtggtgcatgcatgtagttccagctactcaggaggctgaggctagaggatccttgagcccaggaggttgaggctgcagtgaggtgtgattgcgccactgcattccagcttgggcgacagagcgagacccagtctcaaaaaaaaaaaaaagtatttttctcttaccgttacagtattctgattatattactgacacagtcaaaatgattaactgtacaacctgtatctgctgggtgttcttgttatcatattgtaaaacagctttaaaaatatttatattttaaaaactgtatgtgacattaatatgcctaatgattaaaattatagtgatgaaataacaaaa

SEQ ID NO: 216627 - DNA, 2019 bp, Artificial Sequence
  derived and/or modified sequence
atggccgacggcagcctgaccggcggcggcctggaggccgccgccatggcccccgagagaatgggctgggccgtggagcaggagctggccagcctggagaagggcctgttccaggacgaggacagctgcagcgactgcagctacagagacaagcccggcagcagcctgcagagcttcatgcccgagggcaagaccttcttccccgagatcttccagaccaaccagctgctgttctacgagagattcagagcctaccaggactacatcctggccgactgcaaggccagcgaggtgcaggagttcaccgccgagttcctggagaaggtgctggagcccagcggctggagagccgtgtggcacaccaacgtgttcaaggtgctggtggagatcaccgacgtggacttcgccgccctgaaggccgtggtgagactggccgagccctacctgtgcgacagccaggtgagcaccttcaccatggagtgcatgaaggagctgctggacctgaaggagcacagactgcccctgcaggagctgtgggtggtgttcgacgacagcggcgtgttcgaccagaccgccctggccatcgagcacgtgagattcttctaccagaacatctggagaagctgggacgaggaggaggaggacgagtacgactacttcgtgagatgcgtggagcccagactgagactgcactacgacatcctggaggacagagtgcccagcggcctgatcgtggactaccacaacctgctgagccagtgcgaggagagctacagaaagttcctgaacctgagaagcagcctgagcaactgcaacagcgacagcgagcaggagaacatcagcatggtggagggcctgaagctgtacagcgagatggagcagctgaagcagaagctgaagctgatcgagaaccccctgctgagatacgtgttcggctaccagaagaacagcaacatccaggccaagggcgtgagaagcagcggccagaagatcacccacgtggtgagcagcaccatgatggccggcctgctgagaagcctgctgaccgacagactgtgccaggagcccggcgaggaggagagagagatccagttccacagcgaccccctgagcgccatcaacgcctgcttcgagggcgacaccgtgatcgtgtgccccggccactacgtggtgcacggcaccttcagcatcgccgacagcatcgagctggagggctacggcctgcccgacgacatcgtgatcgagaagagaggcaagggcgacaccttcgtggactgcaccggcgccgacatcaagatcagcggcatcaagttcgtgcagcacgacgccgtggagggcatcctgatcgtgcacagaggcaagaccaccctggagaactgcgtgctgcagtgcgagaccaccggcgtgaccgtgagaaccagcgccgagttcctgatgaagaacagcgacctgtacggcgccaagggcgccggcatcgagatctaccccggcagccagtgcaccctgagcgacaacggcatccaccactgcaaggagggcatcctgatcaaggacttcctggacgagcactacgacatccccaagatcagcatggtgaacaacatcatccacaacaacgagggctacggcgtggtgctggtgaagcccaccatcttcagcgacctgcaggagaacgccgaggacggcaccgaggagaacaaggccctgaagatccagaccagcggcgagcccgacgtggccgagagagtggacctggaggagctgatcgagtgcgccaccggcaagatggagctgtgcgccagaaccgaccccagcgagcaggtggagggcaactgcgagatcgtgaacgagctgatcgccgccagcacccagaagggccagatcaagaagaagagactgagcgagctgggcatcacccaggccgacgacaacctgatgagccaggagatgttcgtgggcatcgtgggcaaccagttcaagtggaacggcaagggcagcttcggcaccttcctgttctag

SEQ ID NO: 216628 - protein, 775 aa, Artificial Sequence
  derived and/or modified sequence
MKRSGTLRLLSDLSAFGGAARLRELVAGDSAVRVRGSPDGRHLLLLRPPGAVAPQLLVASRGPGAELERAWPAGQPSPLDAFFLPWPARPALVLVWESGLAEVWGAGVGPGWRPLQSTELCPGGGARVVAVAALRGRLVWCEERQARAEGPSGSPAAAFSHCVCVRTLEPSGEASTSLGRTHVLLHHCPAFGLLASCRQLFLVPTATTWPGVAHVLLIWSPGKGKVMVAAPRLGLSYSKSLNPGRGDTWDFRTLLRGLPGLLSPREPLAVHTWAPTPQGLLLLDFGGTVSLLQSHGGTRAVGTLQEAPVGPWGSAALGTFQGTLACVLGSTLELLDMGSGQLLERKVLSTDRVHLLEPPAPGMEDEEELETRGNLRLLSALGLFCVGWEAPQGVELPSAKDLVFEEACGYYQRRSLRGAQLTPEELRHSSTFRAPQALASILQGHLPPSALLTMLRTELRDYRGLEQLKAQLVAGDDEEAGWTELAEQEVARLLRTELIGDQLAQLNTVFQALPTAAWGATLRALQLQLDGNGKLRSQAPPDVWKKVLGGITAGKEPPNGILPPFELLCQCLCQLEPRWLPPFVELAQQQGGPGWGAGGPGLPLYRRALAVLGEEGTRPEALELELLLSSGRPKAVLQAVGQLVQKEQWDRALDAGLALGPSSPLLRSEIFKLLLAEFAQHRRLDAHLPLLCRLCPPELAPAELLLLLRTYLPDEVGPPTPFPEPGAEPPLTVGLLKALLEQTGAQGWLSGPVLSPYEDILWDPSTPPPTPPRDL

SEQ ID NO: 216629 - DNA, 543 bp, Artificial Sequence
  derived and/or modified sequence
atgcagaggggcccactgtctccctcacccagcgacggccttggcgcgcttggcactacgtacccaggagtgcatcgcggtcagtcaatggctggcctgagggtgccggcattcaatgcaggactgagggctattacgccctctcgggccgagacccagcatcctgagaccacttcctctggaatgcaccgagaacccctgagttctacaccaatagcacactgggaaggcgcacaaagccctggagcacagagtgtacttgccatgctggttcatcgtactgcagcctatactttgcaagttcttgagcccaaaaaagatcccggacgtgagctgcctgcaaccccaagatcttgggcccctgcgcgacagccctcccccctacattcaatccggcaaactatgccagccaaaccttctctggttaaaagagagcgccgaaaccaggcccttgcacgtgaagcgccttggttcccacagcggacccagtggaaaacctccgaaggaccaggctcttcctccggacgccgcgggcgccggtag

SEQ ID NO: 216630 - DNA, 543 bp, Artificial Sequence
  derived and/or modified sequence
atgcagcggggccccctgagccccagccccagcgacggcctgggcgctctcggaacaacttatccaggagtacaccggggccagtctatggcgggcctgagggtgccagcatttaatgccggattgcgggccataaccccaagtcgcgccgagacgcagcatccagagactacctctagcggaatgcatcgcgaacccttgtcttcaacccccatagctcattgggagggggcacagtctcctggtgcccagtcggtcttggctatgctcgttcatcggaccgcagcctacaccttgcaggtcctggagccaaagaaagacccgggccgcgaattgcccgcgacacccagatcctgggcgccggccagacagccttcccctttacacagcattaggcagaccatgcccgccaaacccagcctggtgaagcgggagagaagaaatcaggctctggctagggaagccccgtggtttccccagagaacccagtggaagacctccgaaggacctggcagctcttctggcaggcgaggccggagatag

SEQ ID NO: 216631 - DNA, 543 bp, Artificial Sequence
  derived and/or modified sequence
atgcagcggggacctttatctccctcgccgtctgatgggctcggggctttggggactacatatcccggagttcatagaggacagtcaatggctgggctcagagtgcctgcctttaacgcgggtttgcgcgctataactccttccagagccgagacccagcatccggaaacaacatcctccgggatgcatagagaaccacttagctcaaccccgattgctcactgggagggggcacagagtcctggcgctcagagcgtgttagcaatgttggtgcataggacagctgcttataccttgcaggttttggaaccgaaaaaggatccgggtcgagaactgcctgccacgcccaggtcctgggctccagctcgacagccatcgcctctgcattctatccgccagaccatgccagccaagccctccctggtgaagcgcgagcggcgtaaccaggcattggcaagagaggcaccctggtttccacagagaacacaatggaaaacttctgagggaccaggatccagttctggtcgtagaggccgaagatag

SEQ ID NO: 216632 - DNA, 2328 bp, Artificial Sequence
  derived and/or modified sequence
atgaagcgttctggcaccttacgacttctgagtgacctgagcgctttcgggggagctgccaggttgagggaattggtcgcaggagattctgccgtccgggtgaggggttcccccgatggccgccacctgcttctattgcgccctccaggcgctgttgccccacagctccttgtggcaagtcggggaccgggcgccgaattagaacgcgcgtggcctgcgggccagccttctcccctggacgccttcttcctgccgtggcccgcacgcccggcgctcgtcttggtctgggagagtgggttagccgaggtgtggggcgccggcgttggacccggatggcgcccactgcagtcaaccgaactgtgcccgggaggcggtgctcgcgtcgtggcagtggcagctctgcgcggaagactcgtgtggtgcgaggaacgtcaggcacgggcagagggccccagcggcagtcccgccgccgctttttcccattgcgtttgcgtgcggaccctagaacctagtggagaagcctccacatccctgggaaggactcacgtgttgttgcaccattgcccggcctttggccttctcgctagctgcaggcagctcttcctggttcccactgccacaacttggccaggcgtggcccacgtgttgctcatttggagccccggcaaagggaaggtgatggtagcagcaccacgtctgggtctgagctacagcaagagcctgaatccaggacggggcgatacttgggattttagaaccctactgagagggcttcctggtctattgagccctcgagaaccgctggctgtgcatacatgggctccaaccccacaaggcttgttactgctggactttggtggaactgtgagcctgctccaaagccatggaggcacaagggcagtgggcaccctgcaagaggcaccagtgggaccctgggggtccgccgccctcgggacctttcaaggcacactggcctgtgtattgggcagcaccctcgagcttctcgatatggggtcaggacagctgctcgaaaggaaggtcctgtctaccgacagagtccacttattagagcctcctgcgcccggcatggaggatgaagaagagctagagactcgaggaaacttgcggctgttgtctgcacttggcctcttctgcgtgggctgggaggcgccgcaaggagtggagctgccttctgccaaggatctggtgtttgaggaggcttgcggttactaccagagaaggtctctgagaggagcgcaactgacccctgaggagttacggcactcctccaccttccgggcaccccaggcactggccagtattttgcagggccatctgcctcccagtgcccttcttaccatgctccgtacagagcttagggattaccgcgggctcgagcagctcaaagcgcagcttgtggcgggggatgatgaagaagctggctggaccgagttggctgagcaggaggtggctagactgttgaggacggagctgattggagaccagctggctcagctgaatactgtgttccaggcccttccgacggctgcctggggcgctaccttacgcgctcttcaattgcagctggacggtaatgggaagttgcgcagccaggcgcctcctgacgtttggaagaaggtgctggggggcattacagccggcaaagagcctccaaatgggatcttaccccccttcgagttattgtgtcagtgcctctgccaacttgaaccccgttggctgcccccctttgttgagcttgcccaacaacaaggaggtcctggctggggcgccggtggccctggcctacccctttacagaagggccttggctgtgctcggtgaggaaggaacccgacctgaagccctcgagctcgaattgttgctctcctcagggagaccgaaggccgtactgcaggctgttggacaactggtgcagaaagaacaatgggaccgggctcttgacgccggactggctctcggtccgtccagcccattactgcgttccgagatctttaagctgttgctagccgaattcgcacagcatcgccgacttgacgcacatcttccgcttttgtgcaggctgtgtcctccagagctggctcctgcagagctactgctgttgttgcggacataccttcccgatgaagtggggccacctacccccttcccagaacccggggctgaaccccctttgacggtaggattactgaaggccctgctcgaacagaccggcgcccaaggctggctatccggtccagttctcagtccatatgaagacatcctatgggaccccagtacacctcctcccactccccctagagatctgtag

SEQ ID NO: 216633 - DNA, 2646 bp, Artificial Sequence
  derived and/or modified sequence
gctccgctcccccgagaatcgggcctcgccctgctgggcggctggacctgggcaaagcctgggcgcgctcccgcgcagcggcgccatgaagcgctcggggactctgcggctgctctcggacctgagcgccttcggcggcgcggcgcggctccgggagctggtggccggggactcagcggtccgagtccgtggcagtccggacggccgccacttgctgctcctgcgaccccctggggcggtagccccacagctgctagtcgcgtcgcgagggcccggcgcggagctagagcgggcctggccggccggccagccctccccgctggacgccttcttcctgccgtggccagcgcggccggcgctggtgctggtgtgggagagtggcctggccgaggtgtggggcgcgggcgtggggcctggctggcggccgctgcagagcaccgagctgtgtccgggcgggggagcccgcgttgtggcagtggcggcgctccgaggccgcctggtgtggtgcgaggagcggcaggcccgggccgagggcccgtcagggtcgccagcagccgctttcagccactgtgtgtgcgtccggactctggagcccagcggggaagctagcaccagcctgggccgcacacacgtcctgctgcaccactgccctgccttcgggctgctggcctcctgcagacaactcttcctggtgcccactgccaccacctggcctggcgtggcccacgttctactcatctggagcccaggcaagggcaaagtgatggtggctgccccacggcttggtctctcctacagtaagagtctgaatcctggacgaggggacacatgggacttccggaccctgctccgaggccttcctgggttgctgtcccccagggagccactggctgtacacacctgggccccaactccccagggcctgctgttgcttgacttcgggggcactgtgagcctattgcagtcccacggtggtacgcgggctgtgggcaccctgcaggaggcacctgtaggcccgtgggggtctgcagccctaggcacatttcagggcactctggcctgtgtgctgggctccacattggaactgctggacatgggcagtgggcagctgctggagaggaaggtcctaagtacagacagggtacatctgctagaaccgccagcccccggcatggaggatgaggaagagctggagacccgagggaatcttcgtctgctttcagccttgggtctgttttgtgtgggctgggaagccccacagggtgttgagttgccttcagccaaggatctggtgtttgaggaggcctgcgggtactaccagcggcggagcctgcggggtgcccagctcactccagaagaactgagacacagcagcacattccgggcacctcaggctctggcctccatcctccagggccacctgcccccatctgcactgctgaccatgttgaggaccgagcttcgggattaccgaggcttagaacagctgaaggcccagctggtggctggggatgatgaggaggctggttggactgagctggcggagcaggaagtggcacgcctgctgaggactgagttgataggagaccagctagcccagctcaacaccgttttccaagcccttcctacagcagcctggggtgccaccctcagggccctgcagctccagctagatgggaatggcaagctgaggtcccaagcaccccctgatgtgtggaagaaagtgttagggggaataaccgctggaaaggaaccccccaatggaatactgcccccctttgaactcctgtgccagtgtctgtgccagctggagcctcgatggctgccaccctttgtggagctggcacagcagcagggcgggccgggctggggggcagggggcccaggactgcccctgtatcgccgagctctggcagtgctaggtgaggaggggaccaggcctgaggctctggagctagagctgctcttgagcagtgggcggcctaaagctgtgctccaagctgtcgggcagctggtgcaaaaggaacaatgggatcgggctctggatgctggcctggccctcggcccctccagtcccctgcttcgaagtgaaatcttcaaactgctgctggccgagtttgcccagcaccgccggcttgatgctcacctccccctcctttgccgcctgtgcccaccagaactggctccagctgagctcctgcttctactgaggacatacctcccagatgaggtggggcccccaaccccattccctgagcctggagcagagccccctctcactgtgggcttgctcaaagccctgctggagcagactggggctcaaggatggctgtcgggcccagttctaagcccatatgaggacatcctatgggaccccagcactccacccccgactccacctcgggacctatgactacccttcaggcatcagaacactcagggcctggaggcttgcttgggactggaggcttgcttggacagttcctctgtgtcactgacacaggaaatcatttctaggacacagtgatcagggaagggtgcctgggacttggagggtcccatgtatggacctgtgtatgcaatactgttctgtcatctggagctatttttaagatgtgtgtgttaaatatatacatagtttaatat

SEQ ID NO: 216634 - DNA, 2328 bp, Artificial Sequence
  derived and/or modified sequence
atgaagaggagcggcaccctgcggctgctgagtgacctgagcgccttcggcggggccgcccggctgcgggagctggtggccggggacagcgctgtgcgggtgcggggcagcccagatggccgccacctgctgctgctgcggcccccaggagctgtggccccccagctgctggtggccagccggggccctggagctgagctggagcgggcctggccagctggccagcccagccccctggatgccttcttcctgccctggccagcccggcctgccctggtgctggtgtgggagagcggcctggccgaggtgtggggcgctggggtgggccctggctggaggcccctgcagagcacagagctgtgccctgggggcggggcccgggtggtggccgtggccgccctgcggggccgcctggtgtggtgtgaggagcggcaggcccgggcagagggccccagcggcagccctgctgctgccttcagccactgtgtgtgtgtgaggaccctggagcccagcggggaggccagcaccagcctgggccgcacccacgtgctgctgcaccactgcccagccttcggcctgctggccagctgccggcagctgttcctggtgcccacagccaccacctggccaggagtggcccacgtgctgctgatctggagccctgggaagggcaaggtgatggtggccgccccccggctgggcctgagctacagcaagagcctgaaccctggccgcggggacacctgggacttccgcaccctgctgcggggcctgcccggcctgctgagcccccgggagcccctggccgtgcacacctgggcccccaccccccagggcctgctgctgctggactttggaggcaccgtgtccctgctgcagagccatggaggcaccagggctgtgggcaccctgcaggaggcccctgtgggcccctggggcagcgctgccctgggcaccttccagggcaccctggcctgtgtgctgggcagcaccctggagctgctggacatgggcagcggccagctgctggagaggaaggtgctgagcacagacagagtgcacctgctggagcccccagcccctggcatggaggatgaggaggagctggagacccggggcaacctgcggctgctgagcgccctgggcctcttctgtgtgggctgggaggccccccagggcgtggagctgcccagcgccaaggacctggtgtttgaggaggcctgtggctactaccagaggaggagcctgcggggggcccagctgaccccagaggagctgcggcacagcagcaccttccgggccccccaggccctggccagcatcctgcagggccacctgcccccatctgccctgctgaccatgctgaggacagagctgcgggactaccggggcctggagcagctgaaggcccagctggtggccggagatgatgaggaggccggctggacagagctggccgagcaggaggtggcccggctgctgaggacagagctgattggagaccagctggcccagctgaacacagtgttccaggccctgcccacagctgcctggggcgccaccctgcgggccctgcagctgcagctggatggaaatggcaagctgcggagccaggcccccccagatgtgtggaagaaggtgctgggcggcatcacagctgggaaggagcccccaaatggcatcctgcccccatttgagctgctgtgccagtgcctgtgccagctggagccccgctggctgcccccatttgtggagctggcccagcagcagggcggccctggctggggcgccggcggccctggcctgcccctgtaccgccgggccctggccgtgctgggggaggagggcaccaggcctgaggccctggagctggagctgctgctgagcagcggccggcccaaggctgtgctgcaggccgtgggccagctggtgcagaaggagcagtgggaccgggccctggatgctggcctggccctgggccccagcagccccctgctgcggtctgagatcttcaagctgctgctggccgagtttgcccagcaccggcggctggatgcccacctgcccctgctgtgccgcctgtgccccccagagctggccccagctgagctgctgctgctgctgcggacctacctgcctgatgaggtgggcccccccacccccttccctgagcctggagctgagccccccctgactgtgggcctgctgaaggccctgctggagcagacaggagcccagggctggctgagcggccctgtgctgagcccctatgaggacatcctgtgggaccccagcaccccaccacccaccccaccccgggacctgtag

SEQ ID NO: 216635 - DNA, 2328 bp, Artificial Sequence
  derived and/or modified sequence
atgaagcggagcggcaccctgcggctgctgagcgacctgagcgcctttggcggagcagcccgactgcgagaactggtcgctggtgatagtgccgtgcgagttagaggctcaccggatggccggcaccttctcctgttaagacccccaggcgccgttgccccacagctactggttgcctcgagagggccaggggctgagctggagagagcatggcccgctggccagccttcccccctcgacgcgttctttcttccttggcctgccagacccgcactggtgctggtctgggagagcggactagccgaggtgtggggggcgggtgttggtcctggatggcgccctttacagagtacagaattatgtccaggcggcggagcccgggtggtggccgtggcagctctgcgagggcgcctggtttggtgcgaggaaagacaagcccgggccgagggtcccagtgggtccccagctgctgcattctcgcactgcgtgtgcgtccgtacgttagaaccgagcggcgaggcatccacatcgctgggtcgaacacatgtgctgctgcaccactgcccggctttcggtcttctggcctcatgcaggcagctgttcttagtgccgaccgccacaacgtggccgggggtcgcacatgttctgttgatctggtccccaggcaagggcaaggttatggtcgccgctcctaggcttgggctctcttactcaaagtccctgaatcccggaagaggcgacacgtgggattttcggactttgctgagaggactccccggactgttgtccccacgagagccactggccgtgcacacctgggctcccacacctcagggactgttactgctcgacttcggaggtacggtgtcattattgcagagtcacgggggaacacgagccgtcgggactcttcaggaggccccagtagggccatggggctcagctgcgctcggtacctttcaggggacgctagcgtgtgtcctgggtagtactctcgagctcttggatatgggatcaggccagctccttgagaggaaagtgttaagcactgatcgggtacatttactggagccgccagccccaggaatggaagacgaggaggagctggagacaagagggaaccttcggttactgagtgctctggggctattctgcgtcggatgggaggccccccaaggtgtagaactgccctccgccaaagatctcgtctttgaagaagcttgtggatactatcagcggcggtccctccgaggtgcccagcttactcctgaagaactccgccacagctctaccttcagagcaccccaggcattggcatcaatattacaagggcatcttcctcccagcgcacttctgaccatgctgcggacagaactgcgcgactacagaggcctagagcaactgaaagcgcagcttgtggctggggatgatgaagaggctggctggacagagctggccgaacaagaggtggcacggctgttgcggaccgagctcatcggggatcagctcgcccagctgaatactgtgtttcaggccttgccgaccgccgcttggggggcgacattacgggcactgcagctgcaattagacggtaacggaaaactgaggtcccaggctccacctgatgtctggaaaaaggttctaggtggtatcactgctggtaaggagccgcctaatggcatcctgccccctttcgagctgctgtgccagtgtctgtgccagctggagcccagatggcttccccctttcgtggagctggctcagcaacaggggggacccggttggggcgcaggtgggcccggccttcccctctatcggagggctctggccgtgctgggtgaggaaggcacaaggccagaagccctggaactcgagctcctgctgtccagtggccgcccaaaggcggtcctgcaggccgtgggtcagctcgttcaaaaggagcagtgggacagggcgctggatgcgggattagctctggggccatcatcacctttactccggtcagagatctttaagcttctacttgccgaattcgcacagcacaggcggctggatgcacatctgcccctactttgcaggctgtgcccccctgaactcgcacctgcggaacttctcctcctactacgaacttacttgcctgacgaggtcggtccgcctacaccgtttccagaacccggggccgaaccccccctgactgtgggccttctgaaggccttgcttgaacagactggagcccaggggtggctgagcggaccagttctgagcccctatgaggacatcttgtgggatcccagtactccaccgcccacacccccaagggatctttag

SEQ ID NO: 216636 - DNA, 2328 bp, Artificial Sequence
  derived and/or modified sequence
atgaaaaggagtggcaccttgagattactgtcggatctgtccgcctttggtggggcagcacgacttcgcgaacttgtggcgggtgattctgccgtccgagtgcggggatcacctgatggtcgacacctcctgctgcttcgccctcccggagctgtggcaccgcagcttctggtggctagtcggggacctggcgctgagttggaacgcgcttggccggcaggccagccgtccccgcttgatgctttttttctcccatggccagcccgtcccgcattggtcctcgtgtgggagtcaggcctagctgaggtgtggggagctggcgtgggcccaggctggcgcccattgcaatcaaccgagctctgtcctggcggtggcgcacgtgttgtcgctgtggccgctctgcgcggacgccttgtctggtgcgaagagagacaagccagagctgaaggccctagcggatcacccgcagcagcattctctcattgtgtgtgcgtacgaacactggaaccctctggcgaagcttccacgagccttgggagaacccacgttcttctgcaccattgtccagctttcggtctcctcgccagctgcagacagctgttcttggttcccactgccactacttggcccggagtagcccatgtccttctgatatggagtccgggtaagggtaaagttatggtggcagctcccagacttggactctcctactcgaagtctctgaaccccggacgaggtgatacctgggattttaggacccttttacgaggacttcctgggctgctgtcccccagagaacctctggccgtgcatacatgggctccgacaccacagggactcctgcttctggacttcggcggaacagtgagtttgctgcaatctcacggtggcaccagggctgttggcactctgcaggaagctcctgtcggcccatggggcagcgccgctctcggtacttttcaaggcacacttgcttgtgtgctaggctccacactggagcttctggatatgggtagtggacagttgttagagcggaaagtgctgtcgaccgacagagtccacctgttggagccaccagcccctggcatggaggatgaggaggagctggagacgcgcggaaacctgcgccttctatctgctctgggcctgttctgtgtggggtgggaagcccctcaaggcgtcgaattgccatccgccaaggacctcgtgtttgaggaagcttgtgggtattatcagaggaggtcattacgaggcgcacagttgaccccagaggaactgcgccactctagtacgtttagagctccccaagctttggcctctatcctgcagggccacctgcccccaagtgccctgttgacaatgctccggaccgaactgcgcgattaccgcggtttggagcagctcaaagctcagctagtagctggcgatgacgaggaagcgggatggacggagctcgcagaacaggaggtcgcacgattgctgcggacggaattgattggcgatcagttggctcaactcaacaccgtgttccaggctctccctaccgccgcatggggcgcaacgctaagagccctccagctccagctcgacggcaatggaaagttaaggagtcaagcaccaccagacgtctggaagaaagtgttgggcggaatcacggccggtaaggagccacctaacggaatcctgcctcccttcgaactattgtgccagtgtctatgtcagctggagccacgctggctaccaccgtttgtagaactggcccaacaacaggggggacccggatggggagcaggaggcccaggattaccattgtataggagagccctagccgtcctcggtgaggaaggcacacggcctgaagccctggagctggaactccttctctcctcaggcagacccaaggcggtccttcaagccgtcggacaactggttcagaaggaacaatgggatcgcgctctagatgccggactggccctaggaccctcctctccactgttacggtctgagattttcaaattgttactcgctgaatttgcacagcaccgaagacttgacgcacatttgcctctcctctgtaggttgtgcccacctgagctggcccctgccgagttgctgctactcctccggacttaccttccggacgaggtgggcccaccaacgccattcccggaacccggagcagagccaccactgacagtgggcctccttaaggcgttgctggagcaaacaggggcacagggctggttaagcggaccagttctctccccgtacgaggatattctgtgggatccgtctaccccccctccaacccccccacgggatctttag

SEQ ID NO: 216637 - DNA, 2328 bp, Artificial Sequence
  derived and/or modified sequence
atgaagagaagcggcaccctgagactgctgagcgacctgagcgccttcggcggcgccgccagactgagagagctggtggccggcgacagcgccgtgagagtgagaggcagccccgacggcagacacctgctgctgctgagaccccccggcgccgtggccccccagctgctggtggccagcagaggccccggcgccgagctggagagagcctggcccgccggccagcccagccccctggacgccttcttcctgccctggcccgccagacccgccctggtgctggtgtgggagagcggcctggccgaggtgtggggcgccggcgtgggccccggctggagacccctgcagagcaccgagctgtgccccggcggcggcgccagagtggtggccgtggccgccctgagaggcagactggtgtggtgcgaggagagacaggccagagccgagggccccagcggcagccccgccgccgccttcagccactgcgtgtgcgtgagaaccctggagcccagcggcgaggccagcaccagcctgggcagaacccacgtgctgctgcaccactgccccgccttcggcctgctggccagctgcagacagctgttcctggtgcccaccgccaccacctggcccggcgtggcccacgtgctgctgatctggagccccggcaagggcaaggtgatggtggccgcccccagactgggcctgagctacagcaagagcctgaaccccggcagaggcgacacctgggacttcagaaccctgctgagaggcctgcccggcctgctgagccccagagagcccctggccgtgcacacctgggcccccaccccccagggcctgctgctgctggacttcggcggcaccgtgagcctgctgcagagccacggcggcaccagagccgtgggcaccctgcaggaggcccccgtgggcccctggggcagcgccgccctgggcaccttccagggcaccctggcctgcgtgctgggcagcaccctggagctgctggacatgggcagcggccagctgctggagagaaaggtgctgagcaccgacagagtgcacctgctggagccccccgcccccggcatggaggacgaggaggagctggagaccagaggcaacctgagactgctgagcgccctgggcctgttctgcgtgggctgggaggccccccagggcgtggagctgcccagcgccaaggacctggtgttcgaggaggcctgcggctactaccagagaagaagcctgagaggcgcccagctgacccccgaggagctgagacacagcagcaccttcagagccccccaggccctggccagcatcctgcagggccacctgccccccagcgccctgctgaccatgctgagaaccgagctgagagactacagaggcctggagcagctgaaggcccagctggtggccggcgacgacgaggaggccggctggaccgagctggccgagcaggaggtggccagactgctgagaaccgagctgatcggcgaccagctggcccagctgaacaccgtgttccaggccctgcccaccgccgcctggggcgccaccctgagagccctgcagctgcagctggacggcaacggcaagctgagaagccaggccccccccgacgtgtggaagaaggtgctgggcggcatcaccgccggcaaggagccccccaacggcatcctgccccccttcgagctgctgtgccagtgcctgtgccagctggagcccagatggctgccccccttcgtggagctggcccagcagcagggcggccccggctggggcgccggcggccccggcctgcccctgtacagaagagccctggccgtgctgggcgaggagggcaccagacccgaggccctggagctggagctgctgctgagcagcggcagacccaaggccgtgctgcaggccgtgggccagctggtgcagaaggagcagtgggacagagccctggacgccggcctggccctgggccccagcagccccctgctgagaagcgagatcttcaagctgctgctggccgagttcgcccagcacagaagactggacgcccacctgcccctgctgtgcagactgtgcccccccgagctggcccccgccgagctgctgctgctgctgagaacctacctgcccgacgaggtgggcccccccacccccttccccgagcccggcgccgagccccccctgaccgtgggcctgctgaaggccctgctggagcagaccggcgcccagggctggctgagcggccccgtgctgagcccctacgaggacatcctgtgggaccccagcacccccccccccaccccccccagagacctgtag

SEQ ID NO: 216638 - DNA, 297 bp, Artificial Sequence
  derived and/or modified sequence
atgggcctgatctacaagtgcctgcccgagaaggtgaccgtgaacatcgagaccagatgcctgcccggcgtgttccagggcagccagcaccagtgggaccagtgggtgagccccagatggctgcacctgctgccccccctgagcgccctggccggctgccccaccagcgccagagccgccaccctgtggggcagccccggccccccccagatgggcccccactgcagaaccctgagcaagggcggcgcccagagcctgcccagacaggccagacccagagcctgcggcagctggtag

SEQ ID NO: 216639 - protein, 311 aa, Artificial Sequence
  derived and/or modified sequence
MTGSAADTHRCPHPKGAKGTRSRSSHARPVSLATSGGSEEEDKDGGVLFHVNKSGFPIDSHTWERMWMHVAKVHPKGGEMVGAIRNAAFLAKPSIPQVPNYRLSMTIPDWLQAIQNYMKTLHYLTNGQPSIERFPISFKTYFSGNYFHHVVLGIYCNGRYGSLGMSRRAELMDKPLTFRTLSDLIFDFEDSYKKYLHTVKKVKIGLYVPHEPHSFQPIEWKQLVLNVSKMLRADIRKELEKYARDMRMKILKPASAHSPTQVRSRGKSLSPRRRQASPPRRLGRREKSPALPEKKVADLSTLNEVGYQIRI

SEQ ID NO: 216640 - DNA, 936 bp, Artificial Sequence
  derived and/or modified sequence
atgaccggcagcgccgccgacacccacagatgcccccaccccaagggcgccaagggcaccagaagcagaagcagccacgccagacccgtgagcctggccaccagcggcggcagcgaggaggaggacaaggacggcggcgtgctgttccacgtgaacaagagcggcttccccatcgacagccacacctgggagagaatgtggatgcacgtggccaaggtgcaccccaagggcggcgagatggtgggcgccatcagaaacgccgccttcctggccaagcccagcatcccccaggtgcccaactacagactgagcatgaccatccccgactggctgcaggccatccagaactacatgaagaccctgcactacctgaccaacggccagcccagcatcgagagattccccatcagcttcaagacctacttcagcggcaactacttccaccacgtggtgctgggcatctactgcaacggcagatacggcagcctgggcatgagcagaagagccgagctgatggacaagcccctgaccttcagaaccctgagcgacctgatcttcgacttcgaggacagctacaagaagtacctgcacaccgtgaagaaggtgaagatcggcctgtacgtgccccacgagccccacagcttccagcccatcgagtggaagcagctggtgctgaacgtgagcaagatgctgagagccgacatcagaaaggagctggagaagtacgccagagacatgagaatgaagatcctgaagcccgccagcgcccacagccccacccaggtgagaagcagaggcaagagcctgagccccagaagaagacaggccagcccccccagaagactgggcagaagagagaagagccccgccctgcccgagaagaaggtggccgacctgagcaccctgaacgaggtgggctaccagatcagaatctag

SEQ ID NO: 216641 - DNA, 936 bp, Artificial Sequence
  derived and/or modified sequence
atgactggcagcgcagccgacacccatcgctgtccacatccaaaaggcgcaaagggcactaggtctaggtcttcacacgcccgccctgtgtccttagctacctcagggggcagcgaagaggaggataaggatggcggcgtgctgtttcatgtcaataagagtggcttcccaattgatagtcatacctgggaacgaatgtggatgcacgtagccaaggtccatcctaaaggtggagagatggtcggtgccattagaaacgctgcatttctcgcaaagccctctatcccgcaggtgccaaactaccgactgtcaatgaccattcctgactggctgcaggcgatacagaactatatgaaaacactgcactatctgacaaacgggcagccctccatagaacggttcccaatcagcttcaagacctatttctcgggcaattatttccaccacgtcgtgcttggcatctactgcaacgggcggtatggctccctgggtatgtctcgaagagccgagctgatggataaaccactgacattccgcaccctgtctgacctaatctttgattttgaggatagttataagaagtacttacataccgtcaagaaagttaaaattggcctctatgtgcctcacgaaccccactcattccagcccatcgagtggaaacagctcgtcctgaatgtgagcaagatgctgcgtgctgacattaggaaggagttagagaaatacgcacgggacatgagaatgaagatcttgaagcccgcatccgcccattctcctacacaggtgcgttcgcggggaaagtctctgagcccccgtcggaggcaggccagcccgcctcggcggcttggtaggcgggagaagtcacctgccctacccgagaagaaggtggctgacctatcgacattaaacgaggtcggttatcaaattaggatctag

SEQ ID NO: 216642 - DNA, 3572 bp, Artificial Sequence
  derived and/or modified sequence
gccccagcagccccagccccagccccaggcccagcagcagcagcagcagcccctgctctcccgccgcccggagaggctctgcagccatgaagccaaccgtcccgaggcaccgccggtaagcagggagcctccgcggagctcccgccgccgctcccccttggtgagtcctgccgcagcgagaggcatggagaaggccgcccccgcggggcgctgatcccctcgccgcgcccgcgcgcacacgccccccgccgccgccgccgctgccgccgccgcgcgcccccagtacctcgctccccgcccaggccccaccatgaccggctccgcggccgacactcaccgctgcccccaccccaaaggcgccaaaggcacccggtcccggagcagccacgcgcggcccgtgagcctcgccaccagcgggggctcagaggaggaggacaaagacggcggggtgctgttccacgtcaacaagagcggcttccccatcgacagccacacctgggagcgcatgtggatgcacgtggccaaggtgcaccctaaggggggagaaatggtgggcgccatcaggaacgccgccttcttggcaaagccttcaataccccaggtcccaaactacaggctgtcgatgacgatcccagactggctccaggcgatccagaattacatgaagaccctacactacttaaccaatgggcagccttccattgagcggttccccatcagctttaaaacctacttctcaggaaactactttcaccacgttgtgctggggatttactgcaatggccgctatggctcattgggcatgagccgcagggctgagctgatggacaagccattgacttttcggactctgagtgacctcatctttgactttgaggactcttacaagaaatacctgcacacagtcaagaaggtcaagattgggctgtacgtcccccatgagcctcatagcttccagcccattgagtggaagcagctggtcctcaacgtctcaaagatgctgagggctgacataaggaaggagctggagaaatatgccagggacatgagaatgaagatcctgaaacctgcaagtgcccactctccgacccaagtgagaagccggggaaaatccctgtcccccagaaggagacaggcaagccccccgaggaggctcggccggcgagagaagtcgcctgcactgcctgaaaagaaggtggctgatctgagcactctgaatgaagtgggctatcaaatccgaatttagccaagccataccggccagcaagagggtttctgtggtgcttctctctgcactttacccagcatcttcaggaggaactgcaactatttattaagaacttgtgaattttatttttaaggattcacctggaaatagaatctgagtgggtggtaaccattagctttaaaaaattcactaaaaggcaccatgaaaaggctgaagtaataagccccactggggttggactatgtccctcactcaagatcttaaggataaccgtaactgaagttttatatttttccatttacctactttcttttacttgctttgaacattatgcctcaccaatagtaaatgttcatgaaataatctcttgaacttttggtatagtaaggtaactctaacagtattactgtctttttcagcaataacagaaagcaaaaatgggtgggttttttttaagcagttattacctcagcattttgacatcagatatgcaaacttaatggcgttttgtttttttatattctatttgtattctttccccagtatttcccatggggatctccacaagtttggagttttttcctggtgcacacacgtgaggagatttaaggtactatatgcaagtgttttactaaaaagcactgaaattcttctggcaatacaagaaccattttcaggatcttggagttacttccttcttaatctttcttaaagcattcactgatgtttttgttttttcaaaatgaaacaaaaatatcacattgagaagctagtctatgttctgtcactaacatttaaactttgcagactctaacaaaaagcacaagaggtcacgtactattatacaaatttagcggtactggatttacctctgacattaacacactcaggcagagaccaggagtgatcagcaggtcttcagaaccaaaaaacctttctgttcacatttcatctgatttttaaactgaggcaggctttgattcttctgaaggatgccaagaatcaaactaagggaggactcactgttaaagatgtgttctgatgtcttatattaagaccaaatgtgacatgatgtgattatcttccagtactttgcttttaggtaccatttcatgacattttaggaatgagtattggaaaatataaagaattagaaaagcagcactttttttttaatggaaaagtcttcggtccagtgttacaccttatagtgtaattcagtccctaagcacagaatgaatgtctggcctgcatatggtagttacagtgtaacctctggctgcagaccacacaggacaaccctaacagcctagtcttgtatggtgtaaatatcaagagtacagcttcaatttcatttgctttatcttagcaacaatgccaactcaggagagcagacggccgatttcagtgaagtctggtagtcaacagatgttatttcagtctcagtgcatctcctctggctttctttgactgaaggtgtttataggaaggaagttaaaaaaaaaaaaagctcattgagattctttaccaattctttacaagatttctgggggtgacagggaaagcaaaaggacttcaaagcaaaagggtgcacaagagcttacttcaccctgaaaatcagtattattaatgaaaagtactgttttcttaaagaagtcgaatgtcctttagatgaacaagaccaagtatacatctccattagattaaaatgtagcacagggttaaaaattatcagtttaatctctttaagaacagtattatcagagtttaaaatgagttagctctgtttatctacacacagcaaacccattcgcagcctcttggccacatgtattcagatgtttgaaatagtgaatcatttcattttcattctaaaacaatactgacttagccatataccttctgtttgtcaatctgaaacttgcttacatctaataagtagacctcttataacactgcaaccattctaagagttggaatttatttttgccaagtattaagtactgttacatctaaaatacagaatgtcaaatggttgcatagcttgtttcccacaacaaggaggaaaagaacaggaatacaaactctgtaatatgctgataaagaagccttagaactgccaactggcttgatggttcaattagtaagctaatttctcccacacccgctccttgatttttagactaattttcccaaagcaaggtttagtcacacaaacttgaaagtacatttaaaatgttcttagttgtcatcctacttttattgcctatggaatatgctaatttctaaaaaaaatacgggagaggcaccaaacccctaaattctagtgcaataatttaaaaaa

SEQ ID NO: 216643 - DNA, 936 bp, Artificial Sequence
  derived and/or modified sequence
atgacaggcagcgctgctgacacccaccgctgcccccaccccaagggggccaagggcaccaggagccgcagcagccacgcccggcctgtgtccctggccaccagcggcggcagcgaggaggaggacaaggatggcggcgtgctcttccacgtgaacaagagcggcttccccatcgacagccacacctgggagaggatgtggatgcacgtggccaaggtgcaccccaagggcggggagatggtgggcgccatcagaaatgctgccttcctggccaagcccagcatcccccaggtgcccaactaccgcctgtccatgaccatcccagactggctgcaggccatccagaactacatgaagaccctgcactacctgaccaacggccagcccagcattgagcgcttccccatctccttcaagacctacttcagcggcaactacttccaccacgtggtgctgggcatctactgcaatggccgctatggcagcctgggcatgagcagaagagctgagctgatggacaagcccctgaccttccgcaccctgagtgacctgatctttgattttgaagattcctacaagaagtacctgcacacagtgaagaaggtgaagattggcctgtatgtgccccatgagccccacagcttccagcccatcgagtggaagcagctggtgctgaatgtgtccaagatgctgcgggctgacatcaggaaggagctggagaagtatgcccgggacatgaggatgaagatcctgaagccagccagcgcccacagccccacccaggtgcgcagccggggcaagagcctgagcccccggcggcggcaggccagccccccccggcggctgggccggcgggagaagagccctgccctgcctgagaagaaggtggccgacctgagcaccctgaatgaggtgggctaccagatccgcatctag

SEQ ID NO: 216644 - DNA, 936 bp, Artificial Sequence
  derived and/or modified sequence
atgaccggcagcgccgccgacacccaccggtgcccccaccccaagggcgctaaaggtacgcggtcacgttctagccacgccagaccggtgtctttggcgaccagtggagggagtgaggaagaggacaaggacggcggggtcctgttccatgtaaacaagtccgggtttccaattgattcccacacatgggagagaatgtggatgcatgtagcaaaggtgcatccaaagggcggtgagatggtgggcgctatccgcaatgccgctttccttgccaagccatcaatcccccaagttcccaactacagattatccatgaccatccctgactggctccaggccattcagaactacatgaaaacgctgcactacctaacgaatggccagccctccatcgagagatttcctatatcctttaagacatacttctctggcaactacttccaccatgtggtcctgggaatatactgcaacggccgttacggcagcctcggaatgtcccgtcgcgccgagctcatggataaacccctgacatttcgcaccctgagcgacctaatcttcgactttgaggacagctacaagaaatatttacatacggtcaagaaggtaaaaattgggttgtacgtgcctcacgagccccactctttccagcctattgaatggaaacagctggtccttaacgtcagcaagatgctgcgggccgacatccgaaaggagctggagaagtatgcccgggatatgcgcatgaaaattctgaagcccgcaagtgcccactcgccgacccaggtcaggagtagaggaaagtccctctctccgcgtcgccgacaagcatctcctccacggcggcttggacggagagaaaagtctcccgctcttcctgaaaagaaagttgcggatctctccaccctcaacgaggtagggtaccaaattcgaatctag

SEQ ID NO: 216645 - DNA, 936 bp, Artificial Sequence
  derived and/or modified sequence
atgacagggtcagccgcagatactcaccgctgtcctcatccgaagggagctaagggaaccagatctcggagctctcacgcaaggccggtgagtctggcaaccagtggcggtagcgaggaggaggataaggacggcggagtgctcttccatgtgaacaagagcggtttccccatcgactcacacacgtgggagcgcatgtggatgcacgtagccaaagtgcatccgaagggcggagagatggtcggcgctatccgcaatgctgcttttcttgctaaaccatctatcccccaagtgcccaattaccgtctctctatgacaatccccgactggcttcaggctatccagaactatatgaaaactctgcattatctgaccaacgggcagccctcgatcgagcggtttccaatatccttcaagacctacttctcagggaattattttcaccatgttgtccttgggatttattgcaatgggaggtatgggtccctcggaatgtcacgcagggcagagctcatggacaaacccttaacattcagaaccctatccgacttaatctttgattttgaggactcatacaagaagtacctccatacagtgaaaaaagtcaagatcggtctgtacgtaccacacgaaccccactctttccagcctatcgaatggaagcaactggtcctgaatgtgtcaaaaatgcttcgtgccgatattagaaaagaactggaaaaatacgcaagggatatgcgcatgaagattttaaaaccagctagtgcgcactcacctacccaggttcgttctaggggcaagtccctgtccccgcgtcgcagacaggccagtcctccacgtcggcttgggaggcgggaaaagtcacctgctctgcccgaaaaaaaggtggccgatctctctactttaaacgaggtggggtatcagatacgaatttag

SEQ ID NO: 216646 - protein, 546 aa, Artificial Sequence
  derived and/or modified sequence
MKAIKKSLTEEEYLYLDFSHQTEGCIFPLHTSVTLFLLSYCDCKIFKICLVVTKEVSQWTRLCELTIPLAIENFLRESSDQPPTIPVEILQLEKKLSEPVRVHNDDKLRRQKLKQQKADGVGPPLTKGKAKSKVHTQETSEGLDSSSKSLELKVAFSKLTVQEEPATTNREPSHIRKAKASDLPPLEHVFAEGLYFTLADIVLLPCIHHFLVIISRKFSEKLVEFPLLASWYQRIQEVPGVKTAASKCGIQFLHLPKLLTTSTEQHPNLCEVPGVEEQSDPLFIGGPRPTMAKLMEKGIEVMFSPHPCPTWTLDWNVLPAAVSPKEGKMSSDRALRKQQQLNNLVYVVTNQAKPGDRIVDFCSGGGHVGIVLAHMLPSCQVTLIENKELSLIRAKKRSDELGLSNIWFIQANMEYFTGMFNIGVALHACGVATDMVIEHCIKTRASFVTCPCCYGFIQNTSKFNFPKSEQFKKTLSYKEHMILCRFADQTAVQLPPQRRLIGKQCMCLVDLDRARAAEECGYSVQVISMEPESCSPKNNMIVGVPI

SEQ ID NO: 216647 - DNA, 1641 bp, Artificial Sequence
  derived and/or modified sequence
atgaaggccatcaagaagagcctgaccgaggaggagtacctgtacctggacttcagccaccagaccgagggctgcatcttccccctgcacaccagcgtgaccctgttcctgctgagctactgcgactgcaagatcttcaagatctgcctggtggtgaccaaggaggtgagccagtggaccagactgtgcgagctgaccatccccctggccatcgagaacttcctgagagagagcagcgaccagccccccaccatccccgtggagatcctgcagctggagaagaagctgagcgagcccgtgagagtgcacaacgacgacaagctgagaagacagaagctgaagcagcagaaggccgacggcgtgggcccccccctgaccaagggcaaggccaagagcaaggtgcacacccaggagaccagcgagggcctggacagcagcagcaagagcctggagctgaaggtggccttcagcaagctgaccgtgcaggaggagcccgccaccaccaacagagagcccagccacatcagaaaggccaaggccagcgacctgccccccctggagcacgtgttcgccgagggcctgtacttcaccctggccgacatcgtgctgctgccctgcatccaccacttcctggtgatcatcagcagaaagttcagcgagaagctggtggagttccccctgctggccagctggtaccagagaatccaggaggtgcccggcgtgaagaccgccgccagcaagtgcggcatccagttcctgcacctgcccaagctgctgaccaccagcaccgagcagcaccccaacctgtgcgaggtgcccggcgtggaggagcagagcgaccccctgttcatcggcggccccagacccaccatggccaagctgatggagaagggcatcgaggtgatgttcagcccccacccctgccccacctggaccctggactggaacgtgctgcccgccgccgtgagccccaaggagggcaagatgagcagcgacagagccctgagaaagcagcagcagctgaacaacctggtgtacgtggtgaccaaccaggccaagcccggcgacagaatcgtggacttctgcagcggcggcggccacgtgggcatcgtgctggcccacatgctgcccagctgccaggtgaccctgatcgagaacaaggagctgagcctgatcagagccaagaagagaagcgacgagctgggcctgagcaacatctggttcatccaggccaacatggagtacttcaccggcatgttcaacatcggcgtggccctgcacgcctgcggcgtggccaccgacatggtgatcgagcactgcatcaagaccagagccagcttcgtgacctgcccctgctgctacggcttcatccagaacaccagcaagttcaacttccccaagagcgagcagttcaagaagaccctgagctacaaggagcacatgatcctgtgcagattcgccgaccagaccgccgtgcagctgcccccccagagaagactgatcggcaagcagtgcatgtgcctggtggacctggacagagccagagccgccgaggagtgcggctacagcgtgcaggtgatcagcatggagcccgagagctgcagccccaagaacaacatgatcgtgggcgtgcccatctag

SEQ ID NO: 216648 - DNA, 123 bp, Artificial Sequence
  derived and/or modified sequence
atgaaggccatcaagaagagcctgaccgaggaggagtacctgtacctggacttcagccaccagaccgagggctgcatcttccccctgcacaccagcgtgaccctgttcctgctgagctactag

SEQ ID NO: 216649 - DNA, 1641 bp, Artificial Sequence
  derived and/or modified sequence
atgaaggctatcaagaagtccttgactgaagaggaatatctctacctcgacttttcacaccagactgagggatgcatcttccccttacacactagtgtaacgcttttcctgttaagctattgtgattgtaaaatttttaagatctgtctcgtcgttaccaaagaggtttctcagtggaccaggctgtgcgaacttaccatccctctggctatcgaaaacttcctgagggagagctccgatcagccgcccaccattcccgtcgaaattcttcaactggaaaagaagttgagtgagcctgtcagagtccacaacgatgacaagctgcgtaggcagaaactgaagcagcaaaaggccgatggcgtggggccaccactgactaaaggaaaagctaagtctaaagtacatacccaggaaacatcagaagggctcgactcctcgtcaaagagtctggaacttaaggtagcattctctaagttgactgtacaggaggagcccgcaacgacaaatcgtgaacctagccatattcgaaaggccaaagctagtgatttacctcctctggagcatgtctttgccgagggtctctatttcacactggccgacattgtgttgttgccctgcattcatcatttcctggtgatcatcagccgtaaatttagcgagaaacttgtggagtttcctcttcttgcgtcatggtaccagaggatacaggaagtccccggagttaagacagcagcctccaagtgtggcatccagttcttacacctgcctaagcttctcacaacatccacagagcagcaccccaacttgtgcgaagtccccggggtggaggagcagtcagaccctctctttatcggcggacctcgcccaacaatggctaaactcatggaaaaggggattgaagtcatgttttctcctcacccttgtcccacttggacccttgattggaacgtgctgcctgcggcagtgtccccgaaggagggtaaaatgtcctctgatagggctctgaggaagcagcagcagctcaataatctcgtctatgtcgtgactaatcaggctaagccaggagataggattgtggacttttgctcagggggcggccatgtcggaattgttctggctcacatgctgcccagctgccaggtcacgctcatcgagaacaaagaactctcgttgattcgcgctaagaagcgaagtgacgaactgggcttaagcaacatttggttcattcaagcaaacatggagtattttaccggcatgttcaacattggggtagcccttcatgcctgtggagtcgccactgacatggtgatcgagcattgcatcaagactcgcgccagctttgttacctgcccatgctgctatggctttattcagaacaccagtaaatttaatttccccaaaagcgaacagtttaagaagacccttagctacaaggaacatatgattctgtgccggttcgctgaccagaccgccgtacagctccccccgcagaggagactgatcggcaaacagtgcatgtgtctggtcgacctggatagggcaagagctgcagaggaatgcggctattcagtccaggtgatttccatggaaccagagagctgctcaccaaagaacaatatgatcgtgggtgtccccatttag

SEQ ID NO: 216650 - DNA, 123 bp, Artificial Sequence
  derived and/or modified sequence
atgaaagcaatcaagaagagtttgaccgaagaagagtatctgtacctggatttttcccaccagaccgaggggtgcatctttcccctgcacacaagcgtgaccctgttccttctgagctactag

SEQ ID NO: 216651 - DNA, 1641 bp, Artificial Sequence
  derived and/or modified sequence
atgaaggccatcaagaagagcctgacagaggaggagtacctgtacctggacttcagccaccagacagagggctgcatcttccccctgcacacctctgtgaccctcttcctgctgagctactgtgactgcaagatcttcaagatctgcctggtggtgaccaaggaggtgtcccagtggacccggctgtgtgagctgaccatccccctggccatcgagaacttcctgcgggagagcagtgaccagccccccaccatccctgtggagatcctgcagctggagaagaagctgtctgagcctgtgcgggtgcacaatgatgacaagctgcggcggcagaagctgaagcagcagaaggcagatggagtgggcccccccctgaccaagggcaaggccaagagcaaggtgcacacccaggagaccagcgagggcctggacagcagcagcaagagcctggagctgaaggtggccttcagcaagctgactgtgcaggaggagcccgccaccaccaaccgggagcccagccacatcaggaaggccaaggccagtgacctgccccccctggagcacgtgtttgctgagggcctgtacttcaccctggccgacatcgtgctgctgccctgcatccaccacttcctggtgatcatcagcaggaagttcagcgagaagctggtggagttccccctgctggcctcctggtaccagaggatccaggaggtgcctggggtgaagacagctgccagcaaatgtggcatccagttcctgcacctgcccaagctgctgaccaccagcacagagcagcaccccaacctgtgtgaggtgcctggggtggaggagcagagcgaccccctcttcatcggcggcccccggcccaccatggccaagctgatggagaagggcatcgaggtgatgttcagcccccacccctgccccacctggaccctggactggaatgtgctgcctgctgctgtgagccccaaggagggcaagatgagcagtgaccgggccctgaggaagcagcagcagctgaacaacctggtgtatgtggtgaccaaccaggccaagccaggggaccgcatcgtggacttctgcagcggcggcggccacgtgggcatcgtgctggcccacatgctgcccagctgccaggtgaccctgattgagaacaaggagctgagcctcatccgggccaagaagagaagtgatgagctgggcctgagcaacatctggttcatccaggccaacatggagtacttcaccggcatgttcaacatcggcgtggccctgcacgcctgtggggtggccacagacatggtgattgagcactgcatcaagacccgggccagctttgtgacctgcccctgctgctacggcttcatccagaacaccagcaagttcaacttccccaagtctgagcagttcaagaagaccctgagctacaaggagcacatgatcctgtgccgctttgctgaccagacagctgtgcagctgcccccccagaggcggctgattggcaagcagtgcatgtgcctggtggacctggaccgggcccgggctgctgaagaatgtggctacagcgtgcaggtgatctccatggagcctgagagctgcagccccaagaacaacatgattgtgggcgtgcccatctag

SEQ ID NO: 216652 - DNA, 123 bp, Artificial Sequence
  derived and/or modified sequence
atgaaggccatcaagaagagcctgacagaggaggagtacctgtacctggacttcagccaccagacagagggctgcatcttccccctgcacacctctgtgaccctcttcctgctgagctactag

SEQ ID NO: 216653 - DNA, 4043 bp, Artificial Sequence
  derived and/or modified sequence
gttacttccctttttccggtccgccggattatgaatgacggccggcgcgagtattttccacataaggtggctgtcgtttttctcctggcgtctgtggaggcgagtggtctgcgggcagcagctcccagaggcagccttggaattccagctcggactgggcgggaaggcgcaggcggcccaggtcgccgacacgctcacgcaccctccctgcctggccgcgcctctgcgaccaggtgacccaatgaaagaagaaaatgaaagccataaagaaaagtcttacagaagaagaatacctgtacctggacttttctcaccaaacagaaggatgcatctttcctcttcatacatctgtaactttatttctgttatcttactgtgactgtaaaatctttaaaatttgcttagttgtcaccaaagaggttagtcagtggaccaggctatgtgaactcaccatccctttggctattgagaattttctcagagaatcttctgaccagcccccaactatacctgtagaaatactacagctagagaaaaagcttagtgagcctgttagagtgcataatgatgataaactccgcaggcagaagctcaagcaacagaaggctgatggagttgggcctccccttactaagggaaaggcaaagagcaaggtccacacacaggaaacatctgaagggttggattcttcatccaagagtctggaactgaaagtggcattctcaaagctcacagtacaggaagaaccagctactaccaacagagagccttctcacatcagaaaagcaaaagcctccgaccttccacctctggagcatgtgtttgcagaagggctttacttcactctggcagatattgtgctcttgccctgtatccatcatttcttggtaattatcagcaggaaattttctgagaagctggtagaatttccattgctagcctcttggtaccagaggattcaggaagtgccaggagtaaaaacagcagcttctaagtgtgggatccaatttctccatttaccaaagttgttgacaacctcaactgaacagcatccaaacttatgtgaagtcccaggtgtagaagagcaaagcgatcctttatttataggaggaccaagaccaaccatggccaagttaatggaaaagggcattgaagtgatgttttctccccacccttgccctacttggactcttgattggaatgttctccctgcagcagtcagcccaaaggaaggtaaaatgtccagtgatcgagctttgaggaagcagcaacagttgaacaaccttgtctatgtggtaacaaatcaggccaaacctggtgacagaattgtggatttctgcagcggtgggggccatgttggaattgtccttgctcacatgctgccatcatgtcaggttacattaatagaaaacaaggaattatcattaattcgtgctaagaagagaagtgatgaactgggtttaagcaacatttggttcattcaagcaaatatggaatattttactgggatgtttaatattggagtagcattgcatgcttgtggagtggcaacagacatggtgattgagcactgtatcaaaacacgggcttccttcgtcacatgcccttgctgttatggtttcattcagaacacctcaaagttcaattttccaaaaagtgaacaattcaagaaaactttatcatacaaggaacacatgattctgtgcagatttgcagaccagacagctgtccagctcccaccccaacgaaggctcataggaaaacagtgcatgtgcttggtggatctggatcgagcaagagctgcagaagaatgtggatactccgttcaagtgatatccatggagccagagagctgctctcccaaaaataacatgattgtgggagtccccatttaaaatgagatattcacatttgatattttgccatccgtcttcacgttggatgcccagtggcattcaggaggttcttggcataactaggaaacagcattagccatcttgaacctattgtgctcaggaaggaaagcaacagggaaatcttggaagtaaaggctccctgcaaagcatcacaaatgctttacaatgtgtgattaaaggactgctggtttttatagtgagaatcccctgaagtctcagctgccaaaagaataatactagtggaggttccatcacaggaataacaatttccttctcacttcacaagctcctctgatcttgccaatgtgatgtttaattcaaaacagcgcacttacagcctttattttatacttatttagatattcacatgggaactgaaagtagactcagtggagttttttgttttttatatttttaacaattgtactttttctatcactttaaaaaaatctagtcaggtaattatagtacagttatttttaagctggggttagttgaacttgtatagcatttaatatactccttttaaatatatttctgccaggcatggtggctcatgcctataatcccagcactttgagaggccaaggtgggaggatcatttgagcccaggatatcgagaccagcctgcactacaaaaaaatccaaaaaatgaggtgggaggatcacttgagcccaggaagtcaaggctgcagtgagccttgatagcgccactgcactcctgcctgggaaaatgagacccagactcaaaataaatcaatgaatgaattaataaacaaataaataaataaataaatttcccataaattaccaaatgagattgtcactggttcaaattattaaataattgccataaatttcctattacgggaatgtggaatttggacatacattttaacaataagtacattgattaatacatttaagtttataagtaattattgaggatccagtattttcaagaccttggcctagtttcttttcaattcaaagatgagttgcaaaagacataatgttttgcctatggaagtagatcatctagaagaaaaagattaaagaattagttaagcttttttttttttttttttttgagacagagtttcactcttgttgcccaggctggaattcagtggctcgatcttggctcaccacaacctctgcattctcctgcctcagcctcccgagtagctaggattataggcacctgccaccatgcccggctaattttgtttgtaattttagtagagatggggtttctccatgttggccaggctggtttcgaactcctgacctcaggtgatctacccgcctcagcctcccaaagtgctgaaattacaggcgtgagccacctcacctggccatgttctttatggaatactacaatgtgttgtcacaggatttgttattcagatgtcaatcatttttatttatatatttctgggtaaaacttattagtggtgtgaggagtgcagaatatggaagcttacctaaattctttttctgccagccaacattttaaaagacaaatgatgcatcctttctcaatgctgctaattctttaaattttacatgtcccaatttattccatttgagatttattttaatgttttcaacccctgtgtaacatgtatcatgaggagaaagcactatcattgatcatcactatggattaaaatataggaatattttacagggcagtatgggtgggggtgggagacatattggaatcgtgttttctgggataaaatttttaaaaagaattaatcattagccctgagtattttagtcatttgtgcctatagaaaacaacatgctcttttattgtggactttcttcttttaagtgaggtttaatttatatacaatacaataacagatttttaagtattcatttgagatgttttgacaactgtatatatacatgtaaccatcactggaatcagatatagaatattccccttaaatattgtcaggtaaacacattgagaatattttttccagtctgtggcttacctacttattttcataatgaatgttttacttgtgatgaagatttaacttacccttttactttaatgattaatattttctgtgttctttctaataaattttacgaactctgaggtta

SEQ ID NO: 216654 - DNA, 1641 bp, Artificial Sequence
  derived and/or modified sequence
atgaaggccatcaagaagagcctgaccgaggaggagtacctgtacctcgacttctcccatcagacagaagggtgcatttttcctctccacaccagcgtgacactgtttttactgagttactgcgactgtaaaattttcaaaatctgtctagtcgtaactaaagaagtgtcccagtggactcgcctgtgtgaactgactatacccttggccatcgagaacttcttgcgggagagctccgaccagcctcccacgatccccgtggagatcctccagctggagaagaaactctccgagcccgtgcgggtgcataatgatgacaagttaagaagacagaaactcaaacaacagaaggcagacggcgtgggaccacctctgacaaagggaaaagctaaatcaaaagttcacacccaggaaacttctgaaggattggatagttcatcaaagtccttagagctgaaggttgctttcagtaagctgactgtgcaggaggagccagccaccacaaaccgagaaccctcacatattaggaaggccaaagctagtgatctgcccccattggagcacgtgttcgccgaaggtctctactttactcttgctgatatcgtcctgctgccgtgcattcaccatttcctggtcataatctcccggaagtttagcgaaaagctggtcgagtttccacttctggcatcctggtatcagcgtatacaggaagtgcccggtgtgaagacagctgccagcaagtgtgggatccaattcttgcacttaccaaagctgctcacaaccagcaccgagcaacacccaaatctttgcgaggttcctggcgtagaggagcagagtgaccccctctttatcggaggacctcgtcccacaatggcgaaattgatggagaaaggaatagaagtgatgttctcaccgcacccatgccctacctggacactggactggaacgtcctaccagccgccgtgtcaccgaaagagggcaagatgtcttctgaccgggctctgcggaagcagcagcaactgaataatctggtctatgtggtaaccaatcaggctaagcctggagatcgtattgtcgacttctgttccggaggaggccatgttggtattgttctggcacacatgctgcccagctgccaggtcacattgattgagaataaggagttgtccctaatccgagcgaaaaagcgcagtgatgaactcggactctccaatatttggtttatacaggctaatatggagtattttacgggcatgtttaacattggcgtcgctctgcatgcctgcggagtcgcaaccgacatggtgatcgagcattgcataaaaactcgggcgagttttgtgacgtgcccttgttgctatggattcatccagaatacatctaagtttaacttccctaaatcagaacagttcaaaaaaacattgtcatacaaagagcatatgatcctttgtagattcgcagaccagacagctgtgcaactgcctccccaacggcgactcatcggaaaacagtgtatgtgcctggtcgatctggaccgtgccagggcagccgaagagtgtggatactctgtacaagtaatctctatggagcctgaatcttgcagcccaaagaacaatatgatcgtcggagtcccaatctag

SEQ ID NO: 216655 - DNA, 123 bp, Artificial Sequence
  derived and/or modified sequence
atgaaggccatcaagaagagcctgaccgaggaggagtacctgtaccttgatttcagccatcagacagagggatgtatttttcccttgcatacaagcgtaaccctgtttctgctgagttattag

SEQ ID NO: 216656 - DNA, 1641 bp, Artificial Sequence
  derived and/or modified sequence
atgaaggcaattaagaagtcactgaccgaagaggagtacctgtacctggattttagccatcagaccgaaggatgcatttttcctcttcacacctcagtaaccctcttcctcctatcctattgtgactgtaagatttttaaaatatgtctggtagtaacgaaagaggtgtcccagtggacgcgtctctgtgaactgactatcccactggccatcgagaacttcttgagagagtctagcgaccagccgcctacaatacccgttgaaatcctgcagctggaaaagaaactgtctgagccagtgagagtgcacaatgacgataaattacgccgtcagaagttgaagcagcagaaagcagatggtgtcggcccacctctgacaaaaggcaaggccaagagcaaggtgcatactcaggagacctcggaggggctcgattcctctagtaaatccctcgagctcaaagtggctttttccaagctcaccgtccaggaagagcctgccacaaccaatcgagagccctctcatattcgtaaggcaaaggcttccgatctgccacctctggagcacgtgtttgctgaaggactgtactttaccctggccgacattgtgctgctcccatgtattcatcatttcctggtcatcatatctagaaaattctccgaaaagctcgttgagttccctttgctggcttcgtggtaccagagaatccaggaagtgccaggcgtgaagaccgctgctagtaaatgtggcatccagttcctgcacctacctaagttgctgaccacctctaccgaacagcatccaaatctgtgcgaagtccctggcgtggaagaacagtccgatcctctttttatcggtggccctaggcccaccatggcaaaactcatggagaaaggcattgaggtcatgttctcgccccacccttgcccaacttggacgctggactggaatgttctgcctgctgcagtgagtccgaaggaaggaaagatgagctccgatagggctttgcgtaaacagcagcaacttaataacctggtgtacgtggtaacaaatcaggcaaagcccggagatcgtattgtggatttctgttccggaggaggtcatgtaggaatcgtgcttgcgcacatgctgccctcctgccaggtcacactaatcgaaaacaaggaactgagccttatccgcgctaaaaaacgaagcgacgagctcggcttgagcaacatctggttcatccaggccaacatggaatattttacgggcatgtttaacataggtgtcgctcttcatgcctgcggcgtggccaccgacatggtgatcgaacactgtatcaagacccgcgcatcattcgtgacctgcccatgctgctatggctttattcagaacacctccaagtttaacttcccgaagagcgaacagttcaagaagactttgagctacaaggaacacatgatattgtgtcgctttgctgaccagactgctgtgcagttacccccacagcgcagactgatcgggaagcagtgcatgtgtttggtggacctcgatagggcaagagcagcggaggagtgcggatatagcgtgcaggtgattagcatggagcccgaaagttgtagtccgaagaacaatatgatcgtaggggtaccgatctag

SEQ ID NO: 216657 - DNA, 123 bp, Artificial Sequence
  derived and/or modified sequence
atgaaggccattaagaaaagtctaactgaagaagaatatctgtatctggactttagtcaccagactgaggggtgtattttcccactgcacacctccgtgacactttttctcctgtcatattag

SEQ ID NO: 216658 - DNA, 572 bp, Artificial Sequence
  derived and/or modified sequence
agtgacgttacttccctttttccggtccgccggattatgaatgacggccggcgcgagtattttccacataaggtggctgtcgtttttctcctggcgtctgtggaggcgagtggtctgcgggcagcagctcccagaggcagccttggaattccagctcggactgggcgggaaggcgcaggcggcccaggtcgccgacacgctcacgcaccctccctgcctggccgcgcctctgcgaccaggtaaagagggcgctcgggccgccggcttctcagcctccgcgaccccctaagaactggtcttttcttcgggggtctgcagggctgaggatgcgggggaagggtgggaaggacaagggcgtggtatcatcgtcctgatttttctcccgccctggggccgcctcaaactcctttttggccactcctgctgaaggtgacccaatgaaagaagaaaatgaaagccataaagaaaagtcttacagaagaagaatacctgtacctggacttttctcaccaaacagaaggatgcatctttcctcttcatacatctgtaactttatttctgttatcttactg

SEQ ID NO: 216659 - protein, 1316 aa, Artificial Sequence
  derived and/or modified sequence
MDSQELKTLINYYCQERYFHHVLLVASEGIKRYGSDPVFRFYHAYGTLMEGKTQEALREFEAIKNKQDVSLCSLLALIYAHKMSPNPDREAILESDARVKEQRKGAGEKALYHAGLFLWHIGRHDKAREYIDRMIKISDGSKQGHVLKAWLDITRGKEPYTKKALKYFEEGLQDGNDTFALLGKAQCLEMRQNYSGALETVNQIIVNFPSFLPAFVKKMKLQLALQDWDQTVETAQRLLLQDSQNVEALRMQALYYVCREGDIEKASTKLENLGNTLDAMEPQNAQLFYNITLAFSRTCGRSQLILQKIQTLLERAFSLNPQQSEFATELGYQMILQGRVKEALKWYKTAMTLDETSVSALVGFIQCQLIEGQLQDADQQLEFLNEIQQSIGKSAELIYLHAVLAMKKNKRQEEVINLLNDVLDTHFSQLEGLPLGIQYFEKLNPDFLLEIVMEYLSFCPMQPASPGQPLCPLLRRCISVLETVVRTVPGLLQTVFLIAKVKYLSGDIEAAFNNLQHCLEHNPSYADAHLLLAQVYLSQEKVKLCSQSLELCLSYDFKVRDYPLYHLIKAQSQKKMGEIADAIKTLHMAMSLPGMKRIGASTKSKDRKTEVDTSHRLSIFLELIDVHRLNGEQHEATKVLQDAIHEFSGTSEEVRVTIANADLALAQGDIERALSILQNVTAEQPYFIEAREKMADIYLKHRKDKMLYITCFREIAERMANPRSFLLLGDAYMNILEPEEAIVAYEQALNQNPKDGTLASKMGKALIKTHNYSMAITYYEAALKTGQKNYLCYDLAELLLKLKWYDKAEKVLQHALAHEPVNELSALMEDGRCQVLLAKVYSKMEKLGDAITALQQARELQARVLKRVQMEQPDAVPAQKHLAAEICAEIAKHSVAQRDYEKAIKFYREALVHCETDNKIMLELARLYLAQDDPDSCLRQCALLLQSDQDNEAATMMMADLMFRKQDYEQAVFHLQQLLERKPDNYMTLSRLIDLLRRCGKLEDVPRFFSMAEKRNSRAKLEPGFQYCKGLYLWYTGEPNDALRHFNKARKDRDWGQNALYNMIEICLNPDNETVGGEVFENLDGDLGNSTEKQESVQLAVRTAEKLLKELKPQTVQGHVQLRIMENYCLMATKQKSNVEQALNTFTEIAASEKEHIPALLGMATAYMILKQTPRARNQLKRIAKMNWNAIDAEEFEKSWLLLADIYIQSAKYDMAEDLLKRCLRHNRSCCKAYEYMGYIMEKEQAYTDAALNYEMAWKYSNRTNPAVGYKLAFNYLKAKRYVDSIDICHQVLEAHPTYPKIRKDILDKARASLRP

SEQ ID NO: 216660 - DNA, 3951 bp, Artificial Sequence
  derived and/or modified sequence
atggacagccaggagctgaagaccctgatcaactactactgccaggagagatacttccaccacgtgctgctggtggccagcgagggcatcaagagatacggcagcgaccccgtgttcagattctaccacgcctacggcaccctgatggagggcaagacccaggaggccctgagagagttcgaggccatcaagaacaagcaggacgtgagcctgtgcagcctgctggccctgatctacgcccacaagatgagccccaaccccgacagagaggccatcctggagagcgacgccagagtgaaggagcagagaaagggcgccggcgagaaggccctgtaccacgccggcctgttcctgtggcacatcggcagacacgacaaggccagagagtacatcgacagaatgatcaagatcagcgacggcagcaagcagggccacgtgctgaaggcctggctggacatcaccagaggcaaggagccctacaccaagaaggccctgaagtacttcgaggagggcctgcaggacggcaacgacaccttcgccctgctgggcaaggcccagtgcctggagatgagacagaactacagcggcgccctggagaccgtgaaccagatcatcgtgaacttccccagcttcctgcccgccttcgtgaagaagatgaagctgcagctggccctgcaggactgggaccagaccgtggagaccgcccagagactgctgctgcaggacagccagaacgtggaggccctgagaatgcaggccctgtactacgtgtgcagagagggcgacatcgagaaggccagcaccaagctggagaacctgggcaacaccctggacgccatggagccccagaacgcccagctgttctacaacatcaccctggccttcagcagaacctgcggcagaagccagctgatcctgcagaagatccagaccctgctggagagagccttcagcctgaacccccagcagagcgagttcgccaccgagctgggctaccagatgatcctgcagggcagagtgaaggaggccctgaagtggtacaagaccgccatgaccctggacgagaccagcgtgagcgccctggtgggcttcatccagtgccagctgatcgagggccagctgcaggacgccgaccagcagctggagttcctgaacgagatccagcagagcatcggcaagagcgccgagctgatctacctgcacgccgtgctggccatgaagaagaacaagagacaggaggaggtgatcaacctgctgaacgacgtgctggacacccacttcagccagctggagggcctgcccctgggcatccagtacttcgagaagctgaaccccgacttcctgctggagatcgtgatggagtacctgagcttctgccccatgcagcccgccagccccggccagcccctgtgccccctgctgagaagatgcatcagcgtgctggagaccgtggtgagaaccgtgcccggcctgctgcagaccgtgttcctgatcgccaaggtgaagtacctgagcggcgacatcgaggccgccttcaacaacctgcagcactgcctggagcacaaccccagctacgccgacgcccacctgctgctggcccaggtgtacctgagccaggagaaggtgaagctgtgcagccagagcctggagctgtgcctgagctacgacttcaaggtgagagactaccccctgtaccacctgatcaaggcccagagccagaagaagatgggcgagatcgccgacgccatcaagaccctgcacatggccatgagcctgcccggcatgaagagaatcggcgccagcaccaagagcaaggacagaaagaccgaggtggacaccagccacagactgagcatcttcctggagctgatcgacgtgcacagactgaacggcgagcagcacgaggccaccaaggtgctgcaggacgccatccacgagttcagcggcaccagcgaggaggtgagagtgaccatcgccaacgccgacctggccctggcccagggcgacatcgagagagccctgagcatcctgcagaacgtgaccgccgagcagccctacttcatcgaggccagagagaagatggccgacatctacctgaagcacagaaaggacaagatgctgtacatcacctgcttcagagagatcgccgagagaatggccaaccccagaagcttcctgctgctgggcgacgcctacatgaacatcctggagcccgaggaggccatcgtggcctacgagcaggccctgaaccagaaccccaaggacggcaccctggccagcaagatgggcaaggccctgatcaagacccacaactacagcatggccatcacctactacgaggccgccctgaagaccggccagaagaactacctgtgctacgacctggccgagctgctgctgaagctgaagtggtacgacaaggccgagaaggtgctgcagcacgccctggcccacgagcccgtgaacgagctgagcgccctgatggaggacggcagatgccaggtgctgctggccaaggtgtacagcaagatggagaagctgggcgacgccatcaccgccctgcagcaggccagagagctgcaggccagagtgctgaagagagtgcagatggagcagcccgacgccgtgcccgcccagaagcacctggccgccgagatctgcgccgagatcgccaagcacagcgtggcccagagagactacgagaaggccatcaagttctacagagaggccctggtgcactgcgagaccgacaacaagatcatgctggagctggccagactgtacctggcccaggacgaccccgacagctgcctgagacagtgcgccctgctgctgcagagcgaccaggacaacgaggccgccaccatgatgatggccgacctgatgttcagaaagcaggactacgagcaggccgtgttccacctgcagcagctgctggagagaaagcccgacaactacatgaccctgagcagactgatcgacctgctgagaagatgcggcaagctggaggacgtgcccagattcttcagcatggccgagaagagaaacagcagagccaagctggagcccggcttccagtactgcaagggcctgtacctgtggtacaccggcgagcccaacgacgccctgagacacttcaacaaggccagaaaggacagagactggggccagaacgccctgtacaacatgatcgagatctgcctgaaccccgacaacgagaccgtgggcggcgaggtgttcgagaacctggacggcgacctgggcaacagcaccgagaagcaggagagcgtgcagctggccgtgagaaccgccgagaagctgctgaaggagctgaagccccagaccgtgcagggccacgtgcagctgagaatcatggagaactactgcctgatggccaccaagcagaagagcaacgtggagcaggccctgaacaccttcaccgagatcgccgccagcgagaaggagcacatccccgccctgctgggcatggccaccgcctacatgatcctgaagcagacccccagagccagaaaccagctgaagagaatcgccaagatgaactggaacgccatcgacgccgaggagttcgagaagagctggctgctgctggccgacatctacatccagagcgccaagtacgacatggccgaggacctgctgaagagatgcctgagacacaacagaagctgctgcaaggcctacgagtacatgggctacatcatggagaaggagcaggcctacaccgacgccgccctgaactacgagatggcctggaagtacagcaacagaaccaaccccgccgtgggctacaagctggccttcaactacctgaaggccaagagatacgtggacagcatcgacatctgccaccaggtgctggaggcccaccccacctaccccaagatcagaaaggacatcctggacaaggccagagccagcctgagaccctag

SEQ ID NO: 216661 - DNA, 3951 bp, Artificial Sequence
  derived and/or modified sequence
atggactctcaggaattgaaaacactaattaattattactgccaggagcggtactttcaccacgtgctactggtcgctagtgaaggtattaagcggtatgggagcgatcccgtttttcgtttttaccatgcatatggaacactgatggaagggaaaactcaggaagctctacgggaattcgaagcaatcaagaacaagcaggacgtttccctttgtagtctgttggctctgatttacgcccacaagatgtcgcccaaccccgaccgagaagctatactcgagagcgatgcccgggtgaaggagcagcggaaaggggcaggagagaaggcattgtatcatgcaggtctgttcttgtggcacatcggtagacatgataaagcaagagagtatatcgacaggatgatcaagatttcagacgggtcaaaacaggggcatgtgttaaaggcatggcttgacatcacccgaggcaaagagccctatacaaaaaaagccctgaagtactttgaggaggggctccaggacgggaacgacacttttgcacttctgggtaaagcccagtgcttggaaatgaggcaaaactacagcggcgcactcgagaccgttaaccagatcatcgtaaacttcccaagctttcttcccgccttcgtgaaaaaaatgaagctgcagctggccctgcaggactgggatcagaccgtggagactgcgcagcgccttctgctccaagacagtcaaaacgtggaggccctgcgaatgcaggccctttactacgtatgtcgggaaggtgatatcgagaaagcctctacaaaactggaaaatctgggtaacactctcgatgccatggagccgcaaaatgcccagctgttttataacattactctggcattcagccgcacctgcgggcggtcccaattaatcctccagaaaattcagaccctgctggaaagagcttttagcctgaacccccagcagtccgagttcgctacggagctcggataccagatgatattgcagggccgggtgaaggaagccctgaagtggtacaaaaccgccatgacccttgacgagactagcgtgagtgccctagtgggctttatccagtgtcaactcatcgaaggacagctgcaggacgcagatcaacagctcgagtttctgaatgagattcagcagtcaatcgggaaaagcgcggagctaatttacctgcatgctgtcctggccatgaaaaagaacaaaaggcaggaagaggtgattaatcttcttaatgacgtactcgatacccatttctcccaactggaggggctgcccctgggcatccaatacttcgagaagctcaatccagattttctgctggagatagttatggagtatctgtctttctgtcctatgcagcccgcctctccgggccagccactctgccccctcctccgccgatgtatctcggtgctcgaaactgttgttagaacggtgcccgggctcctgcagacagttttcctgatagcaaaggtaaagtacctgtcaggggacattgaagcagctttcaacaatcttcaacactgtttagaacacaacccgtcctacgccgacgcgcacttacttctggcccaggtttacctgtctcaggagaaagtcaagttgtgctcacagagtctggagctttgcctaagctacgacttcaaagtccgggattaccccttataccaccttattaaggcacagtctcagaaaaaaatgggggagatcgctgacgcgattaagactctgcatatggcgatgtccttgccagggatgaagagaattggggcctcaacaaaatctaaggatcgaaagaccgaggtggatactagccacagactgagtatcttccttgaactcattgatgtccaccgattgaacggcgaacagcacgaggcgacaaaagtgctccaagatgccatccacgagtttagcggcacctccgaggaagtgcgcgtgaccattgccaacgcggacctggccctagctcagggcgatatcgagcgagctctgagcattcttcagaatgtgaccgcagaacaaccgtattttatcgaagcgagagagaaaatggcggacatttatctcaagcatagaaaagacaaaatgctgtacatcacctgtttcagggaaatcgcagagcgcatggctaacccacggtctttcctcttactcggcgatgcgtacatgaatatattggaacccgaggaagcaatcgttgcttatgagcaggctttaaaccaaaacccaaaagacggtacgttggcctccaaaatgggcaaagcgctcattaaaacccacaattattctatggcaattacgtattatgaggcggccctgaagacaggccagaaaaactacttgtgctatgacctcgctgagctgctattgaagctgaagtggtatgataaagctgaaaaagtgctccagcacgcccttgcccacgaacccgttaatgagctcagcgctcttatggaagacggacgatgccaggtgttgctcgctaaggtctactccaagatggagaagctgggcgatgctatcaccgcactgcaacaagcccgggagttgcaggccagagtgctgaaacgcgttcagatggagcagccggacgccgttccagcacagaaacacctggctgcagagatatgtgcagaaatcgctaagcactccgtggcccaaagagactatgaaaaggcaataaagttttacagggaagctttagtccactgtgagaccgacaataagatcatgttggaacttgccaggttgtacttagcacaggatgatccagattcttgtcttaggcagtgcgctctgctgctccagtctgaccaggacaacgaggctgctaccatgatgatggcagacttaatgttccgtaagcaggattatgaacaggctgtgttccaccttcagcaactcttggagagaaagccggacaattacatgactctgtctcggctcatagatcttctgcgacgatgtgggaagttggaggatgtgcccaggttttttagcatggccgaaaaaaggaacagccgggccaagctagagccgggtttccagtattgtaaagggttatatctctggtacacaggagagcctaacgacgccttgagacactttaataaggctaggaaggacagagattggggccagaatgctttgtataacatgatcgaaatctgcttaaaccctgataacgaaaccgtgggtggggaagtcttcgaaaatttggatggtgacctcggaaacagcaccgagaagcaggagagcgttcagctcgcagtcagaacagccgaaaaattactaaaagaactgaaaccccagaccgttcagggccacgttcagttgagaattatggagaactattgcctcatggcaaccaagcagaaatcaaacgtcgaacaggccctgaacacattcaccgagattgcagccagcgaaaaggaacatattcctgctcttctgggcatggccaccgcctacatgatcttgaagcaaaccccaagagctagaaaccaactcaagcgaattgccaagatgaactggaatgctattgatgccgaagaatttgaaaaaagctggctcctgctggctgatatctatatccaaagcgccaaatatgatatggcagaggacctgctgaaacggtgtctgcgccacaataggtcctgctgtaaggcctatgagtatatgggctatattatggaaaaagagcaggcctataccgacgccgctctcaactatgagatggcctggaagtatagcaatcgcactaatccagcagtaggctacaaactcgcgttcaattacctgaaggctaagaggtatgttgattcaatcgatatatgtcaccaggtgctggaggcacatcctacatacccaaaaattcgcaaggatatattagataaggctagagcatccctgcggccctag

SEQ ID NO: 216662 - DNA, 3951 bp, Artificial Sequence
  derived and/or modified sequence
atggacagccaggagctgaagaccctcatcaactactactgccaggagcgctacttccaccacgtgctgctggtggccagcgagggcatcaagagatatggcagtgaccctgtgttccgcttctaccacgcctacggcaccctgatggagggcaagacccaggaggccctgcgggagtttgaggccatcaagaacaagcaggatgtgtccctgtgcagcctgctggccctgatctatgcccacaagatgagccccaacccagaccgggaggccatcctggagagtgatgcccgggtgaaggagcagaggaagggggccggggagaaggccctgtaccacgccggcctcttcctgtggcacatcggcagacatgacaaggcccgggagtacatcgacaggatgatcaagatcagtgatggcagcaagcagggccacgtgctgaaggcctggctggacatcacccggggcaaggagccctacaccaagaaggccctgaagtactttgaggagggcctgcaggatggaaatgacacctttgccctgctgggcaaggcccagtgcctggagatgaggcagaactacagcggggccctggagaccgtgaaccagatcatcgtgaacttccccagcttcctgcctgcctttgtgaagaagatgaagctgcagctggccctgcaggactgggaccagacagtggagacagcccagaggctgctgctgcaggacagccagaatgtggaggccctgaggatgcaggccctgtactacgtgtgccgggagggggacatcgagaaggccagcaccaagctggagaacctgggcaacaccctggatgccatggagccccagaatgcccagctgttctacaacatcaccctggccttcagcaggacctgtggccgcagccagctgatcctgcagaagatccagaccctgctggagcgggccttcagcctgaacccccagcagagcgagtttgccacagagctgggctaccagatgatcctgcagggccgggtgaaggaggccctgaagtggtacaagacagccatgaccctggatgagacctctgtgtctgccctggtgggcttcatccagtgccagctgattgagggccagctgcaggatgctgaccagcagctggagttcctgaatgagatccagcagagcatcggcaagtctgctgagctgatctacctgcatgctgtgctggccatgaagaagaacaagaggcaggaggaggtgatcaacctgctgaatgatgtgctggacacccacttcagccagctggagggcctgcccctgggcatccagtactttgagaagctgaacccagacttcctgctggagatcgtgatggagtacctgtccttctgccccatgcagcctgccagccctggccagcccctgtgccccctgctgcggcgctgcatctctgtgctggagaccgtggtgaggacagtgcccggcctgctgcagaccgtcttcctgattgccaaggtgaagtacctgagcggggacatcgaggccgccttcaacaacctgcagcactgcctggagcacaaccccagctatgcagatgcccacctgctgctggcccaggtgtacctgagccaggagaaggtgaagctgtgcagccagagcctggagctgtgcctgtcctatgacttcaaggtgcgggactaccccctgtaccacctgatcaaggcccagagccagaagaagatgggagaaattgctgatgccatcaagaccctgcacatggccatgagcctgcccggcatgaagagaattggagccagcaccaagagcaaggacaggaagacagaggtggacaccagccaccggctgagcatcttcctggagctgattgatgtgcaccggctgaatggagagcagcacgaggccaccaaggtgctgcaggatgccatccacgagttcagcggcaccagcgaggaggtgcgggtgaccatcgccaatgctgacctggccctggcccagggcgacatcgagcgggccctgagcatcctgcagaatgtgacagctgagcagccctacttcatcgaggcccgggagaagatggctgacatctacctgaagcacaggaaggacaagatgctgtacatcacctgcttccgggagattgctgagaggatggccaaccccaggagcttcctgctgctgggagatgcctacatgaacatcctggagcctgaggaggccatcgtggcctatgagcaggccctgaaccagaaccccaaggatggcaccctggccagcaagatgggcaaggccctgatcaagacccacaactacagcatggccatcacctactatgaagctgccctgaagacaggccagaagaactacctgtgctatgacctggccgagctgctgctgaagctgaagtggtatgacaaggccgagaaggtgctgcagcacgccctggcccacgagcctgtgaatgagctgagcgccctgatggaggatggccgctgccaggtgctgctggccaaggtgtacagcaagatggagaagctgggagatgccatcacagccctgcagcaggcccgggagctgcaggcccgggtgctgaagagggtgcagatggagcagccagatgctgtgcctgcccagaagcacctggccgctgagatctgtgccgagatcgccaagcacagcgtggcccagagggactatgagaaggccatcaagttctaccgggaggccctggtgcactgtgaaacagacaacaagatcatgctggagctggcccggctgtacctggcccaggatgatcctgacagctgcctgcggcagtgtgccctgctgctgcagagcgaccaggacaatgaagctgccaccatgatgatggctgacctgatgttcaggaagcaggactatgagcaggccgtgttccacctgcagcagctgctggagaggaagccagacaactacatgaccctgagccggctgattgacctgctgcggcgctgtgggaagctggaggatgtgccccgcttcttctccatggccgagaagaggaacagccgggccaagctggagcccggcttccagtactgcaagggcctgtacctgtggtacaccggggagcccaatgatgccctgcggcacttcaacaaggccaggaaggaccgggactggggccagaatgccctgtacaacatgattgagatctgcctgaacccagacaatgagaccgtgggcggggaggtgtttgagaacctggatggagacctgggcaacagcacagagaagcaggagagcgtgcagctggccgtgaggacagctgagaagctgctgaaggagctgaagccccagacagtgcagggccacgtgcagctgcgcatcatggagaactactgcctgatggccaccaagcagaagagcaatgtggagcaggccctgaacaccttcacagaaattgctgccagcgagaaggagcacatcccagccctgctgggcatggccacagcctacatgatcctgaagcagaccccccgggccaggaaccagctgaagagaattgccaagatgaactggaatgccattgatgctgaggagtttgagaagtcctggctgctgctggccgacatctacatccagagcgccaagtatgacatggccgaggacctgctgaagcgctgcctgcggcacaacagaagctgctgcaaggcctatgagtacatgggctacatcatggagaaggagcaggcctacacagatgctgccctgaactatgagatggcctggaagtacagcaacagaaccaacccagctgtgggctacaagctggccttcaactacctgaaggccaagcgctacgtggacagcattgacatctgccaccaggtgctggaggcccaccccacctaccccaagatcaggaaggacatcctggacaaggcccgggccagcctgcggccctag

SEQ ID NO: 216663 - DNA, 3951 bp, Artificial Sequence
  derived and/or modified sequence
atggacagccaggagctgaagaccctgatcaactactactgccaggagcgatactttcatcacgtgctactagtggcgtccgaaggcataaaacgttatggaagtgaccctgtgttccggttttaccacgcctacggaacactcatggaaggaaagacccaggaggcgctcagggagtttgaagcgatcaagaacaagcaggatgtgtcactgtgttctctactagctttgatctacgcccacaaaatgagccctaatcctgatagagaggctatcctggagagtgatgctagggtgaaagagcaacgcaagggtgctggcgaaaaggcactgtatcacgccggtctgtttctgtggcacataggcagacacgacaaggcaagggagtacatagacagaatgataaagatatctgacggttccaaacaggggcacgtgctgaaagcttggctggatatcacacgagggaaagaaccttatacaaagaaagccctgaagtatttcgaggaagggttgcaggatggcaacgacacatttgctttgctgggcaaggcacaatgtcttgaaatgcgccagaattattccggcgccctcgaaaccgtgaaccagatcattgtcaactttcctagcttcctacccgcttttgtcaagaagatgaaactccagctggccctccaggattgggatcagaccgtggagactgctcagcggctgctactccaggactcccagaacgtggaggcgctacggatgcaggccctatactatgtctgcagggaaggtgacatcgagaaagcaagcactaagctcgaaaacctggggaatacattggatgctatggaaccccaaaatgcccaactgttctacaacattactttggcattttcacgcacttgtggccggtcacagctgatccttcaaaaaatacagaccctgttagagcgcgcgtttagtttgaaccctcagcagtcagaatttgcaacggaactgggctatcaaatgattctgcagggtcgggtaaaagaggcgttaaagtggtataaaactgctatgactttggatgagacttctgtttctgcattagttggttttatccagtgtcagctgatcgaggggcagctgcaggatgcggaccaacagctggagtttctgaatgagatacagcagtctatcggcaagtcagctgaattaatctatctgcatgccgttttagccatgaaaaaaaataagcgccaggaggaagtcattaatttgttgaacgacgttttggatacacacttcagccagttggaaggacttcccctggggatacagtactttgagaagctgaatcccgattttctgctggaaattgtcatggaatacctcagcttttgtcccatgcagccagcgtcaccagggcaaccactatgtccgctgctgcggcgttgtatctcagtgctagaaacggtggtgaggacagtccctggactcttgcagacagtatttctcatcgccaaggtaaagtacctgtcaggggatattgaggccgcctttaacaatcttcagcactgccttgaacacaatccgtcctacgcagacgcccatctgttgttggcccaagtgtacctgtcgcaagagaaagtgaagttatgcagccaaagcctggagctctgcctgagctatgacttcaaagtgcgggattaccccctgtaccaccttatcaaggcccaatcgcagaaaaaaatgggagaaatagccgacgcgatcaaaactctgcacatggcgatgagccttcctggaatgaagaggatcggcgcttctactaagtctaaggataggaaaacggaggtcgatacgagccaccgcttgtccatcttcctcgagctcatcgatgttcaccgtctgaacggcgagcagcatgaggcgacaaaggtgcttcaagatgccattcacgagtttagcgggacatccgaagaagttagagtgacaattgccaacgctgacttggcactggcacagggcgatatcgagcgcgctctaagcatcctgcagaatgtaaccgctgagcagccttacttcattgaagcccgtgaaaaaatggcagacatctacttaaaacataggaaagataaaatgctgtatatcacgtgtttcagggagatcgccgagagaatggcgaatccgcggtccttcttgctgctgggtgacgcatacatgaatatcctggagcctgaagaagctatcgtggcatatgagcaggccctgaaccagaatcccaaagatggcacactggccagcaaaatgggtaaagccctgattaagacacacaattactcaatggccatcacatactatgaggcagcccttaaaaccggccagaagaactacttgtgttacgatttggccgaattgcttctcaaacttaaatggtacgataaggcggaaaaggtgttacaacacgccctcgcgcacgagccggtcaacgagctgtctgcgcttatggaggacgggcgctgccaggtgttgttagctaaggtctattcaaaaatggagaaactgggcgacgccataactgctctgcagcaggctcgtgaactacaggctcgggtcctgaagcgggttcagatggagcagcctgacgccgtccccgcacagaagcacttggcagctgagatttgtgcagagatcgccaagcattccgttgctcaacgggattacgagaaagccattaaattttatcgtgaggcgttggtccactgcgagaccgataataaaatcatgttggaactggcccggctttacttggcacaagacgacccagattcctgtctgcgccaatgtgccctcctgctgcagtccgaccaagacaacgaggccgccactatgatgatggctgatctaatgttccgaaagcaggactatgagcaggcggtattccatctgcaacaactcctggaacggaagcccgataactatatgacgctgtctaggctgatcgacctgctgcgacgttgcggcaaattggaggacgttcctagattcttcagcatggccgaaaaaaggaattctcgggccaagctggagcctggattccagtattgtaaggggttgtacctgtggtacacgggagagcctaacgatgcattacgacactttaacaaggccaggaaggacagggactggggccagaatgccctgtataacatgatcgagatctgtcttaatccagataatgaaacggtaggcggggaggtgttcgagaacctcgatggcgatctggggaatagcactgagaagcaggaaagcgttcagctggctgttaggactgccgagaaactactgaaggaactgaaaccccagacggtgcaggggcatgtgcagctgcgcatcatggagaattactgtctaatggccacaaagcagaagtccaacgttgaacaggctctgaatacctttacagagattgcggcctcagaaaaagagcacatccctgcactcctgggcatggcaaccgcatacatgatcctgaagcagactcctcgcgctagaaaccagctgaagagaatcgccaaaatgaattggaacgcgatcgacgctgaagagtttgaaaagtcatggttgcttttagccgatatctacattcagagtgctaaatatgacatggccgaggacttgttgaagcggtgtttaagacataaccgctcctgttgcaaggcgtatgagtatatgggctacataatggaaaaggagcaggcctacaccgatgcggctctgaactatgaaatggcctggaaatactccaaccgcacaaatcctgcagtgggttataagctggcatttaattacctaaaagccaaaaggtatgtggattccatcgatatttgtcaccaggtattggaagcccatccaacgtaccccaagatcagaaaagatatactagacaaagcccgcgcctctctgcgtccatag

SEQ ID NO: 216664 - DNA, 3951 bp, Artificial Sequence
  derived and/or modified sequence
atggactctcaagaactgaaaactctgataaattattactgccaggaacggtactttcatcacgttttgctggtggccagcgagggcatcaaacggtacggaagtgatcccgtcttcagattctatcacgcgtatggaacgctgatggaagggaagacacaggaggccctccgggagttcgaggccattaagaataagcaggacgtgtccctttgctcactgctcgctttaatctacgcgcataaaatgtccccgaatcccgaccgggaggctatcctggagtccgacgccagagtgaaagagcagcggaaaggcgctggcgaaaaggccctgtatcatgcaggcctcttcctctggcatatcggacgtcacgacaaggccagagaatatatcgaccgaatgatcaagataagtgacggttccaaacaaggacatgtccttaaagcctggctcgacatcacccggggtaaggaaccgtatactaaaaaagctcttaagtatttcgaggaaggcctccaagatggcaatgatacattcgcgctgctgggaaaggcccagtgtctggagatgcgacagaactactctggggctttagaaactgttaaccagataatagtcaatttcccttctttcctgcctgcgtttgtaaagaagatgaagctgcagcttgccctccaggactgggaccagactgtagaaacagctcaaaggctactgctgcaggatagccagaatgtggaagcactcaggatgcaggctctctactacgtgtgtagagaaggtgatatcgaaaaagcctctaccaaactcgagaatctcggtaataccctggacgctatggagccgcagaacgcccagctcttctacaatattacgctggcttttagcagaacatgcggaaggtcccagcttatcctacaaaagatccagacacttcttgagcgcgcattctcactgaatcctcagcagtcagagtttgcgaccgaattggggtatcagatgattctgcagggacgtgtgaaagaagccttaaagtggtataaaacagcgatgaccctggacgagaccagtgtcagtgctctggtggggtttatccaatgccaactgatcgagggacagttgcaggacgccgaccagcagctggaatttttgaacgaaattcagcaatctattggcaagtccgccgagctgatctatcttcatgctgtgctggccatgaagaagaataagaggcaggaagaggtaattaatctcctgaacgacgttttagatactcacttcagtcagctcgaagggctgcctctcggcattcaatatttcgagaagctcaaccccgactttttgctggaaatcgtaatggagtacctttcattctgccccatgcagccagccagtccgggtcagcccctgtgtcccttattacgtcgttgcatttcagtgctggagaccgtggtaagaacagtaccgggacttctccaaaccgtgtttttaattgcaaaggtcaagtatttaagtggtgacatcgaagccgcattcaacaacctccagcattgtctggaacataacccctcatatgctgatgcccatcttctgctggctcaggtatacctgagtcaagagaaagtgaaactgtgctctcaaagccttgagctgtgcctcagctacgacttcaaggttcgcgattacccactctaccatctcataaaagcccagtctcaaaagaagatgggagagattgccgacgccattaagaccctgcatatggcaatgtccctccccggaatgaagcggattggcgcttcgactaagagtaaagataggaaaaccgaggttgacacctcacaccggctgagtatttttctcgaactaatcgatgtgcatcgtttaaatggagaacagcatgaggccacaaaggtcctgcaggacgctatccatgagttttcagggacgtccgaagaggtgcgtgtcacgatcgccaacgctgacttggcgctcgcccaaggcgatatcgagcgcgcattatcaatactgcagaatgttacggccgaacaaccctacttcattgaggcacgagagaagatggcggatatctatctgaagcaccgcaaggataagatgctatacattacttgctttcgcgagattgcagaacgaatggccaatccccgaagtttcctgctgctgggggatgcatatatgaacatcctcgaaccagaagaggctatcgtggcctacgaacaggctttgaaccagaacccaaaggatgggacccttgcttccaagatgggaaaggccctcattaagacccataactattccatggccatcacatactatgaagccgctctgaaaacagggcagaagaattatctatgctatgacctggctgagctgctcctcaagctgaagtggtacgataaggcggaaaaggtgttacagcacgcacttgcgcacgagcctgtgaacgagttaagcgcattaatggaggatggacggtgtcaggtcctgctggctaaggtttacagcaaaatggagaagcttggcgatgccatcaccgcactccagcaggcgcgtgagcttcaggctagggttctaaagagagtgcagatggagcagccagatgcggtgcccgcacagaagcatttagccgctgagatttgcgcagagatagcgaagcactctgtggcacagcgggattacgaaaaagctattaagttctacagggaggctctggtgcattgcgaaaccgataataagattatgctggagctcgccagactgtatttagcccaggacgaccctgattcatgcctgcggcagtgtgcgctcctgctgcaatcagaccaggataacgaagctgctacaatgatgatggcagacctcatgttcaggaagcaggattatgagcaggctgtatttcacttgcagcagctgctcgagaggaagcccgacaattatatgacgctgtcaaggctgatagatctgctgaggaggtgcgggaaacttgaggatgtcccaaggtttttctcaatggcggagaaaagaaatagccgagccaagctggaacccggattccagtattgtaaaggactctacctgtggtacactggtgagcccaacgacgctctgaggcattttaataaggccagaaaagaccgcgattgggggcaaaacgctctctataacatgattgaaatctgcctcaatccggacaacgagaccgtgggaggcgaagtctttgagaacctggatggtgatctgggcaatagtacagagaagcaggagtctgtgcagctggccgtgcggacagcagagaagctactaaaggagttgaagccacaaactgtgcagggacatgtgcaattacgtatcatggagaattactgtctgatggccactaaacaaaaatctaacgtggaacaggcacttaatacctttacagagatcgctgcttccgaaaaggagcacatccccgcacttctgggcatggccacagcctacatgattctcaaacagactccccgtgccagaaaccagctgaagagaatcgcgaaaatgaactggaatgcgatagacgctgaggaattcgagaaatcatggcttttgttggccgacatttacatacagtcagccaaatacgacatggccgaggatctgctcaagagatgtcttagacataatcggagttgctgtaaagcatacgaatatatgggctacataatggagaaagagcaagcatacactgatgctgccttgaattatgagatggcctggaagtacagtaatcgcactaatccagcagtaggttacaagctggcatttaattacctgaaagctaagcgctacgtcgattcaattgacatctgtcatcaggtattagaagcgcacccgacctatccgaaaatccggaaagacatcctagataaggccagagcgagtctgagaccctag

SEQ ID NO: 216665 - DNA, 5482 bp, Artificial Sequence
  derived and/or modified sequence
gcggcgcgaccccgcccctcccgctggggcccggggcgctagagcgctccgggaggctaggggagctgaattctgcgtcttcctttaggctgcggcgagacaatccccagagccccgcggcccggcctcggggcagccatggactcgcaggaattgaagactttgattaattactattgtcaagagagatatttccatcatgtattactggttgccagtgaaggaattaagaggtatggaagtgatccagtcttcaggttttatcatgcctatggcacattaatggaaggtaaaactcaagaagctcttcgagaatttgaggctattaaaaataaacaagatgtatcactttgttctctacttgcactgatatatgcccataaaatgagtcctaatccagatagagaagctattctggaatcagatgccagagtgaaggaacaacgtaaaggagctggagagaaagccttataccatgcaggcttatttttatggcacattggtcgccatgataaagcaagggaatatattgacagaatgatcaaaatatcagatggtagtaaacagggacacgttttgaaagcatggcttgatattacaagaggaaaagagccttacactaaaaaagcactgaagtattttgaagagggactccaagatgggaatgatacttttgctctgctgggtaaggcacaatgccttgagatgcgccagaattattcaggtgccctggagactgtgaaccagataatcgtgaattttccgagcttccttcctgcttttgttaagaaaatgaaattacaactagccttgcaggattgggaccagacagttgagacagcacaaaggttgctgctccaagatagccaaaatgtggaagcactgagaatgcaggcactctactatgtgtgtagagagggggatatagagaaggcttccaccaagctggaaaacttgggaaatacattggatgccatggaaccacagaatgctcaacttttctataacattacactcgccttcagcagaacttgtggacgtagtcaacttattcttcaaaaaattcaaacgttacttgagagagcttttagtttaaaccctcagcaatcagaatttgctacagaacttggataccaaatgattttacaaggaagagttaaagaggcactgaagtggtataagaccgccatgacacttgatgagactagtgtgtctgccctagttggatttatccaatgtcagttgatagaagggcaattacaggatgcagatcagcagctagaatttttaaatgaaatccagcaatccattggaaaatctgcggaattaatctatttacatgcagttcttgccatgaagaaaaataaacgacaagaagaagttattaatttgttaaatgatgtcctggacactcacttttcacaattagaaggtttgcctcttggcatacagtattttgaaaagctaaatcctgatttcttgttagaaattgttatggagtatctgagcttctgtccaatgcagcctgcaagtcctgggcaacctctttgtccacttctcaggcgttgcatctcagtcctggagactgtagtaagaactgttccaggtcttctgcaaacagtcttcctaatagcaaaagtgaaatatttgtcaggtgatattgaagcagctttcaataaccttcagcactgcttagaacacaatccctcttatgctgatgctcatctgctgctagctcaggtttacttgtctcaagaaaaagtcaaattgtgttctcagtctcttgaactttgtctgagctatgattttaaggtgagagactatcctttataccatttgataaaagctcagtcacaaaagaaaatgggagaaatagcagacgcaattaaaacactgcatatggcaatgagtttaccaggaatgaaaagaattggagcttccacaaaatcaaaagacagaaaaactgaagttgatacaagccatcgtttatcgatctttcttgaattgatagacgttcaccgcttaaatggagagcagcatgaggcaaccaaagttttacaagatgccatccatgaattttctggaacatctgaagaagtgcgggttaccattgctaatgcagaccttgctctagcccaaggagatattgaacgggctttaagcatccttcagaatgttacagccgaacagccttattttatagaggccagagaaaaaatggcagatatttatctgaagcacagaaaagataaaatgttatatatcacttgttttagagaaattgctgaaagaatggctaaccctcggtcttttcttctccttggtgatgcatacatgaatattctagagcctgaagaagccatagtagcatatgagcaagcattaaatcagaacccgaaagatggaacattggcaagcaaaatgggcaaagcacttatcaaaactcataactactcaatggcaatcacttactatgaagctgctctgaaaactggacaaaagaattatctttgctatgacctggctgagctcttattaaaattgaaatggtatgacaaagcagaaaaagttcttcagcatgctctggctcatgaacctgtaaatgaactgtcagctctcatggaggatggacgttgtcaagttcttctagcaaaagtttatagtaaaatggaaaaacttggtgatgcgatcactgcattacaacaggctcgagaattacaagctcgggtactaaaacgtgttcagatggaacagccagatgcagttcctgcacagaaacatttagcagctgaaatttgtgcagagattgcaaaacattctgttgctcagcgagactatgaaaaagcaattaagttttatagagaggctctggttcactgcgaaacagataataagattatgttggaactggcacgattatacctggcacaagatgaccctgattcctgcctgcggcagtgtgctctactgcttcagagtgaccaggataacgaagctgctaccatgatgatggctgatctcatgttcagaaaacaagactatgaacaagcagtgtttcatttacagcagcttttagaacgtaagccagataattatatgacattatctcgtttgattgatctcctaagaagatgtggaaaactcgaggatgtcccaagatttttctcaatggctgagaaacgtaactccagagcaaaattggaaccaggatttcagtattgtaaaggactgtatctttggtacactggagaaccaaatgatgcccttcgacattttaataaagctcggaaagatcgtgactggggccaaaatgccctttataatatgatagagatctgtttgaatccagataatgaaactgttggaggtgaagtatttgaaaacctggatggagacctgggtaattcaactgagaagcaagaatctgtgcaactggcagtaagaacagcagaaaaacttcttaaggaactaaaacctcagactgttcagggtcacgtacagcttcgcataatggaaaactattgcttaatggctaccaaacagaaatctaatgttgaacaagcattaaataccttcactgaaatagcagcatctgagaaggagcatatcccagcgctcttgggaatggcaacggcttatatgatcttgaaacagactccacgagccagaaaccagctgaagcgtattgcgaaaatgaattggaatgctattgatgctgaagagtttgagaagagttggctgctacttgctgatatttacattcaatcagcaaaatatgacatggcagaagacctgttaaaacggtgcctgcgtcataatagatcttgctgcaaagcttatgaatatatgggatacattatggaaaaagagcaagcatatacagatgctgccttgaactatgagatggcatggaaatatagcaatcggacaaatccggcagtaggatacaaactggcatttaattacttaaaagcaaaaagatatgtggattcaattgacatatgtcaccaggttcttgaagcacatccaacttatccaaaaatcagaaaggatatacttgataaggcccgtgcgtctttaagaccttgaaaataattttaacttaggtgttggtttaacaggaaatgaaagaaatctaactttcagttcttcctgttcaaaacaggtttgagctcagtgctttgttattagaagtatacccttttttctccagcagaggttgctgctgtacatcaagagaagtactatgtgaaattggtgtttcctaatggagttgaatgagagctggtctatttgactctgttttgattgggtacagatttggtgactctgtggtaaagactataattatttctataaagaatattttgttaaaatctaggtaattaaataccctgtatcttttctaaggaatattatttcaggaaatatatttaaaatgcattgttctcttttaaagtgtttttgttatattcttttatttatttatttatttttaaagacagagccttgatctgccgcccaggctggagtgcagtggcacgatcttggctcactgcaacctccgcctcctgggtttacgcgattctcctgcttcagcctcccgagtagctgggactaaaggcatgtgccatcacacccggctaattttttgtatttttagtagagatgggatttcaccgtgttagccaggaggggcttgatctcttgaccttgtgatccacctgcctcggcctcccaaagtgctgggattacaggcatgagccaccgcacccagcctgtttttgttgtattctgtgttgtttcaaaaattggaataaatctccctgtaaataactcatgaaaaagacaatatatatattttaaatatatattttaataaaggttttataaatagatgatttatattcctcttggaactcaaaagatgtggtaagttttgcaaatcagggtaagctccccctgcattctgtaatgttaatgggtggtggtatagtacagaaaatgtaactttcattgaaaaatcttttttagaaaagggtagagtgtgtgtttccctttcctttcttgagctcattcttcctgctttcaaggccattgtggtcttaagaaataatcaggtcctgaaacctcaatttaaataggtcccttattagggatatttaaccttagcctagaagacttggtctgcaggtataatttcagacactgtaacatttgatggtaaagggtgaccaaatacttttggtcagcagggagtcacaaagcacaccatgtgaaggcaacggtttacccagctctgtttaacagcaccctggcatagaagctttcactctcttacactaaatttaacctaatctaaacttaatccttagcattatttttaatttctcatctacatctttttcaattttccttaaaattgtagtaaacacagtcctcaattttatttgcatttacaataaacagtatttataagtca

SEQ ID NO: 216666 - protein, 1034 aa, Artificial Sequence
  derived and/or modified sequence
MAAATGAVAASAASGQAEGKKITDLRVIDLKSELKRRNLDITGVKTVLISRLKQAIEEEGGDPDNIELTVSTDTPNKKPTKGKGKKHEADELSGDASVEDDAFIKDCELENQEAHEQDGNDELKDSEEFGENEEENVHSKELLSAEENKRAHELIEAEGIEDIEKEDIESQEIEAQEGEDDTFLTAQDGEEEENEKDIAGSGDGTQEVSKPLPSEGSLAEADHTAHEEMEAHTTVKEAEDDNISVTIQAEDAITLDFDGDDLLETGKNVKITDSEASKPKDGQDAIAQSPEKESKDYEMNANHKDGKKEDCVKGDPVEKEARESSKKAESGDKEKDTLKKGPSSTGASGQAKSSSKESKDSKTSSKDDKGSTSSTSGSSGSSTKNIWVSGLSSNTKAADLKNLFGKYGKVLSAKVVTNARSPGAKCYGIVTMSSSTEVSRCIAHLHRTELHGQLISVEKVKGDPSKKEMKKENDEKSSSRSSGDKKNTSDRSSKTQASVKKEEKRSSEKSEKKESKDTKKIEGKDEKNDNGASGQTSESIKKSEEKKRISSKSPGHMVILDQTKGDHCRPSRRGRYEKIHGRSKEKERASLDKKRDKDYRRKEILPFEKMKEQRLREHLVRFERLRRAMELRRRREIAERERRERERIRIIREREERERLQRERERLEIERQKLERERMERERLERERIRIEQERRKEAERIAREREELRRQQQQLRYEQEKRNSLKRPRDVDHRRDDPYWSENKKLSLDTDARFGHGSDYSRQQNRFNDFDHRERGRFPESSAVQSSSFERRDRFVGQSEGKKARPTARREDPSFERYPKNFSDSRRNEPPPPRNELRESDRREVRGERDERRTVIIHDRPDITHPRHPREAGPNPSRPTSWKSEGSMSTDKRETRVERPERSGREVSGHSVRGAPPGNRSSASGYGSREGDRGVITDRGGGSQHYPEERHVVERHGRDTSGPRKEWHGPPSQGPSYHDTRRMGDGRAGAGMITQHSSNASPINRIVQISGNSMPRGSGSGFKPFKGGPPRRF

SEQ ID NO: 216667 - DNA, 3105 bp, Artificial Sequence
  derived and/or modified sequence
atggctgcagcgacaggagctgtcgcagccagcgctgcttctggacaggctgaggggaaaaagatcaccgacctgagagttattgatctgaagtccgaactgaaacgccggaatctcgatatcacaggggtgaagactgtgttgatcagcaggctgaagcaagcaatagaggaagagggaggtgacccagacaacatcgaactcaccgtctccacagatactcctaacaagaaaccaaccaaggggaaaggaaagaaacacgaggccgacgagctcagcggtgatgccagtgtagaagacgatgccttcattaaggactgcgaactggaaaaccaggaagcccatgaacaggacggtaacgatgaacttaaagactccgaggaatttggggaaaacgaagaggagaacgtacactccaaagagctcttgtctgccgaagagaacaaacgggctcacgaacttatagaagcggaggggattgaggatatcgaaaaggaagacatcgaatcgcaggagatcgaagcccaggagggcgaagatgatacctttctcacagcccaagacggggaggaggaggagaacgagaaagacatcgctggatctggcgacgggacccaggaagtgtccaagccactacccagcgagggctctctcgccgaggccgaccatactgctcacgaggaaatggaagctcacaccacagtcaaagaagccgaggatgacaatatctctgttaccatccaggccgaggatgccatcaccctggactttgacggtgatgacttgcttgagaccgggaagaatgttaaaattacggatagcgaagctagcaaaccgaaagatggccaggatgccatcgctcagtcgcccgaaaaagagagcaaggattatgagatgaacgcaaatcacaaagatgggaagaaagaggattgcgtgaagggcgatcctgttgaaaaggaagccagggagtccagcaagaaggctgagtcaggagacaaggaaaaagacactttaaagaagggcccctcatctaccggggcaagcggccaggccaagtcttccagcaaagagtcgaaagactcaaagacgtcaagtaaggatgacaagggttcgaccagctccactagtggctctagcggaagctcgaccaaaaatatctgggtttcaggactttcatctaacacgaaggcagcggacctgaagaatctcttcggaaagtacgggaaggtgctatctgcaaaagtggtaaccaatgcgcgcagcccaggcgcgaaatgttacggtatcgtaaccatgagctcatccaccgaggtctctagatgcattgctcacctccaccgtaccgagctgcatggccagctgatctccgtagagaaagttaaaggcgacccaagtaagaaagaaatgaaaaaggagaacgatgagaaaagtagttcaagatctagcggagacaagaaaaatactagcgaccggagtagtaagacgcaggcaagtgtaaaaaaggaggaaaagcgctcatccgagaaatccgaaaaaaaggagtctaaggataccaagaagatcgaggggaaagatgaaaagaatgacaatggcgcttccggacagacttccgaatcaatcaagaagagcgaagagaagaaaagaatcagctccaaatccccaggacacatggttatcctggatcaaacaaaaggtgaccattgtaggcctagtcgacgcggaagatacgagaagatccacgggaggagtaaagaaaaagaacgggcgagcctcgacaagaagcgtgataaggactacagaaggaaagagatcctacccttcgaaaaaatgaaggaacaacgcctgcgcgagcacctcgtaagatttgagcgcctgcgccgcgccatggaactgcgcagaagacgggagatcgccgaacgcgagcgcagggaacgagaacgcattcgcatcatcagggagcgggaggaaagggaaaggctacagcgggaacgggagcgcttagagatagaacgacaaaaactcgaacgtgagaggatggagcgggagcgtcttgagcgcgagagaatcaggattgaacaagagcggcgaaaggaagccgagcggattgcccgggaaagagaagagctcaggcgacagcagcaacagcttaggtatgagcaggagaagcgaaactctctcaagcggcccagagacgtggatcatagacgcgacgatccctactggagtgagaataaaaagctgtcattggataccgacgccagattcgggcacggctcagactactcacgacaacagaatagattcaatgatttcgaccatcgcgagcgcggtaggttcccagagtcgagtgctgtccagagctcctctttcgagaggagggatagatttgtggggcaaagcgaaggaaaaaaggccagaccgaccgctcgacgtgaggatccctctttcgaacggtacccgaagaatttctctgactcacggcgaaatgaacccccccctccccgaaacgaactcagggaatcagaccgcagagaagttagaggcgaaagggatgagcggaggactgtgattatacacgaccgacctgatataacccaccctagacatcctagagaagctggtccgaatccatcacggccgacttcctggaagtccgaaggatccatgtctacagacaaaagagagactcgcgttgagaggccagaacggagcggccgcgaggtgagtggccacagcgtgaggggggctcctccagggaataggtcctccgcttccggatacggctccagagagggcgaccgtggcgtcataacagacaggggcggcggatctcaacactacccagaagaacgacatgtcgtggagcgccatgggagggatacaagcgggccacggaaagaatggcatgggccacctagtcaggggccgtcctaccacgacacacgaagaatgggggatggccgggctggagctggcatgattacccaacattcctccaatgccagccctattaatcgcatcgtgcagatatcggggaactcaatgcctagaggaagtggctccggttttaagcctttcaagggaggtccacccagacgcttttag

SEQ ID NO: 216668 - DNA, 3105 bp, Artificial Sequence
  derived and/or modified sequence
atggctgctgccactggagctgtggccgccagcgctgccagcggccaggccgagggcaagaagatcacagacctgcgggtcatcgacctgaagtctgagctgaagagaagaaacctggacatcaccggggtgaagacagtgctgatcagccggctgaagcaggccatcgaggaggagggcggggaccctgacaacatcgagctgactgtgtccacagacacccccaacaagaagcccaccaagggcaagggcaagaagcatgaagcagatgagctgtctggagatgcctctgtggaggatgatgccttcatcaaggactgtgagctggagaaccaggaggcccacgagcaggatggaaatgatgagctgaaggacagcgaggagtttggagaaaatgaggaggagaatgtgcacagcaaggagctgctgtctgctgaggagaacaagagggcccacgagctgattgaagctgagggcattgaagatattgagaaggaggacatcgagagccaggagattgaggcccaggagggagaagatgacaccttcctgacagcccaggatggagaggaggaggagaatgagaaggacattgctggcagcggagatggcacccaggaggtgtccaagcccctgcccagcgagggcagcctggccgaggccgaccacacagcccacgaggagatggaggcccacaccaccgtgaaggaggctgaagatgacaacatctctgtgaccatccaggccgaggatgccatcaccctggactttgatggagatgacctgctggagaccgggaagaatgtgaagatcacagacagcgaggccagcaagcccaaggatggccaggatgccatcgcccagagccctgagaaggagagcaaggactatgagatgaatgccaaccacaaggatggcaagaaggaggactgtgtgaagggggaccctgtggagaaggaggcccgggagagcagcaagaaggccgagagcggggacaaggagaaggacaccctgaagaagggccccagcagcactggagccagcggccaggccaagagcagcagcaaggagagcaaggacagcaagaccagcagcaaggatgacaagggcagcaccagcagcaccagcggcagcagcggcagcagcaccaagaacatctgggtgtctggcctgagcagcaacaccaaggctgctgacctgaagaacctgtttgggaagtatggcaaggtgctgagcgccaaggtggtgaccaatgcccggagccctggggccaagtgctatggaattgtgaccatgagcagcagcacagaggtgagccgctgcatcgcccacctgcacaggacagagctgcacggccagctgatctctgtggagaaggtgaagggggaccccagcaagaaggagatgaagaaggaaaatgatgagaagagcagcagccgcagcagcggggacaagaagaacaccagtgacaggagcagcaagacccaggcctctgtgaagaaggaggagaagaggagcagcgagaagtctgagaagaaggagagcaaggacaccaagaagattgagggcaaggatgagaagaatgacaacggggccagcggccagaccagcgagagcatcaagaagtctgaggagaagaagaggatcagcagcaagagccctggccacatggtgatcctggaccagaccaagggggaccactgccggcccagccggcggggccgctatgagaagatccacggccgcagcaaggagaaggagcgggccagcctggacaagaagagggacaaggactacagaaggaaggagatcctgccctttgagaagatgaaggagcagaggctgcgggagcacctggtgcgctttgagcggctgcggcgggccatggagctgcggcggcggcgggagattgctgagcgggagcggcgggagcgggagcgcatccgcatcatccgggagcgggaggagcgggagcggctgcagcgggagcgggagcggctggagattgagcggcagaagctggagcgggagaggatggagcgggagcggctggagcgggagcgcatcagaattgagcaggagaggaggaaggaggccgagcgcatcgcccgggagcgggaggagctgcggcggcagcagcagcagctgcgctatgagcaggagaagaggaacagcctgaagaggcccagagatgtggaccacagaagagatgacccctactggagcgagaacaagaagctgagcctggacacagatgccaggtttggacatggcagtgactacagccggcagcagaaccgcttcaatgactttgaccaccgggagcggggccgcttccctgagagcagcgctgtgcagagcagcagctttgagcggcgggacagatttgtgggccagagcgagggcaagaaggcccggcccacagcccggcgggaggaccccagctttgagcgctaccccaagaacttcagtgacagcagaagaaatgaacctcctcctccaagaaatgagctgcgggagagtgacagaagagaggtgcggggggagagagatgaaagaagaactgtcatcatccatgacagaccagacatcacccaccccaggcacccccgggaggccggccccaaccccagccggcccacctcctggaagtctgagggctccatgagcacagacaagcgggagaccagggtggagaggcctgagaggagcggccgggaggtgtctggccacagcgtgcggggggcccctcctggcaacagaagcagcgccagcggctacggcagccgggagggggacagaggagtcatcacagacagaggaggcggcagccagcactacccagaggagcggcacgtggtggagagacatggccgggacaccagcggccccaggaaggagtggcacggcccccccagccagggccccagctaccatgacaccaggaggatgggagatggccgggccggggccggcatgatcacccagcacagcagcaatgccagccccatcaacagaattgtgcagatcagcggcaacagcatgccccggggcagcggcagcggcttcaagcccttcaagggcggccccccccggcgcttctag

SEQ ID NO: 216669 - DNA, 3105 bp, Artificial Sequence
  derived and/or modified sequence
atggccgccgccaccggcgccgtggccgccagcgccgccagcggccaggccgagggaaaaaagattactgaccttcgggtgatcgatctgaagtccgagctgaaaagacggaacttagatataacaggcgttaagacagtcctaattagccgccttaagcaggcaattgaagaagaggggggagaccctgataacatcgagttaactgtaagcaccgatacacccaataagaagccgactaagggcaaaggcaaaaaacatgaggcagatgagctcagcggtgacgcaagtgttgaggatgacgcatttattaaagattgcgaactggaaaaccaggaggcacatgagcaagatggcaacgacgagctgaaagattcagaagagtttggcgagaacgaggaagagaacgtgcactctaaagaactcttgtcagccgaggagaacaagcgggcgcacgaattgatagaggccgagggcattgaagacatcgagaaagaggacatcgagtctcaggagatcgaagctcaagaaggtgaagatgatacattccttactgctcaggatggtgaggaagaagagaacgaaaaggatatcgctgggtccggggatgggacccaggaagtctcgaaacctttacccagcgaagggagcctcgccgaggctgatcacacggctcacgaggagatggaggctcatacaaccgtaaaagaagcagaggatgataacattagcgttaccattcaggcagaagatgccatcaccctagattttgacggggatgatctcctggagaccggtaagaatgtgaaaattacagatagtgaggccagtaagcccaaggatggacaagacgcaatagcccagagtccagaaaaggaatcaaaagactacgaaatgaatgccaatcacaaggacggtaaaaaagaggactgtgttaaaggggatcccgtcgagaaagaggcacgggagagtagcaagaaagccgaaagcggtgataaggagaaagatacactcaaaaagggtccgtcatctactggcgctagtggacaggccaaatctagtagtaaagagagcaaggattccaagacctctagcaaggacgataaaggaagtacctccagcacctctgggtcttccgggtcctcgactaaaaatatttgggtctctgggctgagttctaacacaaaagccgcagatctgaagaacctgtttggcaagtacggcaaagtattgagtgcaaaggtggtcaccaatgcaaggtcccccggggccaagtgctatggaatcgttacaatgtcctcctctacggaggtgagcagatgcatcgcccatctgcaccggactgaactacacggacaactgattagtgtcgagaaggtaaaaggagaccctagtaaaaaggaaatgaaaaaagagaatgatgagaaaagctctagtcggtcgagcggcgataagaagaatacatctgatcgctcttctaagacacaagcctccgtgaagaaggaggagaagcggtcttcggagaaatccgagaagaaggagagcaaggatactaagaaaattgagggcaaggatgaaaagaatgataacggcgcgtctggacaaaccagcgagagtatcaagaagtctgaggagaagaaacggatcagcagcaagagccctggtcatatggtcattttggaccagaccaagggtgatcactgccgaccttcccgtagggggagatatgagaaaatccatggaaggtccaaagagaaagaacgtgcgagcctggacaaaaagagggataaggactaccgccgaaaagagattctcccctttgagaaaatgaaggagcagaggctccgggaacacctcgtgcgctttgagagattacggagggcaatggaactgcggagaaggagggaaatcgctgagcgagaacggcgcgagcgcgagagaatcaggataatccgcgaacgggaggagcgcgaacggcttcaacgcgaaagggaaaggctcgaaatcgaacgacagaaattagaaagagaacgcatggaacgtgagaggctggagcgggaacggataaggattgagcaggaacgtagaaaagaggcagagaggatcgcgcgggaacgggaagagctgaggaggcagcagcagcagcttcgttacgagcaagaaaagaggaactctctcaagaggcctcgcgatgttgaccaccgccgcgacgacccatattggagtgagaacaaaaagctctctctggataccgatgcccgatttggccatggctctgattatagcaggcagcagaataggttcaacgacttcgaccaccgcgaaagaggaagattccctgagtcaagcgccgtccaatctagctccttcgagagacgggaccgatttgtgggccaatcggaaggaaaaaaggcccgaccgacggcccgtagggaggatcccagcttcgagcggtacccgaagaacttcagcgacagtagacgaaatgaaccgccaccccctagaaatgaactgcgggagtctgatcgccgggaggtccgcggggaacgcgatgagaggaggactgttatcattcacgatagacctgacattacccacccacgacaccctcgcgaggcggggcctaacccctccagacccacgtcttggaagtcagagggttctatgagcacagataagcgggagactagagttgaacgtccagaacgaagcggacgcgaagtctccggccactccgtacgcggcgccccacccggcaaccgcagttcagcgtctgggtacggatccagggaaggggacagaggagtgattactgaccgtggtggcgggtcgcagcactatccagaggagagacatgtcgtggaacgacacggccgagacacctcgggtcctcgaaaggaatggcacgggcctccatctcagggtcctagctaccacgacactcggcgaatgggtgatggacgcgcaggggcaggaatgataacccagcatagtagcaatgcgtcccccatcaatcggattgtgcagatctctggaaactccatgccgcggggatcaggttccggatttaaacccttcaaaggcggacctccaaggcggttctag

SEQ ID NO: 216670 - DNA, 3105 bp, Artificial Sequence
  derived and/or modified sequence
atggctgctgccacaggagcggtcgccgcaagcgcagcttcgggccaggcagaaggtaaaaagatcactgaccttcgcgtgattgatctaaagagtgagcttaagcgcagaaacctggatataactggagtgaaaacggtgcttatttctaggttgaagcaggcgattgaagaggaagggggtgaccccgacaacattgaattaacggtttccactgatactccaaataaaaagcccacaaaaggcaaaggtaagaaacatgaggcagacgaattgtccggtgatgcctccgtggaagacgacgcgttcatcaaagattgcgaactggaaaaccaggaggcccacgagcaagacggcaatgatgagctgaaggatagcgaggaattcggggaaaacgaagaggaaaacgtgcactccaaagaattgctttctgcagaggaaaataaacgggcacatgagctgattgaggcagagggtatcgaggacattgagaaagaagatattgagagccaggaaatcgaggctcaggagggagaggatgatacatttctgactgcccaagatggagaagaggaggagaatgagaaagacatagccggatcaggggacgggactcaagaggtcagcaagcctctcccgagcgaggggtctctagctgaggcagaccatactgcacatgaggaaatggaagcccacacaacagtaaaagaggctgaggatgataacatttcagtcactatccaagcggaagatgctatcacactagattttgacggagacgaccttttagaaacagggaaaaacgtgaagatcacagactccgaggcttccaaacccaaggacggccaggatgcgatcgcacaatcaccagagaaggaatctaaggactacgaaatgaatgccaaccataaagacggtaaaaaggaggactgtgtgaaaggcgatcccgtggaaaaagaggctcgcgagtcttcaaagaaagcagaatccggggataaggaaaaagatactttgaagaaaggtccgagttccaccggtgcctcggggcaagccaagtccagctcgaaagagagtaaggattcaaaaacctccagcaaggatgacaaagggagtacttcctccacctctggatcaagtggaagcagtaccaagaatatctgggtctcagggttaagctccaataccaaggccgctgatttgaaaaacttattcgggaaatatggcaaagtcttgtctgccaaggttgtgacgaacgcaaggtcacctggagctaaatgttatggcatcgtcacgatgtcctcgagcactgaggtgagccggtgcatcgcccacctgcacaggactgaactgcatggccagctgatttccgttgagaaggttaagggcgatccctcgaagaaggaaatgaagaaggagaatgatgagaaatcctcttccaggtctagtggcgacaaaaagaatacgtctgacagatcatccaagacccaagcctccgtgaaaaaggaagagaagaggagtagtgagaagtctgagaagaaagagtcaaaggacaccaagaaaattgaagggaaagatgagaagaatgataacggcgcttcaggtcagacttccgagtctatcaagaaatctgaggaaaaaaagaggatctcctccaagtcaccagggcacatggtgatcctcgatcagactaagggggatcattgcaggcctagcagacggggacgctacgagaagatacatggaagaagtaaggaaaaggagcgagcatccctagacaagaagagggacaaagattatagacggaaagaaattctgccttttgagaagatgaaagagcagcgcctgagggagcatctcgttcggttcgaacgattgcgtcgcgcaatggaactccgccgtagacgagagattgccgagcgagaaagacgcgagcgcgagaggattaggatcatcagagagagggaagagagggaacgcctgcagcgcgagcgcgaacgattggagatagagcggcagaaattggagagggagaggatggagcgagagcgactggagagggagcgtatccggatcgaacaagagagaagaaaggaagccgaacgaatagccagggaacgtgaggaactgcggagacagcagcaacaactccgttacgagcaggaaaagcggaatagtctgaagagacctcgcgacgtggaccataggagggacgacccttactggagcgagaataagaaactttccctggacactgacgcgagattcggccacgggagcgactattctcgtcaacaaaaccgctttaacgatttcgaccatagagagcgaggcagatttcctgaatcatctgccgtccaatcttcttctttcgaacgtagggatcggtttgtcggacagtcagaagggaaaaaagctcgacccacagcaagaagagaagaccctagcttcgagaggtaccccaagaacttctcagatagccggaggaacgaacctccgcctccaagaaacgagttacgtgagagtgaccggagggaagtgaggggggagagggacgagcggaggactgtaattatccacgatagaccagacatcacacatcccaggcatccgagggaagccggaccgaatccctcgcgacccacttcctggaagtcagaagggagcatgtccaccgacaaaagggagacgcgggtagagcggccagaaaggagcggtagagaagtttccggacacagtgtgcggggtgcccctcccggtaataggtcatccgcttcgggctatggaagtagagagggcgacagaggagttatcaccgatcggggtggcggatctcagcactatccagaggagaggcatgtggtcgagcgacatggtcgcgacacctccggcccacggaaagaatggcacggcccaccttctcagggaccgtcttaccacgatactagacgaatgggcgacggcagagctggcgcaggaatgatcacgcagcattcctcaaacgcttccccgattaatcgtattgtccagatttctgggaactccatgccaagaggttctgggtctggctttaaaccatttaaagggggtccacctcgaagattttag

SEQ ID NO: 216671 - DNA, 3105 bp, Artificial Sequence
  derived and/or modified sequence
atggccgccgccaccggcgccgtggccgccagcgccgccagcggccaggccgagggcaagaagatcaccgacctgagagtgatcgacctgaagagcgagctgaagagaagaaacctggacatcaccggcgtgaagaccgtgctgatcagcagactgaagcaggccatcgaggaggagggcggcgaccccgacaacatcgagctgaccgtgagcaccgacacccccaacaagaagcccaccaagggcaagggcaagaagcacgaggccgacgagctgagcggcgacgccagcgtggaggacgacgccttcatcaaggactgcgagctggagaaccaggaggcccacgagcaggacggcaacgacgagctgaaggacagcgaggagttcggcgagaacgaggaggagaacgtgcacagcaaggagctgctgagcgccgaggagaacaagagagcccacgagctgatcgaggccgagggcatcgaggacatcgagaaggaggacatcgagagccaggagatcgaggcccaggagggcgaggacgacaccttcctgaccgcccaggacggcgaggaggaggagaacgagaaggacatcgccggcagcggcgacggcacccaggaggtgagcaagcccctgcccagcgagggcagcctggccgaggccgaccacaccgcccacgaggagatggaggcccacaccaccgtgaaggaggccgaggacgacaacatcagcgtgaccatccaggccgaggacgccatcaccctggacttcgacggcgacgacctgctggagaccggcaagaacgtgaagatcaccgacagcgaggccagcaagcccaaggacggccaggacgccatcgcccagagccccgagaaggagagcaaggactacgagatgaacgccaaccacaaggacggcaagaaggaggactgcgtgaagggcgaccccgtggagaaggaggccagagagagcagcaagaaggccgagagcggcgacaaggagaaggacaccctgaagaagggccccagcagcaccggcgccagcggccaggccaagagcagcagcaaggagagcaaggacagcaagaccagcagcaaggacgacaagggcagcaccagcagcaccagcggcagcagcggcagcagcaccaagaacatctgggtgagcggcctgagcagcaacaccaaggccgccgacctgaagaacctgttcggcaagtacggcaaggtgctgagcgccaaggtggtgaccaacgccagaagccccggcgccaagtgctacggcatcgtgaccatgagcagcagcaccgaggtgagcagatgcatcgcccacctgcacagaaccgagctgcacggccagctgatcagcgtggagaaggtgaagggcgaccccagcaagaaggagatgaagaaggagaacgacgagaagagcagcagcagaagcagcggcgacaagaagaacaccagcgacagaagcagcaagacccaggccagcgtgaagaaggaggagaagagaagcagcgagaagagcgagaagaaggagagcaaggacaccaagaagatcgagggcaaggacgagaagaacgacaacggcgccagcggccagaccagcgagagcatcaagaagagcgaggagaagaagagaatcagcagcaagagccccggccacatggtgatcctggaccagaccaagggcgaccactgcagacccagcagaagaggcagatacgagaagatccacggcagaagcaaggagaaggagagagccagcctggacaagaagagagacaaggactacagaagaaaggagatcctgcccttcgagaagatgaaggagcagagactgagagagcacctggtgagattcgagagactgagaagagccatggagctgagaagaagaagagagatcgccgagagagagagaagagagagagagagaatcagaatcatcagagagagagaggagagagagagactgcagagagagagagagagactggagatcgagagacagaagctggagagagagagaatggagagagagagactggagagagagagaatcagaatcgagcaggagagaagaaaggaggccgagagaatcgccagagagagagaggagctgagaagacagcagcagcagctgagatacgagcaggagaagagaaacagcctgaagagacccagagacgtggaccacagaagagacgacccctactggagcgagaacaagaagctgagcctggacaccgacgccagattcggccacggcagcgactacagcagacagcagaacagattcaacgacttcgaccacagagagagaggcagattccccgagagcagcgccgtgcagagcagcagcttcgagagaagagacagattcgtgggccagagcgagggcaagaaggccagacccaccgccagaagagaggaccccagcttcgagagataccccaagaacttcagcgacagcagaagaaacgagccccccccccccagaaacgagctgagagagagcgacagaagagaggtgagaggcgagagagacgagagaagaaccgtgatcatccacgacagacccgacatcacccaccccagacaccccagagaggccggccccaaccccagcagacccaccagctggaagagcgagggcagcatgagcaccgacaagagagagaccagagtggagagacccgagagaagcggcagagaggtgagcggccacagcgtgagaggcgccccccccggcaacagaagcagcgccagcggctacggcagcagagagggcgacagaggcgtgatcaccgacagaggcggcggcagccagcactaccccgaggagagacacgtggtggagagacacggcagagacaccagcggccccagaaaggagtggcacggcccccccagccagggccccagctaccacgacaccagaagaatgggcgacggcagagccggcgccggcatgatcacccagcacagcagcaacgccagccccatcaacagaatcgtgcagatcagcggcaacagcatgcccagaggcagcggcagcggcttcaagcccttcaagggcggcccccccagaagattctag

SEQ ID NO: 216672 - protein, 949 aa, Artificial Sequence
  derived and/or modified sequence
MILSLLFSLGGPLGWGLLGAWAQASSTSLSDLQSSRTPGVWKAEAEDTGKDPVGRNWCPYPMSKLVTLLALCKTEKFLIHSQQPCPQGAPDCQKVKVMYRMAHKPVYQVKQKVLTSLAWRCCPGYTGPNCEHHDSMAIPEPADPGDSHQEPQDGPVSFKPGHLAAVINEVEVQQEQQEHLLGDLQNDVHRVADSLPGLWKALPGNLTAAVMEANQTGHEFPDRSLEQVLLPHVDTFLQVHFSPIWRSFNQSLHSLTQAIRNLSLDVEANRQAISRVQDSAVARADFQELGAKFEAKVQENTQRVGQLRQDVEDRLHAQHFTLHRSISELQADVDTKLKRLHKAQEAPGTNGSLVLATPGAGARPEPDSLQARLGQLQRNLSELHMTTARREEELQYTLEDMRATLTRHVDEIKELYSESDETFDQISKVERQVEELQVNHTALRELRVILMEKSLIMEENKEEVERQLLELNLTLQHLQGGHADLIKYVKDCNCQKLYLDLDVIREGQRDATRALEETQVSLDERRQLDGSSLQALQNAVDAVSLAVDAHKAEGERARAATSRLRSQVQALDDEVGALKAAAAEARHEVRQLHSAFAALLEDALRHEAVLAALFGEEVLEEMSEQTPGPLPLSYEQIRVALQDAASGLQEQALGWDELAARVTALEQASEPPRPAEHLEPSHDAGREEAATTALAGLARELQSLSNDVKNVGRCCEAEAGAGAASLNASLHGLHNALFATQRSLEQHQRLFHSLFGNFQGLMEANVSLDLGKLQTMLSRKGKKQQKDLEAPRKRDKKEAEPLVDIRVTGPVPGALGAALWEAGSPVAFYASFSEGTAALQTVKFNTTYINIGSSYFPEHGYFRAPERGVYLFAVSVEFGPGPGTGQLVFGGHHRTPVCTTGQGSGSTATVFAMAELQKGERVWFELTQGSITKRSLSGTAFGGFLMFKT

SEQ ID NO: 216673 - DNA, 2850 bp, Artificial Sequence
  derived and/or modified sequence
atgatcctcagcctcctgttttcgctgggcggaccactcgggtggggtcttctgggcgcatgggcccaagctagctctacaagccttagcgatctacagagtagtcggactcctggagtgtggaaagccgaagcagaggacaccggaaaagatccagtgggtaggaactggtgcccctatcctatgtctaagctggttactctactggctctgtgtaaaaccgagaagtttctcattcatagccagcagccgtgcccacagggcgcacccgattgtcagaaagtgaaggttatgtatcgtatggcgcacaagccagtttaccaggtcaagcagaaagtacttacttccctggcatggcgctgctgtcctggctacaccgggccaaattgtgaacaccatgatagcatggcaattccagaacccgctgaccctggcgattctcatcaggaacctcaggacggtcccgtgtccttcaagcctggccacctggccgcagtcatcaatgaagtagaagtgcaacaggagcagcaggaacacctgctcggtgacctgcagaatgatgttcacagggtggcggacagtctaccgggtctgtggaaagctctgcccggtaacctcaccgcggcagtgatggaagcaaatcaaacaggccatgaatttcctgatcgctcactcgagcaagttttactgcctcacgtggataccttcctccaggtgcacttttcccccatctggcggagcttcaaccaaagcctgcacagcctcacacaggcgatcaggaatctgagtttggacgtggaagccaaccgccaggccatctccagggtccaggactccgcagtcgcaagggctgattttcaggaactcggagcaaaattcgaggccaaggtccaggaaaacactcagcgtgttggacagctgcggcaagacgtggaagaccgcctgcatgcccagcacttcacacttcacagaagtatctccgaactgcaagcagatgtggacactaagctaaaacgcctccacaaagcgcaagaagctcctggcactaatggatccctggttctggccacaccaggcgcaggtgccaggccagaacccgattctcttcaagcccgtctgggccagctccaacggaacctgtctgagctccacatgactaccgcccgtagggaggaggaactccagtacaccctggaggacatgcgcgctacgctgacgcgacacgtcgatgaaataaaggaactgtacagtgagagcgacgaaactttcgaccagatttctaaagtggagcgccaggttgaggaactgcaagtgaatcataccgccctgcgggagctgagggttatcctgatggaaaagagtttgatcatggaggagaacaaagaagaggtcgagcggcagttgctggagctgaaccttaccttgcagcacctgcaggggggtcatgccgacctgattaagtacgtgaaggactgcaactgccagaagctgtacttggatcttgatgttatcagagagggccagcgggacgctactcgcgctctggaggaaacgcaggtgtcactcgatgagaggagacagctcgatggctcctcactgcaggccttacagaacgccgtcgacgccgtgagtctagcagttgacgcacataaggctgagggcgagcgcgcacgtgctgctacttctaggctacgcagccaggtccaggccctcgatgacgaggtgggcgcactaaaggccgcagctgctgaagccaggcatgaggtgcgccagttgcatagcgccttcgcagcactgttagaggacgccctcagacacgaagcagtactcgcagctcttttcggcgaggaagtgctagaggaaatgtccgaacagacccctgggcctctgcccttatcttacgagcaaatccgtgtggctctgcaggatgcagcctctgggctgcaggagcaggcattagggtgggacgagttggctgccagggtgacagcccttgaacaggcatcagaacctcctcgacctgctgagcacctggagccatctcatgacgccggtcgcgaggaggccgcaactaccgccctagcgggacttgcgagggagctgcagtccctcagtaacgatgtgaagaacgtgggcagatgttgtgaggccgaggctggtgccggagcggcttcactcaacgcctccttgcacggattgcacaatgcgctgtttgccacccagagaagtctcgagcagcatcagaggttgtttcattccctatttgggaactttcaaggactcatggaggcgaacgtatcgcttgatctcgggaaattgcagactatgctctcaagaaagggcaagaaacaacagaaagatctagaggcaccaagaaaacgggacaagaaggaggcggagccactcgtggacatacgggttaccggccctgtacctggtgcccttggcgcagccttgtgggaagccggaagtcccgtggccttctacgctagcttcagcgaaggaacggcagccctacagaccgtgaaatttaacaccacttacatcaacatcgggtctagctattttcccgaacatggttactttcgcgcaccagagcgaggcgtctatcttttcgccgtctcggtggaattcggccctgggccaggtacaggacagctggtgtttggtggccaccaccgcacgcctgtctgtacaactggacaggggagcggatcaaccgctaccgtgttcgctatggcagaactccagaaaggtgaacgtgtctggtttgagctgacccaaggaagcattaccaagcgcagtctctcaggcacagccttcggcggttttctgatgttcaagacctag

SEQ ID NO: 216674 - DNA, 2184 bp, Artificial Sequence
  derived and/or modified sequence
atgatactgagtctactctttagcctcggaggtcctctcggctggggccttcttggggcatgggcccaggcctcttctacgagtctcagcgatctccagtcttcacgaacacctggcgtttggaaagcagaggctgaagacactgggaaagatccagtgggtcggaactggtgcccataccccatgagtaagttagtgaccctgctggccctgtgtaagaccgaaaagtttctcatacattcacagcagccctgccctcagggtgcccctgactgtcagaaggtcaaggtgatgtacaggatggcgcacaaacctgtttaccaggtgaaacagaaagtcttgacctccttagcatggcgatgttgtccagggtacacaggcccaaactgcgagcatcatggtccgatggcagtttggtgttggccagaacccgattctctgcaggcaagactggggcagctccagcgaaatctcagcgaactgcacatgacaactgcacggcgagaggaggagctccagtataccctggaagacatgcgggctacccttacccggcatgtggatgaaataaaggagctgtactctgagtccgatgagacctttgaccaaatctccaaggtcgagcgacaggtggaagagcttcaggtcaaccacaccgcactgcgcgaactgagagtcatcctgatggagaagagcctgataatggaggagaacaaggaggaagtcgaacggcagctgctggagctcaacctgaccctccagcatcttcagggcggacatgcagacttaataaagtatgtgaaggactgtaactgccagaagctctatttggatctcgatgtcatccgtgaaggccagagagatgccaccagagcattggaggaaactcaggtgtctcttgatgaacgacggcagctagatggttcctctctgcaggctctccaaaatgcagttgacgccgtcagcttagctgttgatgctcataaagccgagggagaaagggctcgcgctgcaacttctcgcctcagatcccaagtgcaggccttggatgacgaggtgggcgcacttaaagccgctgcagcagaggccagacacgaggttcggcagctgcattctgctttcgcggctctgctggaggatgccctccgccatgaggccgtccttgccgctttattcggtgaggaggtactggaagaaatgtccgagcagacacccggtccacttcccctcagttatgaacaaatccgagtggccttgcaagacgcagcatcagggttacaggagcaggctctcggctgggatgagttggccgctcgtgtgaccgccctcgaacaggcgtctgaaccaccacggcctgccgagcacctggagccttcccacgacgcaggtagggaagaggccgcaactaccgctcttgctggtctggcacgtgaattacagagcttgtcaaacgacgtgaaaaacgtgggcagatgctgcgaagcagaggcaggcgcaggtgccgcatccctgaacgcaagtctccacggtctgcacaatgccctattcgcaacccagcgttcgttagagcagcaccaacgactgtttcatagtctcttcggaaacttccagggcctcatggaagctaacgttagtctcgatctcggcaaactgcagactatgctgtccaggaaaggcaagaaacagcagaaagatctggaagctcctcgcaagcgagataaaaaagaggcagagccactggtggacataagagtgacggggccagtgcccggtgctttaggcgctgctttgtgggaggcaggatccccagtggcattttacgcaagcttttctgagggcacagctgctttacagaccgtgaagttcaatacaacatacatcaacattgggtcttcctacttcccagagcatggatattttagggcccctgagagaggggtctacctttttgcagtcagtgtggaattcgggcctggtcccggaaccggccagttggtcttcggaggtcatcacaggacgccagtgtgtactactggacaggggtccggctctacagccacggtattcgccatggccgaactgcagaaaggcgagcgagtgtggttcgagttaacacaagggtcaattacgaagcggagtctttcagggactgcttttggaggcttcttaatgtttaaaacctag

SEQ ID NO: 216675 - DNA, 2850 bp, Artificial Sequence
  derived and/or modified sequence
atgatcctaagcctgttgttttcacttggcggacctctgggctggggtctgttaggggcttgggctcaggcatctagcacatcactttcggacctgcagtctagccgcacacccggagtgtggaaggcagaggcggaagacaccggcaaggatccagttgggcggaattggtgtccgtaccccatgtctaaattagtcacactgctcgccctgtgtaagactgagaaatttctgatccactctcagcaaccttgcccacaaggtgcgcctgactgtcagaaagtgaaagttatgtacagaatggcccataagcctgtctaccaagtgaagcaaaaggttcttactagcctcgcctggcgttgttgtcccggttataccggccccaattgtgaacaccatgattccatggcaattcccgagcccgccgatcccggagattctcaccaggagccccaggacggacccgtgtcattcaagcccggacacttagctgcagtgatcaacgaggtcgaggtacaacaggaacagcaggagcacctgctgggggatttgcagaacgatgtccatagggttgcagattcactccctggactctggaaagcgctgccggggaatcttaccgctgcagtgatggaagccaaccagacaggtcacgagttcccggatagatcgttagaacaggtcctgttgccccacgtagataccttcctgcaagttcacttttcaccaatatggcggagcttcaatcaatccctgcacagcttaactcaggccattcggaatctttccttggatgtggaggctaatcgtcaggctatatcacgtgtccaagatagcgcagttgccagggctgacttccaggagttgggagctaaatttgaagccaaagtccaggaaaatacacaacgggtgggacagctgaggcaggatgtagaggaccggctgcacgcccagcacttcacactgcacaggtccattagcgagttgcaggcagacgttgataccaaactcaaaagattacacaaggcccaggaagcccctggaaccaacggatctttggtgctggccaccccgggcgccggggcacgccccgagcccgacagcctccaggcaagactgggccagctgcaaaggaatttgtccgagttacacatgacaactgctcgtcgcgaagaggagcttcaatacactctcgaggacatgcgcgccactttgacccggcacgtggacgaaattaaggagctttattcagaatctgacgaaacttttgaccagatttcaaaggttgaaagacaggtggaggagttacaggtgaaccacacagcactaagagaacttcgggtgatcctgatggaaaagtccctgatcatggaagaaaataaggaagaggtcgaacgtcagctgctggaactgaatttgaccctgcaacacctccagggggggcacgcggatctcatcaaatatgtgaaagattgcaactgccaaaagctctacctagacctggatgtcattcgcgaaggccaacgagacgccacaagggcactggaggagacgcaggtgtccttggacgagaggcgtcagctggatggctcatcactacaagccttgcagaacgccgtggacgccgtttctctcgccgttgacgcccacaaggctgaaggtgagcgggctcgggctgccacaagtcgattgcgatctcaggtgcaagcattggacgatgaagtcggggcactcaaggctgctgctgcagaagcacgccatgaagtgcgacagctacattccgcctttgccgcattgctcgaggacgccctccgccatgaggccgtcctggccgcacttttcggcgaggaggtgttagaagagatgtctgagcagactccgggacctctcccactgtcctacgagcagatccgggtggccctgcaagacgctgcaagcggtctccaggaacaggccttgggctgggatgaactcgccgctcgtgtcacagcactcgaacaggcttcagagcccccccggcccgctgaacaccttgagccaagccacgatgctggccgggaagaagctgccactactgccttagccggtctcgccagggaacttcaaagcctatcgaacgacgttaagaatgttggacgctgctgcgaggcagaggcgggggccggcgctgcttctctgaatgcgagcctccatgggcttcacaatgcactgtttgcgacccagcgctcgctggaacaacaccaaaggctgttccattccctgttcggcaattttcaagggttgatggaggctaatgtcagtctggatctgggcaaactccagacaatgttatctcgaaaggggaaaaagcagcagaaagatctcgaggcaccccggaagcgcgataagaaggaggccgaacccctagtcgacataagagtcaccggccctgtgcctggagctctgggagccgccctgtgggaagcaggatcccctgtagcattttatgcatcgttcagcgaagggaccgccgctttgcaaaccgtcaagtttaataccacctatatcaacattggtagttcctactttcctgaacatggctactttcgagcacctgaacgcggtgtgtacctgttcgctgtgagcgtggagttcggacctggacccgggacgggccagctggtcttcggcggacatcataggacacctgtgtgtacgactgggcagggaagtggctccactgctacagtcttcgccatggccgaactccagaaaggggaacgcgtgtggtttgaactgacacaaggctcaattaccaaacgctccctgtctggtactgcttttgggggctttctcatgttcaaaacctag

SEQ ID NO: 216676 - DNA, 2184 bp, Artificial Sequence
  derived and/or modified sequence
atgattctgtcacttcttttcagcctcggaggaccccttggctggggactgctcggggcatgggcccaggcctcatctaccagcctctccgatttacagtcttcgcggacccctggggtctggaaagccgaggcggaagacacaggcaaagaccccgtaggaagaaactggtgcccctatccaatgtcaaaactggtgactctgctcgcgttgtgcaagaccgagaagtttctgatccactctcaacagccttgtccccagggagccccggattgtcagaaggttaaggtgatgtatagaatggcccataagccggtgtatcaggtgaagcagaaggtgctgacaagcttagcctggcgatgttgccccggttacacaggcccgaactgcgaacaccacggaccgatggctgtatggtgctggcccgaacctgatagtcttcaggccaggctcggccagttgcagagaaacctgagcgaactgcacatgacgaccgcccgaagggaagaagagttgcagtatacattagaagacatgcgcgccactctcacccgtcatgtggacgaaattaaggagctgtactcagaatcagatgaaacattcgaccaaatctccaaagtcgaaaggcaggtcgaagaactccaggtcaaccacacagccctgcgagaactccgcgtgatcctgatggaaaagtctctcatcatggaggaaaataaagaagaggtcgagcgacagctgcttgaattaaaccttacccttcagcatttgcagggcggacatgcggatcttataaaatatgtgaaagactgtaattgtcagaagttgtaccttgatctcgatgtgattagagaaggccaacgcgacgccaccagggcactggaagagacacaggttagcctagacgaaaggcggcaactggacggttcttctctgcaagcattacagaacgccgtagacgctgtatccctggctgtggacgcccataaggctgaaggtgagagagccagggctgcaacatcacgcctgcggtcgcaagtgcaggcgttggacgatgaagtgggtgcattaaaagcagcagccgcggaggcgcgacacgaggtgcgccaattgcattcagccttcgcagcccttctagaagacgcactaaggcacgaagccgtgctcgcagcactttttggggaagaagtcctcgaggagatgagcgaacagactcccggtccactgccacttagctacgagcagatacgtgtcgccctgcaggacgccgccagtggactgcaggaacaggccctcgggtgggacgagcttgccgctagagtaacggcactggagcaagccagcgagccacctagaccggctgaacatttagaaccttcacatgacgcaggccgcgaggaagcagctacgaccgcactggccggtttggcccgtgaactgcagtctttatccaatgatgtaaaaaacgtgggccgttgttgcgaagctgaggccggcgcaggtgctgcctcattgaatgcctcactgcacggactacacaatgctctgttcgcgacccaacgatccctggagcagcaccagaggctgtttcactctctgttcgggaacttccaggggctgatggaggccaatgtgtctttagacctgggtaaattgcaaacaatgctaagccgcaaaggaaagaagcagcagaaagacttagaagccccacggaagcgagataagaaagaagccgagcccctcgtcgatatccgtgtgacaggtcctgtccccggtgccctgggcgccgctctgtgggaggctggttctcctgtggcgttctacgctagtttcagcgagggtaccgctgcacttcagactgtaaagttcaacactacttacattaacattggcagcagctatttcccagaacacgggtactttcgcgcgccagaacgtggcgtgtaccttttcgcggtgtctgtcgaattcgggcctggtcccggaaccggacagttagtgtttggaggacaccatcgaaccccagtatgtactactggccagggaagtggctctactgccacagtgttcgcaatggccgaacttcagaagggagagagggtgtggttcgaattaactcaagggagcatcactaagagaagccttagcggtaccgccttcggcggtttcctcatgtttaagacttag

SEQ ID NO: 216677 - DNA, 3511 bp, Artificial Sequence
  derived and/or modified sequence
acttcctctctttgttgtcctcgtattttcttttcctcctgagatttaacttgaagacaacgtcactagcagtttctggagctacttgccaaggctgagtgtgagctgagcctgccccaccaccaagatgatcctgagcttgctgttcagccttgggggccccctgggctgggggctgctgggggcatgggcccaggcttccagtactagcctctctgatctgcagagctccaggacacctggggtctggaaggcagaggctgaggacaccggcaaggaccccgtaggacgtaactggtgcccctacccaatgtccaagctggtcaccttactagctctttgcaaaacagagaaattcctcatccactcgcagcagccgtgtccgcagggagctccagactgccagaaagtcaaagtcatgtaccgcatggcccacaagccagtgtaccaggtcaagcagaaggtgctgacctctttggcctggaggtgctgccctggctacacgggccccaactgcgagcaccacggaccaatggcagtctggtgttggcctgagccggacagcctgcaggccaggctgggccagctgcagaggaacctctcagagctgcacatgaccacggcccgcagggaggaggagttgcagtacaccctggaggacatgagggccaccctgacccggcacgtggatgagatcaaggaactgtactccgaatcggacgagactttcgatcagattagcaaggtggagcggcaggtggaggagctgcaggtgaaccacacggcgctccgtgagctgcgcgtgatcctgatggagaagtctctgatcatggaggagaacaaggaggaggtggagcggcagctcctggagctcaacctcacgctgcagcacctgcagggtggccatgccgacctcatcaagtacgtgaaggactgcaattgccagaagctctatttagacctggacgtcatccgggagggccagagggacgccacgcgtgccctggaggagacccaggtgagcctggacgagcggcggcagctggacggctcctccctgcaggccctgcagaacgccgtggacgccgtgtcgctggccgtggacgcgcacaaagcggagggcgagcgggcgcgggcggccacgtcgcggctccggagccaagtgcaggcgctggatgacgaggtgggcgcgctgaaggcggccgcggccgaggcccgccacgaggtgcgccagctgcacagcgccttcgccgccctgctggaggacgcgctgcggcacgaggcggtgctggccgcgctcttcggggaggaggtgctggaggagatgtctgagcagacgccgggaccgctgcccctgagctacgagcagatccgcgtggccctgcaggacgccgctagcgggctgcaggagcaggcgctcggctgggacgagctggccgcccgagtgacggccctggagcaggcctcggagcccccgcggccggcagagcacctggagcccagccacgacgcgggccgcgaggaggccgccaccaccgccctggccgggctggcgcgggagctccagagcctgagcaacgacgtcaagaatgtcgggcggtgctgcgaggccgaggccggggccggggccgcctccctcaacgcctcccttcacggcctccacaacgcactcttcgccactcagcgcagcttggagcagcaccagcggctcttccacagcctctttgggaacttccaagggctcatggaagccaacgtcagcctggacctggggaagctgcagaccatgctgagcaggaaagggaagaagcagcagaaagacctggaagctccccggaagagggacaagaaggaagcggagcctttggtggacatacgggtcacagggcctgtgccaggtgccttgggcgcggcgctctgggaggcaggatcccctgtggccttctatgccagcttttcagaagggacggctgccctgcagacagtgaagttcaacaccacatacatcaacattggcagcagctacttccctgaacatggctacttccgagcccctgagcgtggtgtctacctgtttgcagtgagcgttgaatttggcccagggccaggcaccgggcagctggtgtttggaggtcaccatcggactccagtctgtaccactgggcaggggagtggaagcacagcaacggtctttgccatggctgagctgcagaagggtgagcgagtatggtttgagttaacccagggatcaataacaaagagaagcctgtcgggcactgcatttgggggcttcctgatgtttaagacctgaaccccagccccaatctgatcagacatcatggactcgcccagctctcctcggcctggggctctggccaaggatgggctggaggtcattcagttggtctgtctcttccctggaaaccttctgcaaagatggtgtggtgtacgtggcttccctgtaaccacatggggcttggccatttctccatgatgagaaggactggaatgcttctccgggcaggacatggtcctaggaagcctgaaccttggcttggcatgccttctcagacagcacggcctgggctccaactcttcaccacaccctgtattctacaacttctttggtgttttgctcctcctgtggttggaaacttctgtacaacactttaaacttttctcttgcttcctcttctcttctcccttatcgtatgatagaaagacattcttccccaggaggaatgtttaaaatggaggcaacattttggccaacattggaaagcactagagggcaatgggattaaaccaacctgcttggtctctattagtcagtaatgaagacgacagcctggccaaccaagggaaaggaaattagtatctttagtttcagtcattccttgtaggatatggtttagctgtgcccccacctaaaatatcatcttgaattgtaatccctataatccccacatcaagggagagatcaggtggaggtaattggatcttgggggcggttcccccatgctgttcttgtgatagttctcacgagatctgatgattttataagtttgatagttcctcctgtgttcattctccttcctgccaccttgtgaagatgccttggttcctcttcactgtctgccatgattgtaagtttcctgaggcctccccagccatgtggaacagtgagtcaattaaacctctttcctttataaattatccagtcttgggcaattcttgatagcagtgtgaaaatggactaatacacttgtgtttatctgtaatttaaatttcatgtctttttctccttgccttacatagggtaaagaccaagaaatgccaaacgtgaactaaaatatgtagggccttcaacttttttacttcctccagtatcttaggaccatcgtaattcttgttagcatctctaaccaggaggcagctgagggaggagggaaagaagactgtaaaaatccccctcactaatgatcaactttggaataaagtgatgcccttc

SEQ ID NO: 216678 - DNA, 2850 bp, Artificial Sequence
  derived and/or modified sequence
atgatcctgtccctcctattttccctcggcggccctcttggttggggcctgctaggcgcctgggcccaggcctcatctacctcactgtcagatttacaatcaagtcgcacacctggagtttggaaggcagaggcggaggatactggcaaagatccagtgggtcgcaactggtgcccctacccaatgtctaaactggtcacccttttagccctgtgcaagacagaaaaatttttgattcactcccaacaaccttgtccgcagggagcccctgattgccagaaagtaaaggtgatgtatagaatggcccataagcctgtctaccaagtgaagcaaaaggttcttactagcctcgcctggcgttgttgtcccggttataccggccccaattgtgaacaccatgattccatggcaattcccgagcccgccgatcccggagattctcaccaggagccccaggacggacccgtgtcattcaagcccggacacttagctgcagtgatcaacgaggtcgaggtacaacaggaacagcaggagcacctgctgggggatttgcagaacgatgtccatagggttgcagattcactccctggactctggaaagcgctgccggggaatcttaccgctgcagtgatggaagccaaccagacaggtcacgagttcccggatagatcgttagaacaggtcctgttgccccacgtagataccttcctgcaagttcacttttcaccaatatggcggagcttcaatcaatccctgcacagcttaactcaggccattcggaatctttccttggatgtggaggctaatcgtcaggctatatcacgtgtccaagatagcgcagttgccagggctgacttccaggagttgggagctaaatttgaagccaaagtccaggaaaatacacagcgtgtgggacagctacgacaggatgtggaggatcgtctccacgctcagcactttacattacaccgatccattagtgaactccaagcagatgtggacacaaagctcaagcggctacacaaggcacaggaggcccctgggacaaatggttctctagtgctcgcgaccccaggagccggggcaaggcccgaacccgactctctccaggcccgcttaggacaacttcagagaaatctgtccgaattacacatgaccaccgcgcggcgtgaggaagagcttcaatacaccttagaagacatgagagctacactgaccaggcacgtggacgagataaaggagctttactccgaatctgacgaaactttcgatcaaattagcaaggtcgagcgacaggtggaagagctccaggtcaaccataccgcacttcgcgagctgagagtaatcctgatggaaaagagcctgataatggaagagaacaaagaggaagtagaacgtcaactgctggaactgaacctgaccttacagcacttacagggcggtcatgccgatctgataaagtacgttaaagattgcaattgccagaaactgtacctggacctcgatgtgatcagggaaggacagagagacgctacccgggccctcgaggaaacccaagtctcacttgatgagagacgccaacttgatggttcctctttgcaggccctccaaaacgctgtcgatgcagttagcctggctgttgatgcccataaagcagagggtgagagagctcgggccgccacatcaagactccgctctcaagtccaggctcttgatgacgaagtgggggcgctgaaagcagcagccgccgaggcacgccacgaagtccgccaactccattcagcgtttgccgccttactcgaagacgcactgcgccacgaagcggtgttggcagccctctttggcgaagaagtgctcgaagagatgagcgagcagacacccggacctttacctttaagctatgaacagatcagggtcgcactccaagatgccgcgtctggtttgcaagagcaggcactcggctgggatgaactggccgctcgcgtaacggcgttggagcaggcatcagagcccccccgtccggccgaacacctcgaaccttcacacgatgcaggtagagaagaggcagcaaccaccgcactggctggcctggcgagagagctacagtctctatccaacgatgtgaaaaatgtgggccgctgctgtgaggcagaagccggagccggggccgccagcctcaacgctagcttgcacggactccataatgcattattcgcaacacagcgctcactggagcaacaccagagacttttccactcactcttcggtaactttcaagggctgatggaggcgaacgtgtctttagacctaggtaaacttcagacaatgttaagcagaaaagggaagaagcagcagaaggatttagaagccccccgtaagcgggacaaaaaggaagcggagcccttggttgacatccgcgttacaggcccggtgccgggcgcccttggtgctgcactctgggaagctggcagtccagtcgcattctacgcctcattttctgagggaacggcagccctccagacagtgaaatttaacaccacatatatcaacataggatctagttacttccctgagcatggatattttcgtgcccctgagcgtggcgtttatctgtttgcagtgtcagttgaattcggccccggcccaggaaccggacagctggtgtttggtgggcaccacagaactcccgtatgcaccaccgggcaaggcagcgggagtacagcaaccgtcttcgctatggctgaattacagaagggagaaagagtatggttcgagctcactcagggatctataactaaacggtctttgtccggcacagcttttggtggctttcttatgttcaagacctag

SEQ ID NO: 216679 - DNA, 2184 bp, Artificial Sequence
  derived and/or modified sequence
atgattttgagcctactattttcgttgggcggcccgctcgggtggggactgctaggagcttgggcccaggctagctccacttccctgtctgatcttcagtcgtcacgcacccccggcgtgtggaaagcggaagccgaagataccggcaaagatccagtcggtaggaactggtgcccctatccaatgtcaaaactggtgaccctgttagccctgtgtaagaccgaaaaatttctgattcactctcaacagccttgtccacagggagcgccggactgtcagaaagtgaaagtaatgtaccgcatggcacataagcctgtctaccaggttaaacaaaaggtgctgacatccctagcttggagatgttgtccaggatatactggtccaaattgtgaacatcatggacccatggcagtgtggtgttggcctgaaccagattcgctccaggctagactcggacaactccaacgcaatctgtcagaactgcacatgaccaccgcccgccgggaagaggaattgcaatatacgttggaagacatgcgcgccactttgactaggcatgttgatgagattaaagagctctatagtgaaagcgatgagacattcgatcagatttccaaggttgaacgtcaagtggaggagctccaggttaatcacactgcgttacgggaacttagagtgatcctcatggagaaatctttaatcatggaagaaaacaaagaagaggtggagagacagttactcgaactgaatttgactctgcaacatctccagggaggccacgccgacctaattaagtacgtcaaggattgcaattgccagaagctatatttagacctcgatgtgatacgcgaaggacaacgggacgctacccgcgctctcgaagaaacccaggtaagcctcgatgagagaagacaactggatggaagcagcctgcaagccttacaaaacgcagtggacgccgtgagcctcgccgtcgacgcacataaggctgagggagaaagggcacgtgcagccacctctcgactgaggagccaggttcaggctttggatgacgaagttggagcgttgaaggctgcagccgccgaagcaagacatgaggttagacagttgcattctgccttcgctgcgctgcttgaagatgcattgcgccacgaggcagtgttggccgcactgttcggagaggaagtgctagaggagatgagtgagcagacaccgggtcctttgcccttgagctacgaacagatccgcgttgccctccaggacgcagcatcgggtttgcaagagcaagccttagggtgggacgaattagccgcaagagtgaccgccctggagcaagcctccgagcccccaagacccgctgaacatctagagccctcccatgacgcgggaagagaggaggctgccacaactgcactagccggcctagccagagaattacaaagcttaagcaacgacgtgaagaacgttggccgatgttgcgaagccgaagccggggccggggccgcttcattaaacgctagcttacatggactccataatgccctgttcgctacgcaacggtcactagaacaacaccaaagacttttccattcactgttcggcaattttcagggactgatggaggccaacgtcagtctggacctggggaaactccaaaccatgctttccagaaagggcaagaaacagcagaaggacctcgaagcaccaagaaagcgggacaaaaaagaggccgaacccttagtggatatcagagtcaccggcccagtgccaggagctctcggagctgccctctgggaggctggttctccagtggccttttacgcctcattcagcgagggaaccgcagcactgcagaccgtgaagttcaatactacatatatcaatataggctcctcttactttcccgaacacggatatttcagggcaccggaaaggggcgtctacttattcgctgtgagtgtcgaattcggtcccggtcctggtacagggcagttggtatttggtgggcaccacagaacccctgtttgtactaccggtcagggctcaggctccacagccaccgttttcgcaatggcagaacttcagaaaggagagagggtgtggttcgaattgacacaagggtctatcactaagagatcactatccggcacggcctttggaggcttcctgatgtttaagacgtag

SEQ ID NO: 216680 - DNA, 2850 bp, Artificial Sequence
  derived and/or modified sequence
atgatcctgagcctgctgttcagcctgggcggccccctgggctggggcctgctgggcgcctgggcccaggccagcagcaccagcctgagcgacctgcagagcagcagaacccccggcgtgtggaaggccgaggccgaggacaccggcaaggaccccgtgggcagaaactggtgcccctaccccatgagcaagctggtgaccctgctggccctgtgcaagaccgagaagttcctgatccacagccagcagccctgcccccagggcgcccccgactgccagaaggtgaaggtgatgtacagaatggcccacaagcccgtgtaccaggtgaagcagaaggtgctgaccagcctggcctggagatgctgccccggctacaccggccccaactgcgagcaccacgacagcatggccatccccgagcccgccgaccccggcgacagccaccaggagccccaggacggccccgtgagcttcaagcccggccacctggccgccgtgatcaacgaggtggaggtgcagcaggagcagcaggagcacctgctgggcgacctgcagaacgacgtgcacagagtggccgacagcctgcccggcctgtggaaggccctgcccggcaacctgaccgccgccgtgatggaggccaaccagaccggccacgagttccccgacagaagcctggagcaggtgctgctgccccacgtggacaccttcctgcaggtgcacttcagccccatctggagaagcttcaaccagagcctgcacagcctgacccaggccatcagaaacctgagcctggacgtggaggccaacagacaggccatcagcagagtgcaggacagcgccgtggccagagccgacttccaggagctgggcgccaagttcgaggccaaggtgcaggagaacacccagagagtgggccagctgagacaggacgtggaggacagactgcacgcccagcacttcaccctgcacagaagcatcagcgagctgcaggccgacgtggacaccaagctgaagagactgcacaaggcccaggaggcccccggcaccaacggcagcctggtgctggccacccccggcgccggcgccagacccgagcccgacagcctgcaggccagactgggccagctgcagagaaacctgagcgagctgcacatgaccaccgccagaagagaggaggagctgcagtacaccctggaggacatgagagccaccctgaccagacacgtggacgagatcaaggagctgtacagcgagagcgacgagaccttcgaccagatcagcaaggtggagagacaggtggaggagctgcaggtgaaccacaccgccctgagagagctgagagtgatcctgatggagaagagcctgatcatggaggagaacaaggaggaggtggagagacagctgctggagctgaacctgaccctgcagcacctgcagggcggccacgccgacctgatcaagtacgtgaaggactgcaactgccagaagctgtacctggacctggacgtgatcagagagggccagagagacgccaccagagccctggaggagacccaggtgagcctggacgagagaagacagctggacggcagcagcctgcaggccctgcagaacgccgtggacgccgtgagcctggccgtggacgcccacaaggccgagggcgagagagccagagccgccaccagcagactgagaagccaggtgcaggccctggacgacgaggtgggcgccctgaaggccgccgccgccgaggccagacacgaggtgagacagctgcacagcgccttcgccgccctgctggaggacgccctgagacacgaggccgtgctggccgccctgttcggcgaggaggtgctggaggagatgagcgagcagacccccggccccctgcccctgagctacgagcagatcagagtggccctgcaggacgccgccagcggcctgcaggagcaggccctgggctgggacgagctggccgccagagtgaccgccctggagcaggccagcgagccccccagacccgccgagcacctggagcccagccacgacgccggcagagaggaggccgccaccaccgccctggccggcctggccagagagctgcagagcctgagcaacgacgtgaagaacgtgggcagatgctgcgaggccgaggccggcgccggcgccgccagcctgaacgccagcctgcacggcctgcacaacgccctgttcgccacccagagaagcctggagcagcaccagagactgttccacagcctgttcggcaacttccagggcctgatggaggccaacgtgagcctggacctgggcaagctgcagaccatgctgagcagaaagggcaagaagcagcagaaggacctggaggcccccagaaagagagacaagaaggaggccgagcccctggtggacatcagagtgaccggccccgtgcccggcgccctgggcgccgccctgtgggaggccggcagccccgtggccttctacgccagcttcagcgagggcaccgccgccctgcagaccgtgaagttcaacaccacctacatcaacatcggcagcagctacttccccgagcacggctacttcagagcccccgagagaggcgtgtacctgttcgccgtgagcgtggagttcggccccggccccggcaccggccagctggtgttcggcggccaccacagaacccccgtgtgcaccaccggccagggcagcggcagcaccgccaccgtgttcgccatggccgagctgcagaagggcgagagagtgtggttcgagctgacccagggcagcatcaccaagagaagcctgagcggcaccgccttcggcggcttcctgatgttcaagacctag

SEQ ID NO: 216681 - DNA, 2184 bp, Artificial Sequence
  derived and/or modified sequence
atgatcctgagcctgctgttcagcctgggcggccccctgggctggggcctgctgggcgcctgggcccaggccagcagcaccagcctgagcgacctgcagagcagcagaacccccggcgtgtggaaggccgaggccgaggacaccggcaaggaccccgtgggcagaaactggtgcccctaccccatgagcaagctggtgaccctgctggccctgtgcaagaccgagaagttcctgatccacagccagcagccctgcccccagggcgcccccgactgccagaaggtgaaggtgatgtacagaatggcccacaagcccgtgtaccaggtgaagcagaaggtgctgaccagcctggcctggagatgctgccccggctacaccggccccaactgcgagcaccacggccccatggccgtgtggtgctggcccgagcccgacagcctgcaggccagactgggccagctgcagagaaacctgagcgagctgcacatgaccaccgccagaagagaggaggagctgcagtacaccctggaggacatgagagccaccctgaccagacacgtggacgagatcaaggagctgtacagcgagagcgacgagaccttcgaccagatcagcaaggtggagagacaggtggaggagctgcaggtgaaccacaccgccctgagagagctgagagtgatcctgatggagaagagcctgatcatggaggagaacaaggaggaggtggagagacagctgctggagctgaacctgaccctgcagcacctgcagggcggccacgccgacctgatcaagtacgtgaaggactgcaactgccagaagctgtacctggacctggacgtgatcagagagggccagagagacgccaccagagccctggaggagacccaggtgagcctggacgagagaagacagctggacggcagcagcctgcaggccctgcagaacgccgtggacgccgtgagcctggccgtggacgcccacaaggccgagggcgagagagccagagccgccaccagcagactgagaagccaggtgcaggccctggacgacgaggtgggcgccctgaaggccgccgccgccgaggccagacacgaggtgagacagctgcacagcgccttcgccgccctgctggaggacgccctgagacacgaggccgtgctggccgccctgttcggcgaggaggtgctggaggagatgagcgagcagacccccggccccctgcccctgagctacgagcagatcagagtggccctgcaggacgccgccagcggcctgcaggagcaggccctgggctgggacgagctggccgccagagtgaccgccctggagcaggccagcgagccccccagacccgccgagcacctggagcccagccacgacgccggcagagaggaggccgccaccaccgccctggccggcctggccagagagctgcagagcctgagcaacgacgtgaagaacgtgggcagatgctgcgaggccgaggccggcgccggcgccgccagcctgaacgccagcctgcacggcctgcacaacgccctgttcgccacccagagaagcctggagcagcaccagagactgttccacagcctgttcggcaacttccagggcctgatggaggccaacgtgagcctggacctgggcaagctgcagaccatgctgagcagaaagggcaagaagcagcagaaggacctggaggcccccagaaagagagacaagaaggaggccgagcccctggtggacatcagagtgaccggccccgtgcccggcgccctgggcgccgccctgtgggaggccggcagccccgtggccttctacgccagcttcagcgagggcaccgccgccctgcagaccgtgaagttcaacaccacctacatcaacatcggcagcagctacttccccgagcacggctacttcagagcccccgagagaggcgtgtacctgttcgccgtgagcgtggagttcggccccggccccggcaccggccagctggtgttcggcggccaccacagaacccccgtgtgcaccaccggccagggcagcggcagcaccgccaccgtgttcgccatggccgagctgcagaagggcgagagagtgtggttcgagctgacccagggcagcatcaccaagagaagcctgagcggcaccgccttcggcggcttcctgatgttcaagacctag

SEQ ID NO: 216682 - DNA, 2850 bp, Artificial Sequence
  derived and/or modified sequence
atgattctgtccttgctgtttagcctgggtggtccgctgggttggggcctgcttggcgcctgggcccaggcatcctctacatcactctccgatctgcaaagcagcagaacccctggagtctggaaagctgaggctgaagacacaggcaaggaccccgtgggcaggaattggtgtccctacccaatgagcaaacttgttacccttctggccctgtgtaaaactgagaagtttctgattcattcacagcagccttgccctcagggagcaccagactgtcagaaggttaaggtcatgtataggatggctcacaagcctgtttatcaggttaagcaaaaagtcttgacttccctcgcttggagatgttgcccaggatatacagggcctaattgcgagcaccacgactcaatggcaattccagaaccggctgatccaggcgattcacatcaggaaccacaagacgggcctgtgagctttaagccagggcacttagccgctgttattaatgaggttgaggtccagcaagagcaacaggagcatttgttaggggatctccaaaacgatgtccatcgggttgccgactcactgcccggattgtggaaagctctgcccggcaatctgacagcggctgtaatggaggctaaccaaaccgggcatgagtttcctgacagaagcctcgagcaggtgcttctgccacacgtcgatactttcctccaggtgcatttttcaccaatttggcggtcctttaatcagagccttcacagcctgacacaggccattagaaacctgagtctggacgtcgaagctaatcgtcaggcaatatctcgagtccaggatagcgcagtcgccagggccgacttccaggagctgggggcaaaattcgaggccaaggtgcaagagaatacacagagggtcggccaactcaggcaggatgtggaagaccggctccacgcacagcacttcacccttcacagatccatttctgagcttcaagcagatgtagacacgaagctcaaaagactgcacaaggcccaggaggcgccaggcacgaacggttctttggtgctggctacccccggcgcgggcgccaggcccgaacccgatagtttgcaggcccgtctgggacagctacagagaaatctctctgaattacacatgactacagctcggagggaagaagagcttcagtacacattagaggacatgcgagctacactgaccagacatgttgacgaaataaaagagctgtatagcgaatcagacgaaacattcgaccagattagcaaggtcgaacggcaggtggaggagctgcaggtgaaccacacagcgctgcgagagctcagggtgatacttatggagaagagcctcataatggaggagaacaaagaggaagttgagaggcagctcctggagttgaacctgactctgcagcacctgcaaggtggccacgccgacctgattaagtatgtaaaagattgcaactgtcagaaattgtatctagaccttgacgtgatccgggaagggcagcgcgacgcaacccgcgccctagaagagacgcaggtgagcctcgacgagaggaggcagttggacggctcttccctgcaggcgttgcagaatgccgtggacgctgtcagtcttgctgtggatgcacacaaagcggagggggagcgggcacgcgctgccacttctcggctccggagccaagttcaggccctggacgatgaagtgggcgcacttaaggcggctgcggctgaagcccggcacgaagtgcggcaactacacagcgcctttgcagccctgctcgaggacgccctgcgtcacgaggcagtcctggctgctcttttcggcgaagaggtccttgaggagatgagcgagcaaacgccggggccattgcctttgtcctatgagcagatcagggttgcactgcaggacgccgcttccggccttcaagagcaggccctgggctgggatgagctggcagcgcgtgtcactgcactggaacaggccagcgaaccaccccggcccgctgagcacctcgaaccgtctcacgatgccggccgcgaggaggccgcaacaactgcactggccggcctggccagggaactgcaatccctgtccaacgatgtcaaaaacgtggggaggtgctgcgaagcggaggctggcgctggcgcagcctcactcaacgcctcgctgcatggcctccataacgctttgttcgcaacccaacggtctcttgaacagcaccagagattgttccactctctgtttgggaattttcagggactgatggaagccaacgtgagcctcgacctgggaaaactgcagaccatgctcagtcgcaaaggaaagaagcaacaaaaagatctcgaagccccacggaagagggacaagaaggaagccgagcctctggttgacatccgagtgacaggccccgtcccaggggccctcggagctgcattgtgggaggccggatcacctgtagcgttttacgcatcattctctgaaggcacagccgccctgcaaacagtcaagtttaacacaacttacattaacatagggtctagctattttccagaacacgggtatttccgggcacctgagagaggagtctatttatttgcagtgtctgtggagttcggaccaggaccaggcacaggtcaactcgtctttgggggccaccacagaacccccgtgtgtaccacgggccagggctccggcagtaccgccacagtctttgcgatggctgagctgcagaaaggtgagcgcgtgtggttcgaactgacccaaggctctattacaaagcgctctctgagtgggacagcctttgggggattccttatgttcaaaacttag

SEQ ID NO: 216683 - DNA, 2184 bp, Artificial Sequence
  derived and/or modified sequence
atgatcttgtccctattattctcactaggaggacctctcgggtggggcctactcggcgcatgggcgcaggccagctctactagcctctcagaccttcagtctagtcgcaccccaggggtgtggaaagccgaagccgaggacactggcaaagaccccgtggggcgcaactggtgtccctaccctatgtctaagctggtaacactgctcgctctgtgcaagacagaaaagttcctaattcactcccaacaaccctgtccccagggggctcctgactgccagaaagtaaaggtgatgtaccgcatggcccacaaacccgtgtaccaggtgaaacagaaggtgctcacctctctggcttggaggtgctgccctggctacactggccccaactgcgagcatcacggccccatggccgtgtggtgttggcctgagcctgactcattgcaagcccgcctcggtcagctgcaacggaacttaagtgagctgcacatgacgacagctagaagagaagaagagctgcaatacaccctcgaggatatgcgcgctacactaacacgtcatgttgacgaaatcaaagaactgtacagcgagtcagatgaaacttttgaccagataagcaaagttgaaagacaagtggaggagctccaggtcaatcatacggctctacgggagctgagagtcatacttatggaaaagagtctaataatggaggaaaacaaggaggaagttgaacgccagctgcttgagctgaacctgactctgcagcacctgcagggcggtcatgcagatctcattaaatacgtgaaagattgcaattgccaaaagttatatttagacctcgacgtgattagggagggccagcgcgatgctacacgtgcccttgaagagacccaggtttctcttgacgagagacgtcagttggacggatcgagcctgcaagctttgcagaatgctgtggacgccgttagtctggcagttgatgcccacaaggccgaaggcgaaagagcgagggccgccacctccaggctgcgctcccaggtgcaggcccttgatgacgaagtaggcgcactcaaggcagcggcagctgaggcaagacatgaagtgcgacagctgcattccgccttcgcagccctgctcgaggatgccttgcgccatgaggcagttttggctgcactgttcggtgaagaggtcctggaggagatgtcagagcaaacccccgggcctctgcctctgtcatacgaacagattcgagtcgctctgcaagacgccgctagtggcctgcaggagcaggccttaggatgggacgagctcgcagcacgtgtcactgccctcgagcaagcctcagaacctccccggcctgccgagcatctcgagcctagccatgatgccggacgcgaggaagccgccacaactgcactcgctgggctcgcacgtgaactccagtctctctccaacgatgtgaagaacgtgggtagatgctgtgaggcggaggccggagcaggcgcggccagcttgaatgccagtctgcatggactgcacaacgcattattcgccacccaaagaagcctggagcagcaccagagactgtttcacagtcttttcgggaattttcaaggtctaatggaagctaatgtctcactcgacctgggcaagttacaaacaatgctgagccgaaagggaaaaaagcaacagaaagacctcgaggccccaaggaaaagagataagaaagaggctgagccgttggtggacatccgtgtgaccgggccggtgcccggggctctgggagcagccctctgggaggccgggtcacctgttgcgttctacgcgagcttcagtgagggcaccgctgcactgcagaccgttaaattcaacactacctatattaatattggtagctcatattttcccgaacatggttactttcgggctcctgagcggggagtatacttattcgccgtgagcgtggagttcgggcctggcccaggcaccggccagctcgtgtttggtgggcatcacaggactccagtgtgcactaccggccaggggtcaggttcaaccgcgaccgtctttgcgatggcggagctccagaagggggagcgcgtgtggttcgagctgacacagggaagcattacgaagcggagcctgagcgggaccgctttcggcgggtttttgatgtttaagacctag

SEQ ID NO: 216684 - DNA, 2850 bp, Artificial Sequence
  derived and/or modified sequence
atgatcctgagcctgctcttcagcctgggcggccccctgggctggggcctgctgggcgcctgggcccaggccagcagcaccagcctgagtgacctgcagagcagcaggaccccaggagtgtggaaggccgaggccgaggacaccgggaaggaccctgtgggcaggaactggtgcccctaccccatgagcaagctggtgaccctgctggccctgtgcaagacagagaagttcctgatccacagccagcagccctgcccccagggcgccccagactgccagaaggtgaaggtgatgtacaggatggcccacaagcctgtgtaccaggtgaagcagaaggtgctgaccagcctggcctggcgctgctgccccggctacacaggccccaactgtgagcaccacgacagcatggccatccctgagcctgctgaccccggggacagccaccaggagccccaggacggccctgtgtccttcaagccaggccacctggccgctgtgatcaatgaggtggaggtgcagcaggagcagcaggagcacctgctgggggacctgcagaatgatgtgcaccgggtggccgacagcctgcccggcctgtggaaggccctgcccggcaacctgacagctgctgtgatggaggccaaccagacaggccacgagttcccagacaggagcctggagcaggtgctgctgccccacgtggacaccttcctgcaggtgcacttcagccccatctggaggagcttcaaccagagcctgcacagcctgacccaggccatccggaacctgagcctggatgtggaggccaaccggcaggccatcagccgggtgcaggacagcgctgtggcccgggctgacttccaggagctgggcgccaagtttgaggccaaggtgcaggagaacacccagagggtgggccagctgcggcaggatgtggaggaccggctgcacgcccagcacttcaccctgcacaggagcatcagcgagctgcaggctgatgtggacaccaagctgaagaggctgcacaaggcccaggaggcccctggcaccaacggcagcctggtgctggccacccctggggccggggcccggcctgagccagacagcctgcaggcccggctgggccagctgcagaggaacctgtctgagctgcacatgaccacagcccggcgggaggaggagctgcagtacaccctggaggacatgagggccaccctgaccaggcatgtggatgagatcaaggagctgtacagcgagagtgatgagacctttgaccagatcagcaaggtggagcggcaggtggaggagctgcaggtgaaccacacagccctgcgggagctgcgggtcatcctgatggagaagagcctcatcatggaggagaacaaggaggaggtggagcggcagctgctggagctgaacctgaccctgcagcacctgcagggcggccatgctgacctgatcaagtatgtgaaggactgcaactgccagaagctgtacctggacctggatgtgatccgggagggccagagagatgccacccgggccctggaggagacccaggtgtccctggatgaaagacggcagctggatggcagcagcctgcaggccctgcagaatgctgtggatgctgtgtccctggccgtggatgcccacaaggccgagggggagcgggcccgggccgccaccagccggctgcggagccaggtgcaggccctggatgatgaggtgggcgccctgaaggctgctgctgctgaggcccggcatgaggtgcggcagctgcacagcgcctttgctgccctgctggaggatgccctgcggcatgaggccgtgctggccgccctgtttggagaggaggtgctggaggagatgtctgagcagaccccaggccccctgcccctgtcctatgagcagatccgggtggccctgcaggatgctgccagcggcctgcaggagcaggccctgggctgggatgagctggccgcccgggtgacagccctggagcaggccagcgagccccccaggcctgctgagcacctggagcccagccatgatgctggccgggaggaggccgccaccacagccctggccggcctggcccgggagctgcagagcctgagcaatgatgtgaagaatgtgggccgctgctgtgaggccgaggccggggccggggccgccagcctgaatgccagcctgcacggcctgcacaatgccctgtttgccacccagaggagcctggagcagcaccagaggctcttccacagcctgtttggaaacttccagggcctgatggaggccaacgtgtccctggacctgggcaagctgcagaccatgctgagcaggaagggcaagaagcagcagaaggacctggaggcccccaggaagagggacaagaaggaggccgagcccctggtggacatccgggtgacaggccctgtgcctggggccctgggcgccgccctgtgggaggccggcagccctgtggccttctacgccagcttcagcgagggcacagctgccctgcagacagtgaagttcaacaccacctacatcaacatcggcagcagctacttccctgagcacggctacttccgggcccctgagcggggcgtgtacctgtttgctgtgtctgtggagtttggacctggccctggcaccggccagctggtgtttggaggccaccacaggacccctgtgtgcaccaccggccagggcagcggcagcacagccaccgtgtttgccatggccgagctgcagaagggggagcgggtgtggtttgagctgacccagggcagcatcaccaagaggagcctgtctggaacagcctttggaggcttcctgatgttcaagacctag

SEQ ID NO: 216685 - DNA, 4127 bp, Artificial Sequence
  derived and/or modified sequence
aagacaacgtcactagcagtttctggagctacttgccaaggctgagtgtgagctgagcctgccccaccaccaagatgatcctgagcttgctgttcagccttgggggccccctgggctgggggctgctgggggcatgggcccaggcttccagtactagcctctctgatctgcagagctccaggacacctggggtctggaaggcagaggctgaggacaccggcaaggaccccgtaggacgtaactggtgcccctacccaatgtccaagctggtcaccttactagctctttgcaaaacagagaaattcctcatccactcgcagcagccgtgtccgcagggagctccagactgccagaaagtcaaagtcatgtaccgcatggcccacaagccagtgtaccaggtcaagcagaaggtgctgacctctttggcctggaggtgctgccctggctacacgggccccaactgcgagcaccacgattccatggcaatccctgagcctgcagatcctggtgacagccaccaggaacctcaggatggaccagtcagcttcaaacctggccaccttgctgcagtgatcaatgaggttgaggtgcaacaggaacagcaggaacatctgctgggagatctccagaatgatgtgcaccgggtggcagacagcctgccaggcctgtggaaagccctgcctggtaacctcacagctgcagtgatggaagcaaatcaaacagggcacgagttccctgatagatccttggagcaggtgctgctaccccacgtggacaccttcctacaagtgcatttcagccccatctggaggagctttaaccaaagcctgcacagccttacccaggccataagaaacctgtctcttgacgtggaggccaaccgccaggccatctccagagtccaggacagtgccgtggccagggctgacttccaggagcttggtgccaaatttgaggccaaggtccaggagaacactcagagagtgggtcagctgcgacaggacgtggaggaccgcctgcacgcccagcactttaccctgcaccgctcgatctcagagctccaagccgatgtggacaccaaattgaagaggctgcacaaggctcaggaggccccagggaccaatggcagtctggtgttggcaacgcctggggctggggcaaggcctgagccggacagcctgcaggccaggctgggccagctgcagaggaacctctcagagctgcacatgaccacggcccgcagggaggaggagttgcagtacaccctggaggacatgagggccaccctgacccggcacgtggatgagatcaaggaactgtactccgaatcggacgagactttcgatcagattagcaaggtggagcggcaggtggaggagctgcaggtgaaccacacggcgctccgtgagctgcgcgtgatcctgatggagaagtctctgatcatggaggagaacaaggaggaggtggagcggcagctcctggagctcaacctcacgctgcagcacctgcagggtggccatgccgacctcatcaagtacgtgaaggactgcaattgccagaagctctatttagacctggacgtcatccgggagggccagagggacgccacgcgtgccctggaggagacccaggtgagcctggacgagcggcggcagctggacggctcctccctgcaggccctgcagaacgccgtggacgccgtgtcgctggccgtggacgcgcacaaagcggagggcgagcgggcgcgggcggccacgtcgcggctccggagccaagtgcaggcgctggatgacgaggtgggcgcgctgaaggcggccgcggccgaggcccgccacgaggtgcgccagctgcacagcgccttcgccgccctgctggaggacgcgctgcggcacgaggcggtgctggccgcgctcttcggggaggaggtgctggaggagatgtctgagcagacgccgggaccgctgcccctgagctacgagcagatccgcgtggccctgcaggacgccgctagcgggctgcaggagcaggcgctcggctgggacgagctggccgcccgagtgacggccctggagcaggcctcggagcccccgcggccggcagagcacctggagcccagccacgacgcgggccgcgaggaggccgccaccaccgccctggccgggctggcgcgggagctccagagcctgagcaacgacgtcaagaatgtcgggcggtgctgcgaggccgaggccggggccggggccgcctccctcaacgcctcccttcacggcctccacaacgcactcttcgccactcagcgcagcttggagcagcaccagcggctcttccacagcctctttgggaacttccaagggctcatggaagccaacgtcagcctggacctggggaagctgcagaccatgctgagcaggaaagggaagaagcagcagaaagacctggaagctccccggaagagggacaagaaggaagcggagcctttggtggacatacgggtcacagggcctgtgccaggtgccttgggcgcggcgctctgggaggcaggatcccctgtggccttctatgccagcttttcagaagggacggctgccctgcagacagtgaagttcaacaccacatacatcaacattggcagcagctacttccctgaacatggctacttccgagcccctgagcgtggtgtctacctgtttgcagtgagcgttgaatttggcccagggccaggcaccgggcagctggtgtttggaggtcaccatcggactccagtctgtaccactgggcaggggagtggaagcacagcaacggtctttgccatggctgagctgcagaagggtgagcgagtatggtttgagttaacccagggatcaataacaaagagaagcctgtcgggcactgcatttgggggcttcctgatgtttaagacctgaaccccagccccaatctgatcagacatcatggactcgcccagctctcctcggcctggggctctggccaaggatgggctggaggtcattcagttggtctgtctcttccctggaaaccttctgcaaagatggtgtggtgtacgtggcttccctgtaaccacatggggcttggccatttctccatgatgagaaggactggaatgcttctccgggcaggacatggtcctaggaagcctgaaccttggcttggcatgccttctcagacagcacggcctgggctccaactcttcaccacaccctgtattctacaacttctttggtgttttgctcctcctgtggttggaaacttctgtacaacactttaaacttttctcttgcttcctcttctcttctcccttatcgtatgatagaaagacattcttccccaggaggaatgtttaaaatggaggcaacattttggccaacattggaaagcactagagggcaatgggattaaaccaacctgcttggtctctattagtcagtaatgaagacgacagcctggccaaccaagggaaaggaaattagtatctttagtttcagtcattccttgtaggatatggtttagctgtgcccccacctaaaatatcatcttgaattgtaatccctataatccccacatcaagggagagatcaggtggaggtaattggatcttgggggcggttcccccatgctgttcttgtgatagttctcacgagatctgatgattttataagtttgatagttcctcctgtgttcattctccttcctgccaccttgtgaagatgccttggttcctcttcactgtctgccatgattgtaagtttcctgaggcctccccagccatgtggaacagtgagtcaattaaacctctttcctttataaattatccagtcttgggcaattcttgatagcagtgtgaaaatggactaatacacttgtgtttatctgtaatttaaatttcatgtctttttctccttgccttacatagggtaaagaccaagaaatgccaaacgtgaactaaaatatgtagggccttcaacttttttacttcctccagtatcttaggaccatcgtaattcttgttagcatctctaaccaggaggcagctgagggaggagggaaagaagactgtaaaaatccccctcactaatgatcaactttggaataaagtgatgcccttcaaa

SEQ ID NO: 216686 - DNA, 2184 bp, Artificial Sequence
  derived and/or modified sequence
atgatcctgagcctgctcttcagcctgggcggccccctgggctggggcctgctgggcgcctgggcccaggccagcagcaccagcctgagtgacctgcagagcagcaggaccccaggagtgtggaaggccgaggccgaggacaccgggaaggaccctgtgggcaggaactggtgcccctaccccatgagcaagctggtgaccctgctggccctgtgcaagacagagaagttcctgatccacagccagcagccctgcccccagggcgccccagactgccagaaggtgaaggtgatgtacaggatggcccacaagcctgtgtaccaggtgaagcagaaggtgctgaccagcctggcctggcgctgctgccccggctacacaggccccaactgtgagcaccacggccccatggctgtgtggtgctggccagagccagacagcctgcaggcccggctgggccagctgcagaggaacctgtctgagctgcacatgaccacagcccggcgggaggaggagctgcagtacaccctggaggacatgagggccaccctgaccaggcatgtggatgagatcaaggagctgtacagcgagagtgatgagacctttgaccagatcagcaaggtggagcggcaggtggaggagctgcaggtgaaccacacagccctgcgggagctgcgggtcatcctgatggagaagagcctcatcatggaggagaacaaggaggaggtggagcggcagctgctggagctgaacctgaccctgcagcacctgcagggcggccatgctgacctgatcaagtatgtgaaggactgcaactgccagaagctgtacctggacctggatgtgatccgggagggccagagagatgccacccgggccctggaggagacccaggtgtccctggatgaaagacggcagctggatggcagcagcctgcaggccctgcagaatgctgtggatgctgtgtccctggccgtggatgcccacaaggccgagggggagcgggcccgggccgccaccagccggctgcggagccaggtgcaggccctggatgatgaggtgggcgccctgaaggctgctgctgctgaggcccggcatgaggtgcggcagctgcacagcgcctttgctgccctgctggaggatgccctgcggcatgaggccgtgctggccgccctgtttggagaggaggtgctggaggagatgtctgagcagaccccaggccccctgcccctgtcctatgagcagatccgggtggccctgcaggatgctgccagcggcctgcaggagcaggccctgggctgggatgagctggccgcccgggtgacagccctggagcaggccagcgagccccccaggcctgctgagcacctggagcccagccatgatgctggccgggaggaggccgccaccacagccctggccggcctggcccgggagctgcagagcctgagcaatgatgtgaagaatgtgggccgctgctgtgaggccgaggccggggccggggccgccagcctgaatgccagcctgcacggcctgcacaatgccctgtttgccacccagaggagcctggagcagcaccagaggctcttccacagcctgtttggaaacttccagggcctgatggaggccaacgtgtccctggacctgggcaagctgcagaccatgctgagcaggaagggcaagaagcagcagaaggacctggaggcccccaggaagagggacaagaaggaggccgagcccctggtggacatccgggtgacaggccctgtgcctggggccctgggcgccgccctgtgggaggccggcagccctgtggccttctacgccagcttcagcgagggcacagctgccctgcagacagtgaagttcaacaccacctacatcaacatcggcagcagctacttccctgagcacggctacttccgggcccctgagcggggcgtgtacctgtttgctgtgtctgtggagtttggacctggccctggcaccggccagctggtgtttggaggccaccacaggacccctgtgtgcaccaccggccagggcagcggcagcacagccaccgtgtttgccatggccgagctgcagaagggggagcgggtgtggtttgagctgacccagggcagcatcaccaagaggagcctgtctggaacagcctttggaggcttcctgatgttcaagacctag

SEQ ID NO: 216687 - DNA, 2850 bp, Artificial Sequence
  derived and/or modified sequence
atgatcctgagcctgctgttcagcctgggcggccccctgggctggggccttctgggagcatgggcacaggcatcatccacatcactttccgacctccaaagctccaggaccccaggtgtgtggaaggctgaagcagaagatacaggaaaagaccctgtgggccgcaactggtgtccctacccgatgtccaagttggtgaccctgcttgcactgtgtaaaaccgaaaagtttcttatacactctcagcagccttgtccgcagggggctcctgattgccaaaaggtgaaggttatgtaccggatggcccataagcccgtttatcaggtgaagcagaaggtactgacgtcactcgcctggcgatgctgccctggatataccggccccaactgtgagcaccatgactccatggcgatccctgaacccgctgatcccggtgattctcatcaggagccccaagacggtcccgtctctttcaagcctgggcatctggcagccgtgatcaatgaggtggaggttcagcaggagcagcaggagcacctgctgggcgatctccagaatgatgtccatagagtggccgacagcctgcctgggctttggaaagcgttacctgggaacctgactgcagcagtaatggaggcaaatcagactggccacgagtttcccgacagatccttggagcaagtgctgctgccacatgttgatacatttctgcaagttcactttagcccgatttggcgttctttcaatcaatctcttcatagcctcacccaggccatccgcaacctatcccttgatgtagaagccaacagacaggccatatctcgcgtgcaggactccgccgtggccagagcagattttcaggaattgggagctaaattcgaggctaaggtgcaggaaaacacgcagagggtggggcagctcaggcaggacgtggaggaccggctgcacgctcagcattttacactgcataggtccatctcagagttacaagctgacgttgataccaaattaaagcggctgcacaaagcacaggaagcccccggcaccaacggcagccttgtcttggcgactcccggagccggagcccgccccgaacctgactccctccaggctagacttgggcaattgcagagaaacttaagtgagttacacatgacaactgctcggcgcgaagaagaactgcagtataccctggaggatatgagggctacgctaactcgccacgtggacgaaatcaaagaactgtactcggagtccgatgaaacattcgaccagatatctaaagtggaacgccaggtagaagagttgcaagtgaaccacactgccttgagagaactgagggtgatcctgatggagaagtccctgataatggaggaaaataaagaggaagtggagaggcagctgctcgagctcaatctgaccctacagcatctccaaggcgggcacgccgatctaatcaagtacgtaaaagactgcaattgccagaagctgtatttagacttggatgttatcagggagggtcagcgcgatgctacgcgggcactggaagaaacccaggtgtctttggacgagcggaggcagctggacgggagttctcttcaagcactgcagaacgcggtcgatgccgtgagtctagctgtggatgctcacaaggcggaaggcgagcgcgcaagggctgccaccagtcgtttaagaagtcaggtgcaagcactagacgacgaagtcggggcgctgaaagcggcggccgccgaagctaggcacgaggtgagacagctacatagtgcttttgctgccttgttggaagatgctctcaggcacgaggccgtcctggccgctttattcggcgaagaagtgcttgaggaaatgtccgagcagacccctggccctctgcccctgagttacgagcagatccgggtcgccctgcaggacgcagcatcaggcttgcaggaacaggcactcgggtgggacgagctggcggccagggtcacagctctcgagcaagcaagtgagccccccagaccagctgagcacttggagcctagccacgacgctggccgcgaagaggcggccaccaccgccctggccggactggcccgggagcttcagtcactgtctaatgacgttaagaatgtgggcagatgttgtgaggcagaggctggagcaggggccgcgtctttgaacgccagtctccacggcctgcacaacgcactttttgctacacagcggtcccttgagcagcatcagcggttatttcacagtctcttcgggaatttccaaggcttgatggaagccaacgtgtccctggacttgggtaagctgcagacgatgctgtcccgcaaggggaagaaacagcagaaggacttggaagcccctaggaagcgcgacaagaaagaagccgaacccctcgtggacattcgggtcactggacccgtccctggagctcttggagcagcactctgggaagccggctcccctgtagctttttacgctagtttctctgagggaaccgccgcactgcaaaccgtcaaatttaatacgacctatatcaatattggatctagctacttccccgagcacggctatttcagggcccccgaacgtggagtgtatttatttgccgtttcagttgaattcggcccaggaccgggcaccggccagctcgtcttcggtgggcaccaccggactcccgtttgcaccaccggccagggctctggttccaccgcaacagtatttgctatggctgaactgcagaagggcgagagggtctggtttgagctgactcagggatccattaccaagcgctcgctgagtgggactgctttcgggggctttctgatgtttaagacatag

SEQ ID NO: 216688 - DNA, 2184 bp, Artificial Sequence
  derived and/or modified sequence
atgatcctgagcctgctgttcagcctgggcggccccctgggctggggattgctgggcgcttgggcccaggcctcaagtacgagcctgagcgacctacagtcatccagaactcctggggtctggaaagctgaagcagaagacacaggcaaggacccggtaggtcgtaattggtgtccctacccaatgagcaaattggtcacccttctggccctgtgcaaaaccgagaagtttctgatccatagccagcagccttgccctcaaggcgcccccgattgccagaaagtgaaggtgatgtatcgtatggcgcacaagccggtctatcaggtaaaacagaaggttcttacttctctggcttggcgatgctgccctggatatacgggacccaactgcgagcatcacggtcctatggctgtatggtgttggcccgaacccgatagtctgcaggctagattagggcagctccaacggaacctctcagagcttcatatgactacagcacgaagggaggaagaactgcagtatacattagaggatatgcgtgccactctcacccgacatgttgacgaaattaaagaactatatagtgaatcagatgaaacgttcgaccagataagtaaagtggagcgacaggttgaagagctccaggtgaaccacacagccttgcgcgagctgagagttattctcatggagaaatctctaataatggaagaaaataaagaggaagtggagaggcagctgcttgagcttaatctgacactacagcacctgcaaggcggacatgcagatctaatcaaatatgtgaaggattgcaactgtcaaaagctgtacctggatctggatgtgattcgagaaggacagagagacgccaccagggctctggaagaaacacaggtttcgctggacgagcgacggcagctggatgggtctagcctgcaggccttgcaaaacgccgtcgatgcagtgagcctggccgtagatgctcacaaggcggaaggcgagcgagcgagagcggccacctcccgacttaggtcacaggtgcaggccctggacgatgaggtgggtgcactcaaggccgcggccgcagaggcccgacacgaggttaggcagctgcactctgcctttgctgctctgctcgaggatgcacttagacacgaggctgtgttagccgctctgtttggggaggaggtcctcgaggagatgtccgagcagacacccggacccctgccactcagctacgagcagattcgagtggcacttcaggatgccgcctccggattgcaggagcaggcattaggatgggacgagctcgctgctagagtcacagctctggaacaggccagcgaacccccgaggcctgctgagcacctggagccatcacacgacgcgggtagggaggaggccgcaacaacagcactcgcaggcctggccagggagctgcagtccctctccaacgatgtaaaaaacgtgggaaggtgctgtgaggcagaagcaggagcaggggccgcctctttgaacgcgtctttgcacggactgcataatgctctatttgcaacacagaggagtctggagcagcaccagcggttgttccattcactgtttggcaacttccagggcttaatggaggcaaatgtgagcctcgaccttgggaagttgcagaccatgctttctaggaaggggaagaagcagcagaaagacttagaagccccacggaagcgcgataagaaagaagctgagccactcgtggatattagggtgaccgggccggtgcctggggccttgggcgccgctctgtgggaggccgggtctcctgtggcattttacgcatcattctccgaaggaacggccgcacttcagactgtgaaatttaataccacatatataaacatcgggtcctcctactttccggaacacgggtacttcagagctcccgaaagaggcgtgtatttgtttgcggtttccgtcgagtttgggcccggacccggtactggtcagctcgtgtttgggggccaccaccgaactcccgtgtgcacgaccggccagggcagcggcagcaccgctacagtatttgccatggcagaattgcagaaaggagagcgggtctggttcgaattgactcaaggatccataactaaacggagtctctcaggcaccgccttcggaggatttcttatgttcaaaacatag

SEQ ID NO: 216689 - RNA, 2850 nt, Artificial Sequence
  derived and/or modified sequence
augauccuaagccuguuguuuucacuuggcggaccucugggcuggggucuguuaggggcuugggcucaggcaucuagcacaucacuuucggaccugcagucuagccgcacacccggaguguggaaggcagaggcggaagacaccggcaaggauccaguugggcggaauugguguccguaccccaugucuaaauuagucacacugcucgcccuguguaagacugagaaauuucugauccacucucagcaaccuugcccacaaggugcgccugacugucagaaagugaaaguuauguacagaauggcccauaagccugucuaccaagugaagcaaaagguucuuacuagccucgccuggcguuguugucccgguuauaccggccccaauugugaacaccaugauuccauggcaauucccgagcccgccgaucccggagauucucaccaggagccccaggacggacccgugucauucaagcccggacacuuagcugcagugaucaacgaggucgagguacaacaggaacagcaggagcaccugcugggggauuugcagaacgauguccauaggguugcagauucacucccuggacucuggaaagcgcugccggggaaucuuaccgcugcagugauggaagccaaccagacaggucacgaguucccggauagaucguuagaacagguccuguugccccacguagauaccuuccugcaaguucacuuuucaccaauauggcggagcuucaaucaaucccugcacagcuuaacucaggccauucggaaucuuuccuuggauguggaggcuaaucgucaggcuauaucacguguccaagauagcgcaguugccagggcugacuuccaggaguugggagcuaaauuugaagccaaaguccaggaaaauacacaacgggugggacagcugaggcaggauguagaggaccggcugcacgcccagcacuucacacugcacagguccauuagcgaguugcaggcagacguugauaccaaacucaaaagauuacacaaggcccaggaagccccuggaaccaacggaucuuuggugcuggccaccccgggcgccggggcacgccccgagcccgacagccuccaggcaagacugggccagcugcaaaggaauuuguccgaguuacacaugacaacugcucgucgcgaagaggagcuucaauacacucucgaggacaugcgcgccacuuugacccggcacguggacgaaauuaaggagcuuuauucagaaucugacgaaacuuuugaccagauuucaaagguugaaagacagguggaggaguuacaggugaaccacacagcacuaagagaacuucgggugauccugauggaaaagucccugaucauggaagaaaauaaggaagaggucgaacgucagcugcuggaacugaauuugacccugcaacaccuccagggggggcacgcggaucucaucaaauaugugaaagauugcaacugccaaaagcucuaccuagaccuggaugucauucgcgaaggccaacgagacgccacaagggcacuggaggagacgcagguguccuuggacgagaggcgucagcuggauggcucaucacuacaagccuugcagaacgccguggacgccguuucucucgccguugacgcccacaaggcugaaggugagcgggcucgggcugccacaagucgauugcgaucucaggugcaagcauuggacgaugaagucggggcacucaaggcugcugcugcagaagcacgccaugaagugcgacagcuacauuccgccuuugccgcauugcucgaggacgcccuccgccaugaggccguccuggccgcacuuuucggcgaggagguguuagaagagaugucugagcagacuccgggaccucucccacuguccuacgagcagauccggguggcccugcaagacgcugcaagcggucuccaggaacaggccuugggcugggaugaacucgccgcucgugucacagcacucgaacaggcuucagagcccccccggcccgcugaacaccuugagccaagccacgaugcuggccgggaagaagcugccacuacugccuuagccggucucgccagggaacuucaaagccuaucgaacgacguuaagaauguuggacgcugcugcgaggcagaggcgggggccggcgcugcuucucugaaugcgagccuccaugggcuucacaaugcacuguuugcgacccagcgcucgcuggaacaacaccaaaggcuguuccauucccuguucggcaauuuucaaggguugauggaggcuaaugucagucuggaucugggcaaacuccagacaauguuaucucgaaaggggaaaaagcagcagaaagaucucgaggcaccccggaagcgcgauaagaaggaggccgaaccccuagucgacauaagagucaccggcccugugccuggagcucugggagccgcccugugggaagcaggauccccuguagcauuuuaugcaucguucagcgaagggaccgccgcuuugcaaaccgucaaguuuaauaccaccuauaucaacauugguaguuccuacuuuccugaacauggcuacuuucgagcaccugaacgcgguguguaccuguucgcugugagcguggaguucggaccuggacccgggacgggccagcuggucuucggcggacaucauaggacaccuguguguacgacugggcagggaaguggcuccacugcuacagucuucgccauggccgaacuccagaaaggggaacgcgugugguuugaacugacacaaggcucaauuaccaaacgcucccugucugguacugcuuuugggggcuuucucauguucaaaaccuag

SEQ ID NO: 216690 - RNA, 2184 nt, Artificial Sequence
  derived and/or modified sequence
augauucugucacuucuuuucagccucggaggaccccuuggcuggggacugcucggggcaugggcccaggccucaucuaccagccucuccgauuuacagucuucgcggaccccuggggucuggaaagccgaggcggaagacacaggcaaagaccccguaggaagaaacuggugccccuauccaaugucaaaacuggugacucugcucgcguugugcaagaccgagaaguuucugauccacucucaacagccuuguccccagggagccccggauugucagaagguuaaggugauguauagaauggcccauaagccgguguaucaggugaagcagaaggugcugacaagcuuagccuggcgauguugccccgguuacacaggcccgaacugcgaacaccacggaccgauggcuguauggugcuggcccgaaccugauagucuucaggccaggcucggccaguugcagagaaaccugagcgaacugcacaugacgaccgcccgaagggaagaagaguugcaguauacauuagaagacaugcgcgccacucucacccgucauguggacgaaauuaaggagcuguacucagaaucagaugaaacauucgaccaaaucuccaaagucgaaaggcaggucgaagaacuccaggucaaccacacagcccugcgagaacuccgcgugauccugauggaaaagucucucaucauggaggaaaauaaagaagaggucgagcgacagcugcuugaauuaaaccuuacccuucagcauuugcagggcggacaugcggaucuuauaaaauaugugaaagacuguaauugucagaaguuguaccuugaucucgaugugauuagagaaggccaacgcgacgccaccagggcacuggaagagacacagguuagccuagacgaaaggcggcaacuggacgguucuucucugcaagcauuacagaacgccguagacgcuguaucccuggcuguggacgcccauaaggcugaaggugagagagccagggcugcaacaucacgccugcggucgcaagugcaggcguuggacgaugaagugggugcauuaaaagcagcagccgcggaggcgcgacacgaggugcgccaauugcauucagccuucgcagcccuucuagaagacgcacuaaggcacgaagccgugcucgcagcacuuuuuggggaagaaguccucgaggagaugagcgaacagacucccgguccacugccacuuagcuacgagcagauacgugucgcccugcaggacgccgccaguggacugcaggaacaggcccucgggugggacgagcuugccgcuagaguaacggcacuggagcaagccagcgagccaccuagaccggcugaacauuuagaaccuucacaugacgcaggccgcgaggaagcagcuacgaccgcacuggccgguuuggcccgugaacugcagucuuuauccaaugauguaaaaaacgugggccguuguugcgaagcugaggccggcgcaggugcugccucauugaaugccucacugcacggacuacacaaugcucuguucgcgacccaacgaucccuggagcagcaccagaggcuguuucacucucuguucgggaacuuccaggggcugauggaggccaaugugucuuuagaccuggguaaauugcaaacaaugcuaagccgcaaaggaaagaagcagcagaaagacuuagaagccccacggaagcgagauaagaaagaagccgagccccucgucgauauccgugugacagguccuguccccggugcccugggcgccgcucugugggaggcugguucuccuguggcguucuacgcuaguuucagcgaggguaccgcugcacuucagacuguaaaguucaacacuacuuacauuaacauuggcagcagcuauuucccagaacacggguacuuucgcgcgccagaacguggcguguaccuuuucgcggugucugucgaauucgggccuggucccggaaccggacaguuaguguuuggaggacaccaucgaaccccaguauguacuacuggccagggaaguggcucuacugccacaguguucgcaauggccgaacuucagaagggagagagggugugguucgaauuaacucaagggagcaucacuaagagaagccuuagcgguaccgccuucggcgguuuccucauguuuaagacuuag

SEQ ID NO: 216691 - RNA, 2850 nt, Artificial Sequence
  derived and/or modified sequence
augauccugucccuccuauuuucccucggcggcccucuugguuggggccugcuaggcgccugggcccaggccucaucuaccucacugucagauuuacaaucaagucgcacaccuggaguuuggaaggcagaggcggaggauacuggcaaagauccagugggucgcaacuggugccccuacccaaugucuaaacuggucacccuuuuagcccugugcaagacagaaaaauuuuugauucacucccaacaaccuuguccgcagggagccccugauugccagaaaguaaaggugauguauagaauggcccauaagccugucuaccaagugaagcaaaagguucuuacuagccucgccuggcguuguugucccgguuauaccggccccaauugugaacaccaugauuccauggcaauucccgagcccgccgaucccggagauucucaccaggagccccaggacggacccgugucauucaagcccggacacuuagcugcagugaucaacgaggucgagguacaacaggaacagcaggagcaccugcugggggauuugcagaacgauguccauaggguugcagauucacucccuggacucuggaaagcgcugccggggaaucuuaccgcugcagugauggaagccaaccagacaggucacgaguucccggauagaucguuagaacagguccuguugccccacguagauaccuuccugcaaguucacuuuucaccaauauggcggagcuucaaucaaucccugcacagcuuaacucaggccauucggaaucuuuccuuggauguggaggcuaaucgucaggcuauaucacguguccaagauagcgcaguugccagggcugacuuccaggaguugggagcuaaauuugaagccaaaguccaggaaaauacacagcgugugggacagcuacgacaggauguggaggaucgucuccacgcucagcacuuuacauuacaccgauccauuagugaacuccaagcagauguggacacaaagcucaagcggcuacacaaggcacaggaggccccugggacaaaugguucucuagugcucgcgaccccaggagccggggcaaggcccgaacccgacucucuccaggcccgcuuaggacaacuucagagaaaucuguccgaauuacacaugaccaccgcgcggcgugaggaagagcuucaauacaccuuagaagacaugagagcuacacugaccaggcacguggacgagauaaaggagcuuuacuccgaaucugacgaaacuuucgaucaaauuagcaaggucgagcgacagguggaagagcuccaggucaaccauaccgcacuucgcgagcugagaguaauccugauggaaaagagccugauaauggaagagaacaaagaggaaguagaacgucaacugcuggaacugaaccugaccuuacagcacuuacagggcggucaugccgaucugauaaaguacguuaaagauugcaauugccagaaacuguaccuggaccucgaugugaucagggaaggacagagagacgcuacccgggcccucgaggaaacccaagucucacuugaugagagacgccaacuugaugguuccucuuugcaggcccuccaaaacgcugucgaugcaguuagccuggcuguugaugcccauaaagcagagggugagagagcucgggccgccacaucaagacuccgcucucaaguccaggcucuugaugacgaagugggggcgcugaaagcagcagccgccgaggcacgccacgaaguccgccaacuccauucagcguuugccgccuuacucgaagacgcacugcgccacgaagcgguguuggcagcccucuuuggcgaagaagugcucgaagagaugagcgagcagacacccggaccuuuaccuuuaagcuaugaacagaucagggucgcacuccaagaugccgcgucugguuugcaagagcaggcacucggcugggaugaacuggccgcucgcguaacggcguuggagcaggcaucagagcccccccguccggccgaacaccucgaaccuucacacgaugcagguagagaagaggcagcaaccaccgcacuggcuggccuggcgagagagcuacagucucuauccaacgaugugaaaaaugugggccgcugcugugaggcagaagccggagccggggccgccagccucaacgcuagcuugcacggacuccauaaugcauuauucgcaacacagcgcucacuggagcaacaccagagacuuuuccacucacucuucgguaacuuucaagggcugauggaggcgaacgugucuuuagaccuagguaaacuucagacaauguuaagcagaaaagggaagaagcagcagaaggauuuagaagccccccguaagcgggacaaaaaggaagcggagcccuugguugacauccgcguuacaggcccggugccgggcgcccuuggugcugcacucugggaagcuggcaguccagucgcauucuacgccucauuuucugagggaacggcagcccuccagacagugaaauuuaacaccacauauaucaacauaggaucuaguuacuucccugagcauggauauuuucgugccccugagcguggcguuuaucuguuugcagugucaguugaauucggccccggcccaggaaccggacagcugguguuuggugggcaccacagaacucccguaugcaccaccgggcaaggcagcgggaguacagcaaccgucuucgcuauggcugaauuacagaagggagaaagaguaugguucgagcucacucagggaucuauaacuaaacggucuuuguccggcacagcuuuugguggcuuucuuauguucaagaccuag

SEQ ID NO: 216692 - RNA, 2184 nt, Artificial Sequence
  derived and/or modified sequence
augauuuugagccuacuauuuucguugggcggcccgcucggguggggacugcuaggagcuugggcccaggcuagcuccacuucccugucugaucuucagucgucacgcacccccggcguguggaaagcggaagccgaagauaccggcaaagauccagucgguaggaacuggugccccuauccaaugucaaaacuggugacccuguuagcccuguguaagaccgaaaaauuucugauucacucucaacagccuuguccacagggagcgccggacugucagaaagugaaaguaauguaccgcauggcacauaagccugucuaccagguuaaacaaaaggugcugacaucccuagcuuggagauguuguccaggauauacugguccaaauugugaacaucauggacccauggcagugugguguuggccugaaccagauucgcuccaggcuagacucggacaacuccaacgcaaucugucagaacugcacaugaccaccgcccgccgggaagaggaauugcaauauacguuggaagacaugcgcgccacuuugacuaggcauguugaugagauuaaagagcucuauagugaaagcgaugagacauucgaucagauuuccaagguugaacgucaaguggaggagcuccagguuaaucacacugcguuacgggaacuuagagugauccucauggagaaaucuuuaaucauggaagaaaacaaagaagagguggagagacaguuacucgaacugaauuugacucugcaacaucuccagggaggccacgccgaccuaauuaaguacgucaaggauugcaauugccagaagcuauauuuagaccucgaugugauacgcgaaggacaacgggacgcuacccgcgcucucgaagaaacccagguaagccucgaugagagaagacaacuggauggaagcagccugcaagccuuacaaaacgcaguggacgccgugagccucgccgucgacgcacauaaggcugagggagaaagggcacgugcagccaccucucgacugaggagccagguucaggcuuuggaugacgaaguuggagcguugaaggcugcagccgccgaagcaagacaugagguuagacaguugcauucugccuucgcugcgcugcuugaagaugcauugcgccacgaggcaguguuggccgcacuguucggagaggaagugcuagaggagaugagugagcagacaccggguccuuugcccuugagcuacgaacagauccgcguugcccuccaggacgcagcaucggguuugcaagagcaagccuuagggugggacgaauuagccgcaagagugaccgcccuggagcaagccuccgagcccccaagacccgcugaacaucuagagcccucccaugacgcgggaagagaggaggcugccacaacugcacuagccggccuagccagagaauuacaaagcuuaagcaacgacgugaagaacguuggccgauguugcgaagccgaagccggggccggggccgcuucauuaaacgcuagcuuacauggacuccauaaugcccuguucgcuacgcaacggucacuagaacaacaccaaagacuuuuccauucacuguucggcaauuuucagggacugauggaggccaacgucagucuggaccuggggaaacuccaaaccaugcuuuccagaaagggcaagaaacagcagaaggaccucgaagcaccaagaaagcgggacaaaaaagaggccgaacccuuaguggauaucagagucaccggcccagugccaggagcucucggagcugcccucugggaggcugguucuccaguggccuuuuacgccucauucagcgagggaaccgcagcacugcagaccgugaaguucaauacuacauauaucaauauaggcuccucuuacuuucccgaacacggauauuucagggcaccggaaaggggcgucuacuuauucgcugugagugucgaauucggucccgguccugguacagggcaguugguauuuggugggcaccacagaaccccuguuuguacuaccggucagggcucaggcuccacagccaccguuuucgcaauggcagaacuucagaaaggagagagggugugguucgaauugacacaagggucuaucacuaagagaucacuauccggcacggccuuuggaggcuuccugauguuuaagacguag

SEQ ID NO: 216693 - protein, 1298 aa, Artificial Sequence
  derived and/or modified sequence
MAAADAEAVPARGEPQQDCCVKTELLGEETPMAADEGSAEKQAGEAHMAADGETNGSCENSDASSHANAAKHTQDSARVNPQDGTNTLTRIAENGVSERDSEAAKQNHVTADDFVQTSVIGSNGYILNKPALQAQPLRTTSTLASSLPGHAAKTLPGGAGKGRTPSAFPQTPAAPPATLGEGSADTEDRKLPAPGADVKVHRARKTMPKSVVGLHAASKDPREVREARDHKEPKEEINKNISDFGRQQLLPPFPSLHQSLPQNQCYMATTKSQTACLPFVLAAAVSRKKKRRMGTYSLVPKKKTKVLKQRTVIEMFKSITHSTVGSKGEKDLGASSLHVNGESLEMDSDEDDSEELEEDDGHGAEQAAAFPTEDSRTSKESMSEADRAQKMDGESEEEQESVDTGEEEEGGDESDLSSESSIKKKFLKRKGKTDSPWIKPARKRRRRSRKKPSGALGSESYKSSAGSAEQTAPGDSTGYMEVSLDSLDLRVKGILSSQAEGLANGPDVLETDGLQEVPLCSCRMETPKSREITTLANNQCMATESVDHELGRCTNSVVKYELMRPSNKAPLLVLCEDHRGRMVKHQCCPGCGYFCTAGNFMECQPESSISHRFHKDCASRVNNASYCPHCGEESSKAKEVTIAKADTTSTVTPVPGQEKGSALEGRADTTTGSAAGPPLSEDDKLQGAASHVPEGFDPTGPAGLGRPTPGLSQGPGKETLESALIALDSEKPKKLRFHPKQLYFSARQGELQKVLLMLVDGIDPNFKMEHQNKRSPLHAAAEAGHVDICHMLVQAGANIDTCSEDQRTPLMEAAENNHLEAVKYLIKAGALVDPKDAEGSTCLHLAAKKGHYEVVQYLLSNGQMDVNCQDDGGWTPMIWATEYKHVDLVKLLLSKGSDINIRDNEENICLHWAAFSGCVDIAEILLAAKCDLHAVNIHGDSPLHIAARENRYDCVVLFLSRDSDVTLKNKEGETPLQCASLNSQVWSALQMSKALQDSAPDRPSPVERIVSRDIARGYERIPIPCVNAVDSEPCPSNYKYVSQNCVTSPMNIDRNITHLQYCVCIDDCSSSNCMCGQLSMRCWYDKDGRLLPEFNMAEPPLIFECNHACSCWRNCRNRVVQNGLRARLQLYRTRDMGWGVRSLQDIPPGTFVCEYVGELISDSEADVREEDSYLFDLDNKDGEVYCIDARFYGNVSRFINHHCEPNLVPVRVFMAHQDLRFPRIAFFSTRLIEAGEQLGFDYGERFWDIKGKLFSCRCGSPKCRHSSAALAQRQASAAQEAQEDGLPDTSSAAAADPL

SEQ ID NO: 216694 - DNA, 3897 bp, Artificial Sequence
  derived and/or modified sequence
atggctgcagcagacgcagaagctgtgcccgcaaggggggaacctcagcaggattgttgtgtgaaaactgagcttctaggagaagaaactcccatggctgctgacgaagggtccgctgagaagcaggccggagaagctcacatggcagctgatggagagaccaacggctcttgtgaaaactcagatgcctctagtcacgctaatgctgctaaacatacccaggacagcgccagagtgaatccgcaggatggtaccaatactctgacccgcattgctgaaaacggggtgtctgaaagggactcggaagcagcgaagcagaatcacgtcactgcagatgactttgtccaaacatccgtgatcggatccaatggctacattctaaataagccggcactgcaagcacagcctttacggaccacatctacactggcgtcaagcctcccagggcatgccgcaaagaccctgcctggaggggctgggaaggggcggactccatccgcctttccacagacaccggcggctccccccgctacactgggtgagggctccgctgacaccgaggatcgcaagttacccgcacccggcgctgatgtgaaagttcatagggctcgcaagactatgccaaagtctgtcgtcggactgcacgccgccagcaaggatcctagagaagttagagaggccagggaccataaggaacccaaggaagagatcaacaagaatatctctgattttggccggcagcagctgctgcctcctttcccttcgctgcaccagtcgcttccacagaaccagtgctacatggctacaacaaagtcccagaccgcttgtctgcccttcgtgctggctgcagcagtgagccggaaaaaaaagcgacgtatgggcacgtatagcttggtgccaaagaagaagaccaaggtgctcaaacagaggacagttattgagatgtttaaatccattacacatagcactgttggttctaagggagaaaaggatctcggagcctcatcactgcatgttaacggggaaagcctagaaatggattcagatgaggatgactccgaggagttagaggaggacgacggacacggcgccgaacaggctgcagccttcccaaccgaagacagtaggactagcaaggaatcaatgtccgaagccgatagggcccagaagatggacggtgagtcagaagaggagcaggagagtgtggatactggcgaagaggaagaagggggcgatgagtccgacttgagctccgagagttctattaaaaaaaagttcctgaaaaggaagggtaaaacagactctccatggatcaaaccggctaggaagcgcagacggaggtcccgcaagaagccctcgggggcgttaggtagcgagtcctacaaaagctcagccgggtcagcagaacagacagctcccggagattctacaggctacatggaagttagcctcgacagtctggatctacgagtgaaaggcatcctttctagccaggccgaggggctagcgaacgggccagatgttctcgagactgatggactacaggaggtgcctttgtgttcgtgccggatggaaacgccaaagtccagggagattactactctcgccaataatcagtgcatggctacggagtcagtggatcacgagcttggtcggtgcactaatagtgttgtgaagtatgagctgatgcgccctagcaataaagcacctcttctggttttatgtgaggaccaccggggcagaatggtgaagcaccagtgctgtcctgggtgtggctatttctgtacagccggcaactttatggagtgtcagcccgagtcatcaatttcccatcgttttcacaaagactgtgcaagtagggttaacaatgcatcttactgtccccactgcggggaggagagctctaaggctaaagaagttaccattgctaaggccgatacaactagtaccgtgactcctgtgccaggacaggagaagggctctgccctcgagggaagggctgacaccacaaccgggtctgctgctgggccccctctcagcgaagacgacaaattacaaggagccgcatcccatgttcctgaggggttcgaccccacaggacccgctggtctggggagaccgactcctgggttgtctcaaggccccggcaaggagaccctggaatccgcgttaattgcactcgactcagagaagccaaagaaactgcgcttccacccaaagcagctttactttagcgccaggcaaggcgagctgcagaaagtgctgctgatgctcgtggatggaattgatcctaattttaagatggaacatcagaataagcggagccctctccatgccgccgcagaggccggccacgtggacatatgtcacatgctagtgcaggccggtgctaacatcgatacttgctcagaggaccaaaggacgcctctgatggaggctgccgagaacaatcatctggaagcagtgaaatacctcataaaagccggcgctctggtcgaccccaaggacgccgagggaagtacttgcctccatctagccgcaaaaaagggtcactatgaagtcgtgcagtatttgttgtccaatggccagatggatgtcaactgtcaagacgacggaggctggacaccaatgatatgggctacagagtataaacacgtcgatctggtgaagcttctactctcaaaaggctcggatatcaatatcagagacaacgaggagaatatttgtctccattgggcggcgttcagcgggtgcgtggacatcgcagaaatacttctggccgcaaagtgcgacctgcatgcggtgaatattcacggagatagcccccttcacatagccgcccgtgaaaacagatatgattgcgtggtcctgtttctgtcccgggatagcgatgtgacgctcaagaataaagaaggagagactcccctccagtgtgccagcttgaatagtcaggtctggtctgccctgcagatgtccaaagcgctccaagactcggctccggataggccatcccccgtggagcgtattgtgagccgagacattgcacgcggatacgagcggattcctatcccctgcgtgaatgcagtggacagcgagccatgccccagcaattataagtatgtgagccagaactgcgtgacatcacccatgaatattgataggaatatcacccacttgcagtactgcgtgtgcatcgatgactgcagctcctccaactgcatgtgtgggcagctgtcaatgaggtgctggtacgataaagatggccgtttactgccggaatttaacatggctgagcctcccttgatattcgaatgcaaccacgcatgctcctgctggagaaactgccgtaatagagtggttcagaacgggctacgtgcccgcttgcagctctatcggacgagagatatgggatggggagtgaggtctctgcaggacattccccctggcacattcgtgtgtgaatacgtgggggagctgatctcagactcagaagccgacgtcagagaggaggacagttacctgtttgacctggataacaaggacggggaggtttactgcatcgacgctcgtttctacgggaatgttagcaggtttataaatcatcactgtgaaccgaacctggttccagtcagggtattcatggcccaccaggacctaagatttccacggattgctttctttagcacccggctcatcgaggccggggaacaactgggctttgactacggtgagaggttctgggacatcaagggcaaactgttcagctgtcgctgtgggtctccaaagtgtcggcattcgtctgccgcccttgcccagcggcaggcttctgctgcccaggaagcgcaagaggacggactgccggacactagctctgcagccgccgcagatcccctctag

SEQ ID NO: 216695 - DNA, 3897 bp, Artificial Sequence
  derived and/or modified sequence
atggctgctgctgatgctgaggccgtgcctgcccggggggagccccagcaggactgctgcgtgaagacagagctgctgggggaggagacccccatggccgcagatgagggcagcgctgagaagcaggccggggaggcccacatggccgcagatggagagaccaacggcagctgtgaaaattctgatgccagcagccacgccaatgctgccaagcacacccaggacagcgcccgggtgaacccccaggacggcaccaacaccctgaccagaattgctgaaaatggagtgtctgagcgggacagcgaggccgccaagcagaaccacgtgacagcagatgactttgtgcagaccagcgtcatcggcagcaatggctacatcctgaacaagccagccctgcaggcccagcccctgcggaccaccagcaccctggccagcagcctgcccggccatgctgccaagaccctgcccggcggggccgggaaaggaagaacacccagcgccttcccccagaccccagctgcccccccagccaccctgggggagggcagcgctgacacagaggacaggaagctgcctgcccctggagcagatgtgaaggtgcaccgggccaggaagaccatgcccaagtctgtggtgggcctgcacgccgccagcaaggacccccgggaggtgcgggaggcccgggaccacaaggagcccaaggaggagatcaacaagaacatcagtgactttggccggcagcagctgctgccccccttccccagcctgcaccagagcctgccccagaaccagtgctacatggccaccaccaagagccagacagcctgcctgccctttgtgctggccgctgctgtgtccaggaagaagaagaggaggatgggcacctacagcctggtgcccaagaagaagaccaaggtgctgaagcagaggacagtgattgagatgttcaagagcatcacccacagcacagtgggcagcaaaggagagaaggacctgggcgccagcagcctgcacgtgaatggagagagcctggagatggacagtgatgaagatgattctgaggagctggaggaggatgatggccacggggctgagcaggccgccgccttccccacagaggacagcaggaccagcaaggagagcatgtctgaggccgaccgggcccagaagatggatggagagagcgaggaggagcaggagagcgtggacaccggggaggaggaggagggcggagatgaaagtgacctgagcagcgagagcagcatcaagaagaagttcctgaagaggaagggcaagacagacagcccctggatcaagccagccaggaagagaagaagaagaagcaggaagaagcccagcggggccctgggcagcgagagctacaagagcagcgctggcagcgctgagcagacagcccctggggacagcacaggctacatggaggtgtccctggacagcctggacctgcgggtgaagggcatcctgagcagccaggccgagggcctggccaacggcccagatgtgctggagacagatggcctgcaggaggtgcccctgtgcagctgcaggatggagacccccaagagccgggagatcaccaccctggccaacaaccagtgcatggccacagaatctgtggaccacgagctgggccgctgcaccaacagcgtggtgaagtatgagctgatgaggcccagcaacaaggcccccctgctggtgctgtgtgaggaccaccggggccgcatggtgaagcaccagtgctgccccggctgcggctacttctgcacagctggcaacttcatggagtgccagcctgagagcagcatcagccaccgcttccacaaggactgtgccagccgggtgaacaatgccagctactgcccccactgtggggaggagagcagcaaggccaaggaggtgaccatcgccaaggctgacaccaccagcacagtgacccctgtgcccggccaggagaagggcagcgccctggagggccgggctgacaccaccactggatctgctgctggcccccccctgtctgaagatgacaagctgcagggcgccgccagccacgtgcctgagggctttgaccccactggacctgctggcctgggccggcccaccccaggcctgagccagggccctgggaaggagaccctggagagcgccctgattgccctggacagcgagaagcccaagaagctgcgcttccaccccaagcagctgtacttcagcgcccggcagggcgagctgcagaaggtgctgctgatgctggtggatggcatcgaccccaacttcaagatggagcaccagaacaagaggagccccctgcatgctgctgctgaggccggccacgtggacatctgccacatgctggtgcaggccggggccaacatcgacacctgcagcgaggaccagaggacccccctgatggaggccgctgagaacaaccacctggaggccgtgaagtacctgatcaaggccggggccctggtggaccccaaggatgctgagggcagcacctgcctgcacctggccgccaagaagggccactatgaggtggtgcagtacctgctgagcaatggccagatggatgtgaactgccaggatgatggcggctggacccccatgatctgggccacagagtacaagcacgtggacctggtgaagctgctgctgagcaaaggaagtgacatcaacatccgggacaatgaggagaacatctgcctgcactgggccgccttcagcggctgtgtggacattgctgagatcctgctggccgccaagtgtgacctgcatgctgtgaacatccacggggacagccccctgcacatcgccgccagagaaaatagatatgactgtgtggtgctcttcctgagccgggacagtgatgtgaccctgaagaacaaggagggggagacccccctgcagtgtgccagcctgaacagccaggtgtggagcgccctgcagatgagcaaggccctgcaggacagcgccccagaccggcccagccctgtggagagaattgtgtcccgggacatcgcccggggctatgaaagaatccccatcccctgtgtgaatgctgtggacagcgagccctgccccagcaactacaagtatgtgtcccagaactgtgtgaccagccccatgaacatcgacaggaacatcacccacctgcagtactgtgtgtgcattgatgactgcagcagcagcaactgcatgtgtggccagctgtccatgcgctgctggtatgacaaggatggccgcctgctgcctgagttcaacatggccgagcccccactcatctttgagtgcaaccacgcctgcagctgctggaggaactgcaggaacagagtggtgcagaatggcctgcgggcccggctgcagctgtaccgcacccgggacatgggctggggcgtgcgcagcctgcaggacatccccccaggcacctttgtgtgtgaatatgtgggggagctgatcagtgacagcgaggctgatgtgcgggaggaggacagctacctgtttgacctggacaacaaggatggagaggtgtactgcattgatgcccgcttctatggaaatgtgagccgcttcatcaaccaccactgtgagcccaacctggtgcctgtgcgggtcttcatggcccaccaggacctgcgcttcccccgcatcgccttcttcagcaccaggctcatcgaggccggggagcagctgggctttgattatggagagcgcttctgggacatcaagggcaagctgttcagctgccgctgtggcagccccaagtgccgccacagcagcgctgccctggcccagaggcaggccagcgctgcccaggaggcccaggaggatggcctgcctgacaccagcagcgctgctgctgctgaccccctgtag

SEQ ID NO: 216696 - DNA, 3897 bp, Artificial Sequence
  derived and/or modified sequence
atggccgccgccgacgccgaggccgtgcccgcccggggcgagccccagcaggattgctgcgttaagaccgaactgcttggggaagaaactcctatggccgcagacgaagggtccgctgagaaacaggccggcgaggctcacatggccgcagacggtgagacaaacggatcttgcgagaatagtgacgcctcctctcacgccaatgcagccaagcacacgcaggacagcgctcgggtgaatccacaggatggaacgaatactttgaccagaatcgcagagaacggcgttagtgagagagacagtgaggcagccaaacagaaccatgtaactgcagacgactttgtccagaccagtgtcattggatccaacggctacatcctgaataaaccagctctccaggcccagcccctacggacaacttccaccttggcaagtagtttaccagggcacgccgcgaagactcttcctggtggcgccggtaaagggcggactcccagcgcattccctcagacccccgcagcgcccccggcaacgttaggcgagggttctgctgataccgaagatagaaagttgccggcgcccggcgctgacgtcaaggtgcatcgtgccagaaagactatgcctaaaagcgtggtgggtctgcacgccgcaagcaaggatcctcgagaagttcgggaagcccgggatcacaaagaaccaaaagaagaaattaataagaacatttccgatttcgggcgccagcagttgctgcctcccttcccttcactacaccaatccctaccacagaaccaatgttacatggctaccaccaagagtcagacagcctgcttaccatttgtcctcgctgccgccgtcagccgcaagaaaaagcggcgcatgggcacctactccttagttccaaagaaaaagacaaaggtgttgaagcagcgaaccgtcatcgagatgttcaaaagcatcacacacagtacagttggtagcaagggtgagaaggaccttggggcaagctcactccacgtgaatggagagtcattagagatggattccgacgaggatgatagcgaagaattagaggaggatgatggccacggagccgaacaggctgctgcattcccaacggaagattctcggactagcaaagaaagcatgagcgaggccgaccgtgcccagaagatggatggggagagtgaggaagagcaggagagtgtcgacaccggcgaggaggaagaaggcggtgacgaatcagatctctcaagcgagtcatctatcaagaaaaagtttcttaaacgaaaggggaagaccgactctccatggatcaagccagcaaggaagcgccgtcgcagatcaaggaagaagccatcgggagctctcggatctgaatcttacaaatcctcggctggctctgctgagcagaccgctcctggcgatagcaccggctacatggaggtgtcgcttgattccttggacttgcgagtaaaaggcatcctctcctcgcaagccgagggactcgctaatgggccagacgtactcgaaacagacggccttcaggaagtgcctttgtgttcctgccgaatggaaactcccaaatcaagagagataaccaccctggctaataaccaatgcatggctaccgagtcagttgatcatgagttaggacggtgtacgaattcagttgtgaaatacgaactgatgcggccctcaaacaaagcccccctgctcgtcctgtgtgaggatcaccgcggccgaatggttaagcatcagtgttgccctgggtgtgggtatttttgtactgccggaaacttcatggagtgtcaacctgagagctcgattagccaccgctttcacaaggactgtgcctccagagtgaacaatgcaagctactgtccacattgtggtgaggagagtagtaaagcaaaagaggtgaccatcgctaaggcggacacgacgtcaacggtgactcctgtgcccggccaggaaaaagggagtgcactagagggacgcgcggacaccaccactgggagcgccgcgggccctccattgtctgaggatgacaaattacagggggctgcctcccacgtcccggaaggttttgatcctactggaccggccgggctcgggcgacctaccccagggctgagccagggcccagggaaggaaaccttggagagtgcccttatcgcactggactccgagaaacctaagaagctaagatttcaccctaaacagctgtatttcagcgcacgccaaggagagctgcaaaaggttctcctcatgctcgtagatggcatcgatccaaactttaaaatggaacatcaaaataaaaggtcccccctccacgcggcagctgaagctggtcacgtcgatatttgtcatatgctggtgcaggccggcgcaaacatagatacctgttcagaggaccagcgcacaccattgatggaagctgcagagaacaaccacttggaggccgttaagtatctcatcaaggctggggccctggtggatccaaaagatgctgaggggtccacatgcctgcacttggcagccaaaaaaggacactacgaggtggtgcagtacttgctctctaacggacaaatggatgtcaattgtcaggatgacggcggttggactcctatgatctgggctacagaatacaagcacgtggacttagtgaagctcctcctctcaaaaggaagcgacatcaatatcagagacaatgaagaaaacatatgcctgcactgggccgccttttcaggatgtgtggacattgcagagattcttctcgcagcgaagtgtgacctgcacgctgtcaacattcatggcgacagtcccttgcacatagcagctcgggagaaccggtacgattgcgttgttctcttcctctcaagagatagcgatgtaaccctgaagaataaagaaggcgagacgcccctccaatgcgcttcattgaattcacaggtgtggtccgccctccaaatgtccaaggccttgcaggattcagcaccggaccgcccatcgcccgtcgaaaggatcgtttcccgcgacatcgccagagggtacgaaagaatacccatcccatgtgttaatgctgtggattcagaaccttgcccttcgaactataagtatgtgagccagaattgcgtcacctcccccatgaacattgataggaacattacacatctccagtattgtgtatgtatcgacgattgttcatcatctaattgcatgtgtggccagctcagtatgaggtgttggtacgataaggatgggaggttgctgcccgagtttaatatggccgagccacccttgatcttcgagtgcaaccacgcttgtagctgctggaggaactgccgcaaccgcgtcgttcagaacggcttaagagcccggctgcagttatataggacccgcgatatgggctggggcgtgaggtcactgcaagacattcctccggggactttcgtgtgcgagtacgtgggcgagctgatttccgattccgaagcagacgtgcgtgaggaagatagctacctttttgacctagacaacaaggacggagaggtatattgtatcgatgccaggttttatggcaatgtaagcaggtttatcaatcaccactgcgagccgaatcttgtgcctgtcagagtcttcatggcacaccaggatctgcgattccccaggatcgccttcttctccacacgtctcatcgaagccggggagcagcttggttttgattacggcgaacggttctgggacatcaaaggaaaactgtttagctgccgatgcggttctccaaaatgtaggcactcctcagccgcattggcccagcgccaggcctcggctgcacaggaggcccaggaagacggtctgccagatacttcctcagccgccgccgcggaccctctgtag

SEQ ID NO: 216697 - DNA, 3897 bp, Artificial Sequence
  derived and/or modified sequence
atggccgctgcggatgccgaggccgtacccgcaaggggcgagcctcaacaagattgctgtgtgaaaacagaactcctgggtgaagagaccccaatggccgctgatgagggatctgccgaaaagcaggccggagaggctcatatggctgcagatggcgagaccaatggcagttgtgagaatagtgatgcctcttcacacgccaatgcagctaagcatacccaggacagcgcaagggtaaatccccaggacgggaccaacacacttactcgtattgcagagaacggggtgtctgaacgggactccgaagccgctaaacaaaaccacgtaacggccgacgactttgttcaaacgtccgtgataggtagcaatgggtacatcttgaataaaccggcactccaggcccaaccccttcggactacgtctacattggcgagtagcttacccggtcacgccgcaaaaacgcttcccggtggcgcaggaaaaggtagaactccctctgccttcccacagacacccgctgccccaccagccactctgggcgagggttccgcagatacagaagaccgcaaactgccagctcccggtgctgatgtcaaagtgcacagggctcgcaagactatgccgaagagtgttgtgggcttgcatgctgcttctaaagacccacgcgaggtcagagaggctcgtgatcataaagaaccgaaggaggaaatcaataagaacatttcggacttcggcagacagcagttgttacccccttttccctcattgcaccaatcactgccacagaatcaatgctatatggccaccactaagtcccagaccgcttgcctgccatttgttctggctgccgctgtttcacggaaaaaaaagagaaggatgggcacttattctttagttccaaagaagaaaaccaaggtcctgaaacaacgaactgtgatcgagatgtttaagtctataacgcacagcactgtggggtcaaaaggagaaaaagatctcggagccagctcactgcacgtcaacggagaaagccttgagatggatagtgatgaggacgactccgaagaattagaagaggacgatggacatggggctgaacaagccgctgcatttcccacggaagactcccggacctctaaagaatctatgtcggaggcagatagggctcagaagatggatggagaaagcgaggaggagcaggaatcagttgacactggagaagaggaggaagggggagacgaaagcgacctgagctcggaaagttccatcaaaaagaaatttctgaaacgcaaggggaaaactgactctccttggatcaagccagcccgaaagagacgtcgccgatcgcggaagaagccctccggcgctttgggctcggaaagctacaaatcctccgcaggatctgctgaacagacagctccaggagactctacagggtatatggaggtcagtctagacagcctagacttaagagtgaaaggcatcctcagctcccaagctgaaggcctggctaacggtcccgatgtcttggagacagatggactacaggaggtgccgctctgcagctgccggatggagacaccaaagagtagggagatcacaactctggcaaataaccaatgtatggcgaccgagagtgttgatcatgaactgggacgctgcacaaatagtgtggtcaagtatgaactgatgcggccttctaataaagccccactgctggttctgtgcgaagaccacagaggaaggatggtgaagcatcagtgctgccctggatgcggttatttttgcactgctgggaactttatggagtgccaacctgaatcttccatatctcatcgtttccacaaagattgtgcctcccgagtcaataatgcctcctactgcccacattgcggagaggagagctctaaagcaaaggaggtgacaattgccaaggccgatacaacctccaccgtgacccctgtgcctggccaggaaaagggttcagcacttgagggtcgggctgacaccacaaccgggtccgccgcagggccaccactttccgaggatgacaaactccagggtgccgctagccacgtgcctgaaggcttcgaccccacaggcccagccggtttggggcgaccaacgccaggtctgagccaagggcctggaaaagagactctagaaagcgcgctcattgcattggacagcgaaaaaccaaaaaagctgcgatttcatccgaagcagttgtacttcagtgcccgtcaaggagagctacagaaggtgctcctgatgctggtggacggaattgaccccaatttcaaaatggagcatcagaataagcgttcgccactccacgcagccgcagaagccggacacgtcgatatttgtcatatgttagtgcaggctggcgctaacatcgatacgtgctctgaagatcagagaacacccttgatggaggcggctgaaaacaatcacctggaggccgtaaaatacttaataaaggccggagccctggtcgatccaaaggatgccgagggatccacatgcctccacctggccgcaaagaagggacactatgaagtggtccaatacctcctgagcaacggccagatggatgtaaattgtcaagatgacggaggttggacgcctatgatctgggctaccgagtataagcacgtcgatcttgtgaagctattacttagcaaggggagcgacatcaatatcagggacaacgaagagaacatttgtcttcactgggcagcattctccgggtgtgtggacatcgccgagatcctcctcgccgcaaaatgcgatttgcacgcagtgaacatccatggcgactcccccctgcatattgctgcccgtgagaatagatatgactgcgtggttttgttcctgtcgcgcgattccgacgtgacgctcaaaaacaaggagggggagactcctctccaatgtgcatccctcaatagtcaggtgtggagcgctctgcagatgagtaaagcactgcaagactctgcacccgaccggccatctcctgtggagcgcattgtctctagggatattgcccgaggatatgagagaatccccattccgtgcgtgaacgccgtggatagcgaaccatgtccttctaactacaaatacgtatcacagaattgcgtcacctctcccatgaacattgacagaaatatcacacatttgcagtactgtgtatgcatcgatgattgctcatcctctaactgtatgtgcggtcagctgtccatgcgatgctggtatgacaaagatggcagattattaccagagttcaatatggccgagccacctcttatattcgagtgcaaccatgcgtgtagctgttggcgaaattgtcggaaccgtgtggtccaaaacggcttgagagctagacttcagctttataggacacgtgacatgggctggggggttaggtccctccaagacatccctcccggaaccttcgtttgtgaatacgttggagagttaatcagtgattctgaggcggatgtgagagaggaggacagctacctgtttgatttggacaacaaggatggggaagtttactgtatcgatgcaagattttacggcaatgtgagccgcttcataaatcaccattgcgaaccaaaccttgtgccagtaagagtctttatggcccatcaggatctgcgattcccaagaatcgctttcttctccacacgtctcattgaggctggggagcagctcggcttcgactacggtgaaagattttgggacatcaaaggcaagcttttcagttgccgatgtggcagccctaagtgtaggcattctagcgccgctctagctcaacgccaggcttctgcagcacaggaagctcaggaagacggattaccagatacgtcaagcgcggcagctgcagatccactgtag

SEQ ID NO: 216698 - DNA, 3897 bp, Artificial Sequence
  derived and/or modified sequence
atggccgccgccgacgccgaggccgtgcccgccagaggcgagccccagcaggactgctgcgtgaagaccgagctgctgggcgaggagacccccatggccgccgacgagggcagcgccgagaagcaggccggcgaggcccacatggccgccgacggcgagaccaacggcagctgcgagaacagcgacgccagcagccacgccaacgccgccaagcacacccaggacagcgccagagtgaacccccaggacggcaccaacaccctgaccagaatcgccgagaacggcgtgagcgagagagacagcgaggccgccaagcagaaccacgtgaccgccgacgacttcgtgcagaccagcgtgatcggcagcaacggctacatcctgaacaagcccgccctgcaggcccagcccctgagaaccaccagcaccctggccagcagcctgcccggccacgccgccaagaccctgcccggcggcgccggcaagggcagaacccccagcgccttcccccagacccccgccgccccccccgccaccctgggcgagggcagcgccgacaccgaggacagaaagctgcccgcccccggcgccgacgtgaaggtgcacagagccagaaagaccatgcccaagagcgtggtgggcctgcacgccgccagcaaggaccccagagaggtgagagaggccagagaccacaaggagcccaaggaggagatcaacaagaacatcagcgacttcggcagacagcagctgctgccccccttccccagcctgcaccagagcctgccccagaaccagtgctacatggccaccaccaagagccagaccgcctgcctgcccttcgtgctggccgccgccgtgagcagaaagaagaagagaagaatgggcacctacagcctggtgcccaagaagaagaccaaggtgctgaagcagagaaccgtgatcgagatgttcaagagcatcacccacagcaccgtgggcagcaagggcgagaaggacctgggcgccagcagcctgcacgtgaacggcgagagcctggagatggacagcgacgaggacgacagcgaggagctggaggaggacgacggccacggcgccgagcaggccgccgccttccccaccgaggacagcagaaccagcaaggagagcatgagcgaggccgacagagcccagaagatggacggcgagagcgaggaggagcaggagagcgtggacaccggcgaggaggaggagggcggcgacgagagcgacctgagcagcgagagcagcatcaagaagaagttcctgaagagaaagggcaagaccgacagcccctggatcaagcccgccagaaagagaagaagaagaagcagaaagaagcccagcggcgccctgggcagcgagagctacaagagcagcgccggcagcgccgagcagaccgcccccggcgacagcaccggctacatggaggtgagcctggacagcctggacctgagagtgaagggcatcctgagcagccaggccgagggcctggccaacggccccgacgtgctggagaccgacggcctgcaggaggtgcccctgtgcagctgcagaatggagacccccaagagcagagagatcaccaccctggccaacaaccagtgcatggccaccgagagcgtggaccacgagctgggcagatgcaccaacagcgtggtgaagtacgagctgatgagacccagcaacaaggcccccctgctggtgctgtgcgaggaccacagaggcagaatggtgaagcaccagtgctgccccggctgcggctacttctgcaccgccggcaacttcatggagtgccagcccgagagcagcatcagccacagattccacaaggactgcgccagcagagtgaacaacgccagctactgcccccactgcggcgaggagagcagcaaggccaaggaggtgaccatcgccaaggccgacaccaccagcaccgtgacccccgtgcccggccaggagaagggcagcgccctggagggcagagccgacaccaccaccggcagcgccgccggcccccccctgagcgaggacgacaagctgcagggcgccgccagccacgtgcccgagggcttcgaccccaccggccccgccggcctgggcagacccacccccggcctgagccagggccccggcaaggagaccctggagagcgccctgatcgccctggacagcgagaagcccaagaagctgagattccaccccaagcagctgtacttcagcgccagacagggcgagctgcagaaggtgctgctgatgctggtggacggcatcgaccccaacttcaagatggagcaccagaacaagagaagccccctgcacgccgccgccgaggccggccacgtggacatctgccacatgctggtgcaggccggcgccaacatcgacacctgcagcgaggaccagagaacccccctgatggaggccgccgagaacaaccacctggaggccgtgaagtacctgatcaaggccggcgccctggtggaccccaaggacgccgagggcagcacctgcctgcacctggccgccaagaagggccactacgaggtggtgcagtacctgctgagcaacggccagatggacgtgaactgccaggacgacggcggctggacccccatgatctgggccaccgagtacaagcacgtggacctggtgaagctgctgctgagcaagggcagcgacatcaacatcagagacaacgaggagaacatctgcctgcactgggccgccttcagcggctgcgtggacatcgccgagatcctgctggccgccaagtgcgacctgcacgccgtgaacatccacggcgacagccccctgcacatcgccgccagagagaacagatacgactgcgtggtgctgttcctgagcagagacagcgacgtgaccctgaagaacaaggagggcgagacccccctgcagtgcgccagcctgaacagccaggtgtggagcgccctgcagatgagcaaggccctgcaggacagcgcccccgacagacccagccccgtggagagaatcgtgagcagagacatcgccagaggctacgagagaatccccatcccctgcgtgaacgccgtggacagcgagccctgccccagcaactacaagtacgtgagccagaactgcgtgaccagccccatgaacatcgacagaaacatcacccacctgcagtactgcgtgtgcatcgacgactgcagcagcagcaactgcatgtgcggccagctgagcatgagatgctggtacgacaaggacggcagactgctgcccgagttcaacatggccgagccccccctgatcttcgagtgcaaccacgcctgcagctgctggagaaactgcagaaacagagtggtgcagaacggcctgagagccagactgcagctgtacagaaccagagacatgggctggggcgtgagaagcctgcaggacatcccccccggcaccttcgtgtgcgagtacgtgggcgagctgatcagcgacagcgaggccgacgtgagagaggaggacagctacctgttcgacctggacaacaaggacggcgaggtgtactgcatcgacgccagattctacggcaacgtgagcagattcatcaaccaccactgcgagcccaacctggtgcccgtgagagtgttcatggcccaccaggacctgagattccccagaatcgccttcttcagcaccagactgatcgaggccggcgagcagctgggcttcgactacggcgagagattctgggacatcaagggcaagctgttcagctgcagatgcggcagccccaagtgcagacacagcagcgccgccctggcccagagacaggccagcgccgcccaggaggcccaggaggacggcctgcccgacaccagcagcgccgccgccgccgaccccctgtag

SEQ ID NO: 216699 - DNA, 1251 bp, Artificial Sequence
  derived and/or modified sequence
atggccaccagaagcagcgactggctgagaagacccctgggcgaggacaaccagcccgagacccagctgttctgggacaaggagccctggttctggcacgacaccctgaccgagcagctgtggagaatcttcgccggcgtgcacgacgagaaggccaagcccagagacagacagcaggcccccggcctgggccaggagagcaaggcccccggcagctgcgaccccggcaccgacccctgccccgaggacgccagcacccccagaccccccgaggccagcagcagcccccccgagggcagccaggacagaaacaccagctggggcgtggtgcaggagccccccggcagagccagcagattcctgcagagcatcagctgggaccccgaggacttcgaggacgcctggaagagacccgacgccctgcccggccagagcaagagactggccgtgccctgcaagctggagaagatgagaatcctggcccacggcgagctggtgctggccaccgccatcagcagcttcaccagacacgtgttcacctgcggcagaagaggcatcaaggtgtggagcctgaccggccaggtggccgaggacagattccccgagagccacctgcccatccagacccccggcgccttcctgagaacctgcctgctgagcagcaacagcagaagcctgctgaccggcggctacaacctggccagcgtgagcgtgtgggacctggccgcccccagcctgcacgtgaaggagcagctgccctgcgccggcctgaactgccaggccctggacgccaacctggacgccaacctggccttcgccagcttcaccagcggcgtggtgagaatctgggacctgagagaccagagcgtggtgagagacctgaagggctaccccgacggcgtgaagagcatcgtggtgaagggctacaacatctggaccggcggccccgacgcctgcctgagatgctgggaccagagaaccatcatgaagcccctggagtaccagttcaagagccagatcatgagcctgagccacagcccccaggaggactgggtgctgctgggcatggccaacggccagcagtggctgcagagcaccagcggcagccagagacacatggtgggccagagacagagacaccccgagagacaggtgctgcccctgtggcccgtggtgggcaagagatggaacggcagactgccctggagactgcagcacgccggcggcgacaagagcgtgagaggcgcctag

SEQ ID NO: 216700 - DNA, 1350 bp, Artificial Sequence
  derived and/or modified sequence
atggccaccagaagcagcgactggctgagaagacccctgggcgaggacaaccagcccgagacccagctgttctgggacaaggagccctggttctggcacgacaccctgaccgagcagctgtggagaatcttcgccggcgtgcacgacgagaaggccaagcccagagacagacagcaggcccccggcctgggccaggagagcaaggcccccggcagctgcgaccccggcaccgacccctgccccgaggacgccagcacccccagaccccccgaggccagcagcagcccccccgagggcagccaggacagaaacaccagctggggcgtggtgcaggagccccccggcagagccagcagattcctgcagagcatcagctgggaccccgaggacttcgaggacgcctggaagagacccgacgccctgcccggccagagcaagagactggccgtgccctgcaagctggagaagatgagaatcctggcccacggcgagctggtgctggccaccgccatcagcagcttcaccagacacgtgttcacctgcggcagaagaggcatcaaggtgtggagcctgaccggccaggtggccgaggacagattccccgagagccacctgcccatccagacccccggcgccttcctgagaacctgcctgctgagcagcaacagcagaagcctgctgaccggcggctacaacctggccagcgtgagcgtgtgggacctggccgcccccagcctgcacgtgaaggagcagctgccctgcgccggcctgaactgccaggccctggacgccaacctggacgccaacctggccttcgccagcttcaccagcggcgtggtgagaatctgggacctgagagaccagagcgtggtgagagacctgaagggctaccccgacggcgtgaagagcatcgtggtgaagggctacaacatctggaccggcggccccgacgcctgcctgagatgctgggaccagagaaccatcatgaagcccctggagtaccagttcaagagccagatcatgagcctgagccacagcccccaggaggactgggtgctgctgggcatggccaacggccagcagtggctgcagagcaccagcggcagccagagacacatggtgggccagaaggacagcgtgatcctgagcgtgaagttcagccccttcggccagtggtgggccagcgtgggcatggacgacttcctgggcgtgtacagcatgcccgccggcaccaaggtgttcgaggtgcccgagatgagccccgtgacctgctgcgacgtgagcagcaacaacagactggtggtgaccggcagcggcgagcacgccagcgtgtaccagatcacctactag

SEQ ID NO: 216701 - DNA, 1251 bp, Artificial Sequence
  derived and/or modified sequence
atggcaacaaggtctagcgattggctgcgtagaccacttggcgaggacaaccagccagagacacagcttttttgggacaaagagccttggttttggcacgacacgttgacagagcagctttggcgcatatttgccggagtgcacgacgaaaaagcaaaaccgagagatagacagcaagccccaggcctgggtcaggagtcaaaagcacctggcagttgtgatccaggcaccgacccctgtccggaggatgcatctactccgaggccccctgaggccagttcttccccacccgaggggagccaagacagaaacacatcgtggggagtcgtccaggagcctcctggacgcgcaagccggtttttacagtcgatctcttgggaccctgaagactttgaggacgcatggaagcgccccgacgccctcccggggcagagtaagagattggcggtgccttgcaaacttgagaagatgaggatcttggcccatggcgaattggtgctggcgacagccatcagcagctttacacggcacgtgttcacgtgcggtaggaggggtatcaaggtatggtctctaaccgggcaggtagctgaggatcgcttccctgaatcccacttacctatacagacacctggagctttcctgcgaacctgcctcctgagtagcaacagccggtccctcctgactgggggctataaccttgcgtccgtttctgtgtgggacttagccgcgccctccctgcatgtgaaggagcagctgccctgtgcaggcctgaactgtcaggcccttgacgcaaatttggatgcaaatttggcgtttgccagctttacatcaggagtggtgaggatttgggacttaagagaccaatccgtggtgagagacttgaaaggatacccggatggtgttaagagcatcgtggtgaagggctacaatatatggacggggggtcccgacgcctgtctgagatgctgggaccagcggactataatgaaacccctggagtatcagttcaagtcacagattatgtcactcagccattcaccgcaggaagattgggtgctgctgggcatggccaacggacagcagtggctgcagtccacttccggctcgcagaggcacatggtgggacagaggcagcgccatccggaacgccaagtactcccactgtggcctgtggtgggtaaaaggtggaacgggaggctgccatggcggttgcagcatgctggcggtgataagagcgtaagaggggcctag

SEQ ID NO: 216702 - DNA, 1350 bp, Artificial Sequence
  derived and/or modified sequence
atggccacgaggagtagcgactggctgcggcgcccactgggtgaggacaaccaaccagaaacacaattgttctgggataaggaaccttggttctggcacgatacactgactgagcagctgtggcggatcttcgcaggagtgcatgacgagaaggctaaacctcgcgatcggcaacaagcccctggtctggggcaagaatccaaagcacctggttcatgcgatcccggcacggatccatgtcccgaggacgcctcaacaccaaggccacctgaggcgtctagtagcccgcccgagggctcacaggataggaatacctcatggggtgtggtgcaggaaccaccaggtagagcctctcgttttctgcaaagtatttcatgggatcctgaggactttgaagatgcctggaagcgtcccgatgccctgcctggccagagtaaacgacttgccgtcccttgcaagttagaaaaaatgcgcatcctcgcacatggagaactggtgttggcaacagctatcagtagcttcacccggcatgtgttcacctgtggcaggaggggcatcaaggtttggtccctaaccgggcaggtcgccgaagacagatttccagaaagccatctcccgatccaaacccccggagccttcctccggacatgcttactttcatctaactctcggtctctcttgactggaggctacaatcttgcgagcgtgtctgtatgggatttggcggcccccagcctgcacgtcaaagaacagcttccttgtgcggggctgaattgtcaggccctagacgccaaccttgacgccaatctggcgttcgcatcctttacaagcggggttgttcgaatttgggacttacgggatcagagcgtcgtgcgcgatcttaagggctacccggatggggttaagagcatcgtcgtgaagggctataatatctggacagggggaccggacgcatgcctgagatgttgggaccaaaggaccatcatgaagccactggaataccaattcaaaagtcagattatgagcctgagtcattccccccaggaggactgggttctcctgggtatggctaacgggcaacagtggttacagagtacctccggtagccagcgccatatggtcgggcagaaagattcagttatcctcagcgttaagttcagccctttcggacaatggtgggctagcgtcgggatggatgatttcctcggtgtttactccatgccagcagggaccaaggtgtttgaagtgccagaaatgtctccggtcacatgttgcgatgtatctagcaataataggttggttgtgacagggagcggggagcacgccagtgtttaccagatcacatactag

SEQ ID NO: 216703 - DNA, 1251 bp, Artificial Sequence
  derived and/or modified sequence
atggccaccaggagcagtgactggctgcggcggcccctgggggaggacaaccagcctgagacccagctgttctgggacaaggagccctggttctggcatgacaccctgacagagcagctgtggaggatctttgctggggtgcatgatgagaaggccaagccccgggaccggcagcaggcccctggcctgggccaggagagcaaggcccctggcagctgtgaccctggaacagacccctgcccagaagatgccagcacccccaggcctcctgaggccagcagcagccccccagagggcagccaggacaggaacacctcctggggcgtggtgcaggagcccccaggccgggccagccgcttcctgcagagcatctcctgggaccctgaagattttgaagatgcctggaagaggccagatgccctgcccggccagagcaagaggctggccgtgccctgcaagctggagaagatgaggatcctggcccacggggagctggtgctggccacagccatcagcagcttcaccaggcatgtgttcacctgtggcagaagaggcatcaaggtgtggagcctgaccggccaggtggctgaagatcgcttccctgagagccacctgcccatccagacccctggggccttcctgcggacctgcctgctgagcagcaacagccgcagcctgctgaccggcggctacaacctggcctctgtgtctgtgtgggacctggccgcccccagcctgcacgtgaaggagcagctgccctgtgccggcctgaactgccaggccctggatgccaacctggatgccaacctggcctttgccagcttcaccagcggcgtggtgcgcatctgggacctgcgggaccagagcgtggtgcgggacctgaagggctacccagatggagtgaagagcatcgtggtgaagggctacaacatctggacaggaggcccagatgcctgcctgcgctgctgggaccagaggaccatcatgaagcccctggagtaccagttcaagagccagatcatgagcctgagccacagcccccaggaggactgggtgctgctgggcatggccaacggccagcagtggctgcagagcaccagcggcagccagaggcacatggtgggccagaggcagaggcaccctgagcggcaggtgctgcccctgtggcctgtggtgggcaagcgctggaatggccgcctgccctggaggctgcagcacgccggcggggacaagtctgtgcggggggcctag

SEQ ID NO: 216704 - DNA, 1350 bp, Artificial Sequence
  derived and/or modified sequence
atggccaccaggagcagtgactggctgcggcggcccctgggggaggacaaccagcctgagacccagctgttctgggacaaggagccctggttctggcatgacaccctgacagagcagctgtggaggatctttgctggggtgcatgatgagaaggccaagccccgggaccggcagcaggcccctggcctgggccaggagagcaaggcccctggcagctgtgaccctggaacagacccctgcccagaagatgccagcacccccaggcctcctgaggccagcagcagccccccagagggcagccaggacaggaacacctcctggggcgtggtgcaggagcccccaggccgggccagccgcttcctgcagagcatctcctgggaccctgaagattttgaagatgcctggaagaggccagatgccctgcccggccagagcaagaggctggccgtgccctgcaagctggagaagatgaggatcctggcccacggggagctggtgctggccacagccatcagcagcttcaccaggcatgtgttcacctgtggcagaagaggcatcaaggtgtggagcctgaccggccaggtggctgaagatcgcttccctgagagccacctgcccatccagacccctggggccttcctgcggacctgcctgctgagcagcaacagccgcagcctgctgaccggcggctacaacctggcctctgtgtctgtgtgggacctggccgcccccagcctgcacgtgaaggagcagctgccctgtgccggcctgaactgccaggccctggatgccaacctggatgccaacctggcctttgccagcttcaccagcggcgtggtgcgcatctgggacctgcgggaccagagcgtggtgcgggacctgaagggctacccagatggagtgaagagcatcgtggtgaagggctacaacatctggacaggaggcccagatgcctgcctgcgctgctgggaccagaggaccatcatgaagcccctggagtaccagttcaagagccagatcatgagcctgagccacagcccccaggaggactgggtgctgctgggcatggccaacggccagcagtggctgcagagcaccagcggcagccagaggcacatggtgggccagaaggacagcgtcatcctgtctgtgaagttcagccccttcggccagtggtgggcctctgtgggcatggatgacttcctgggcgtgtacagcatgcctgctggcaccaaggtgtttgaggtgcctgagatgagccctgtgacctgctgtgatgtgagcagcaacaaccggctggtggtgacaggcagcggggagcacgcctctgtgtaccagatcacctactag

SEQ ID NO: 216705 - DNA, 1251 bp, Artificial Sequence
  derived and/or modified sequence
atggccacccggagcagcgactggctgcggcggcccctgggcgaggataatcagccagagactcagctcttctgggacaaagagccatggttttggcatgatacactgaccgaacagctgtggaggattttcgccggtgtgcatgatgaaaaagcaaagcctagagatcgacagcaagcacctgggctcggacaggaatctaaggcacccggaagctgcgatccaggaacggatccctgcccggaggatgcctctacccctcgccctcctgaggcctcttcctccccccccgaagggtcccaggatcggaacacatcttggggtgtggtccaggagcccccaggtcgcgcctcacgcttcttgcagagtatcagttgggaccctgaagattttgaggacgcgtggaagcgacccgatgccttgcccggccagtccaaaagactggctgtaccttgtaaacttgaaaagatgaggatcttggcccatggtgaactcgtgctggctacagccattagttctttcacaagacacgtctttacttgcggaagacgcgggattaaggtgtggagcctcacaggccaggtcgccgaagaccggttccctgaatctcatctccccatacagacccccggtgcattcctgcgtacatgcctgttgtcttctaattcaagatcccttttgactggcgggtacaacttggctagtgtttccgtgtgggatctggccgcgccgagtcttcacgttaaggagcagttgccatgcgccgggctgaattgccaggccctcgatgcaaatttggatgcaaatttagccttcgcctcgtttaccagcggcgtcgtgaggatctgggacctgcgggaccagagtgtggtaagagacctcaagggctaccccgatggggtaaagtccattgtcgtcaaaggttataacatctggactggaggccccgatgcatgtctccgatgctgggatcagcgaaccatcatgaaaccactggagtaccagtttaaatcccagattatgtcgctgtcccatagtccgcaggaggactgggtgcttcttggcatggcaaacgggcagcagtggctgcagtcgacgtctgggtctcaaagacatatggtagggcaaagacagagacaccccgagagacaggttctccccctgtggcctgtggtcggcaaaagatggaacggcaggcttccttggcgccttcagcatgctgggggggacaaaagcgtgagaggcgcctag

SEQ ID NO: 216706 - DNA, 1350 bp, Artificial Sequence
  derived and/or modified sequence
atggccacccggagcagcgactggctgcggcggcccctgggcgaggacaaccagcccgagacgcagctgttttgggacaaagagccctggttctggcatgacacactgaccgaacagctgtggcggatctttgcaggagtgcacgacgaaaaagcaaagccccgggatcggcagcaggcgcccggccttggacaagaatcgaaggcccccggaagctgtgaccctggtaccgatccctgtcccgaggacgcctctaccccccggcctcctgaagccagttctagccccccagagggttctcaggaccgcaatacgtcttggggagtcgtgcaggagccccccggcagagcgtccagatttctgcagtcgatcagttgggatcctgaagattttgaggacgcctggaagcggcccgacgccctgcccggacagagcaagcgactcgccgttccatgtaaactggaaaagatgagaattctggcccacggagagctagtccttgccaccgcaatcagttccttcacccggcacgtatttacctgcgggagacggggaatcaaggtttggtctctaaccggccaggtggccgaggaccgctttccagagagtcaccttccgattcagactcctggagcttttttgcgaacttgcctactgtcttctaacagcaggtccctcctgactggtggctacaacctcgccagtgtatccgtgtgggatttggctgcccctagcctacacgtaaaagagcagctgccctgcgccggtttgaactgccaggccctggatgccaatctggatgccaatctcgctttcgcttcctttaccagcggtgtggtgaggatttgggacctgcgagaccaatccgtggttagagacctgaagggctaccccgacggggtgaaaagtatcgtagtcaagggctacaatatttggaccgggggccccgacgcttgcctgcgttgctgggaccagagaacaattatgaagccattagaatatcaattcaagagccagattatgtcactgagccacagtccacaggaggattgggtgctcctcggcatggctaatggccaacagtggctgcaaagcacatccggctcgcagcgacatatggtggggcagaaagacagtgtcatcctatctgtgaaattcagcccgttcggtcagtggtgggctagcgtcgggatggacgatttcctgggggtgtatagtatgccagcaggaaccaaggtcttcgaggtgcctgagatgagtccggtgacatgctgtgacgtctcatccaataacagactggtagtcacggggtccggcgagcatgcttctgtttaccagatcacttattag

SEQ ID NO: 216707 - DNA, 1251 bp, Artificial Sequence
  derived and/or modified sequence
atggcaacaaggagttcagattggcttcgcagacccctcggcgaggataaccagcccgaaactcagctgttctgggacaaagagccgtggttttggcatgataccctcaccgaacagctttggaggatcttcgccggtgtgcatgatgaaaaggctaagcccagggacagacagcaggcaccgggacttggtcaggaaagtaaggctcctgggtcttgcgaccccggaacagacccatgtcccgaggatgcctcaacacccagaccaccagaggcttcatcatccccacccgaggggagccaggaccggaatactagctggggcgtggtacaagaacctccaggtcgggcatcccggttcctccagtcaatctcttgggacccagaagatttcgaagacgcatggaagaggccagatgctctccctggacagagtaaaaggctggccgtcccctgtaaactggaaaagatgcgaattctggcacatggggagctggtactcgccactgctatcagctcattcaccaggcacgtcttcacttgcgggagaaggggtattaaagtgtggtccctgacaggacaggtggccgaggaccgctttccagagagccatctccccatccagacccccggagccttcctgcgcacttgcttgctgagttctaattccagatctctccttactgggggttacaatttggcctccgtgtcagtttgggacctagcagcgccaagcttgcacgtgaaggagcaattgccgtgtgcaggcctgaactgccaggccctggatgctaatctggacgccaatctggctttcgcatcattcacttctggcgtcgtgcgcatatgggatttacgggaccagagtgtggtccgcgatctgaaaggatacccagacggagtcaaatccattgtggtaaaaggctacaacatatggaccggcggtccagacgcctgcctgcgctgttgggaccagaggaccatcatgaagcccctggagtatcagttcaagtcacagatcatgtctctgagccattccccacaagaggattgggtcctgcttggcatggccaatggacagcagtggctacagagtacctctggctctcaacgccacatggttggccagcgtcaacgtcaccctgagagacaggtcttacccctctggcccgtggttggcaagcggtggaacgggcgtctgccatggcgcttgcaacatgcaggcggagataagtcagtgaggggagcatag

SEQ ID NO: 216708 - DNA, 1350 bp, Artificial Sequence
  derived and/or modified sequence
atggccactaggtcatcagattggctgaggagaccgctcggagaggataatcagccagaaacacagttgttttgggacaaagagccctggttttggcacgatactctgacagagcagctttggcgcatctttgcaggagtgcacgacgaaaaagccaaaccacgagacaggcaacaagccccaggactcggccaagagagcaaggcgcctggatcttgtgacccgggaaccgatccttgtcctgaagatgcctcgacccctaggcctcccgaggccagctccagtccacctgaggggagtcaagacagaaatacctcgtggggagtggtgcaggagccacctggacgcgcatctagattccttcagagcatttcctgggaccctgaggacttcgaggacgcttggaaaaggccggacgcactgcccggtcagagcaagagactggcagtgccatgtaaattagagaagatgcgcattctggcccatggggaattagtcttggctaccgctattagctcgtttactcggcatgtattcacctgcgggaggcggggtataaaagtgtggtcactcaccggacaggtggccgaggaccgctttccagagtcgcacctacctattcagacacccggtgcattcctcaggacctgtttgcttagctccaattctcgcagtctgctgactgggggttacaacctcgcatcagttagcgtctgggacctggccgcacctagccttcacgtgaaagagcagcttccatgcgctggcttgaactgccaagcactcgacgccaacttggatgcaaacctagccttcgcatctttcacaagcggggtcgtacggatttgggatttgcgcgaccagagtgtcgtacgcgacctgaagggctaccccgacggggtcaagtccatcgttgtgaaaggctataatatttggacgggaggaccagacgcatgtcttcggtgttgggaccagcggactatcatgaaacccctagaataccagttcaaaagtcaaatcatgtcactcagtcactcaccccaagaggactgggtgttgctgggcatggccaacggccagcagtggcttcagtctacttctggatctcagagacatatggtgggacaaaaggactcagtgatcctatctgtcaagttctccccgtttggacagtggtgggcctcagtaggaatggatgactttttgggggtttacagcatgcctgcaggaaccaaagtttttgaggtacctgaaatgtccccagtcacttgttgcgacgtaagttctaataaccgccttgtcgttaccggcagcggggagcatgcatccgtctaccagataacctactag

SEQ ID NO: 216709 - protein, 216 aa, Artificial Sequence
  derived and/or modified sequence
MSIALKQVFNKDKTFRPKRKFEPGTQRFELHKRAQASLNSGVDLKAAVQLPSGEDQNDWVAVHVVDFFNRINLIYGTICEFCTERTCPVMSGGPKYEYRWQDDLKYKKPTALPAPQYMNLLMDWIEVQINNEEIFPTCVGVPFPKNFLQICKKILCRLFRVFVHVYIHHFDRVIVMGAEAHVNTCYKHFYYFVTEMNLIDRKELEPLKEMTSRMCH

SEQ ID NO: 216710 - DNA, 88 bp, Artificial Sequence
  derived and/or modified sequence
agcaacttcagcaaagtctcaggacacaaaatcaatgtgcaaaaatcacaagcattcttatacaccaataacagacaaacagagagcc

SEQ ID NO: 216711 - DNA, 651 bp, Artificial Sequence
  derived and/or modified sequence
atgagcatcgccctgaagcaggtgttcaacaaggacaagaccttcagacccaagagaaagttcgagcccggcacccagagattcgagctgcacaagagagcccaggccagcctgaacagcggcgtggacctgaaggccgccgtgcagctgcccagcggcgaggaccagaacgactgggtggccgtgcacgtggtggacttcttcaacagaatcaacctgatctacggcaccatctgcgagttctgcaccgagagaacctgccccgtgatgagcggcggccccaagtacgagtacagatggcaggacgacctgaagtacaagaagcccaccgccctgcccgccccccagtacatgaacctgctgatggactggatcgaggtgcagatcaacaacgaggagatcttccccacctgcgtgggcgtgcccttccccaagaacttcctgcagatctgcaagaagatcctgtgcagactgttcagagtgttcgtgcacgtgtacatccaccacttcgacagagtgatcgtgatgggcgccgaggcccacgtgaacacctgctacaagcacttctactacttcgtgaccgagatgaacctgatcgacagaaaggagctggagcccctgaaggagatgaccagcagaatgtgccactag

SEQ ID NO: 216712 - DNA, 651 bp, Artificial Sequence
  derived and/or modified sequence
atgtcgatagccctgaagcaagtgtttaataaggataagacttttcgccctaaacgaaagtttgaacccgggacccagcgctttgagctgcataagagggcccaggcttccctgaacagtggcgtggacctgaaagcagctgtccagctccccagcggcgaagaccagaacgattgggtagccgtccacgtcgtggacttcttcaatcgaataaacctcatctacggcaccatttgtgagttttgtactgaacggacttgcccggtgatgtctggagggccgaagtatgaataccgatggcaggacgacctgaaatacaagaagcccaccgcacttccggctccccagtatatgaaccttctcatggactggatcgaggtgcagatcaataatgaagaaattttcccaacttgcgtgggagtgccgttcccgaaaaattttctccagatctgcaagaagattctttgccggttatttcgtgtcttcgtgcacgtgtacatccatcactttgaccgggtgatcgttatgggggctgaggctcatgtaaatacttgctataagcatttttattactttgtcaccgagatgaacctgatcgataggaaagagctggaacccttgaaggagatgacgtctcgaatgtgtcattag

SEQ ID NO: 216713 - DNA, 651 bp, Artificial Sequence
  derived and/or modified sequence
atgagcatcgccctgaagcaggtgttcaacaaggacaagaccttccggcccaagaggaagtttgagcccggcacccagagatttgagctgcacaagagggcccaggccagcctgaacagcggcgtggacctgaaggctgctgtgcagctgcccagcggggaggaccagaatgactgggtggccgtgcacgtggtggacttcttcaaccgcatcaacctgatctacggcaccatctgtgagttctgcacagagaggacctgccctgtgatgtctgggggccccaagtatgagtaccgctggcaggatgacctgaagtacaagaagcccacagccctgcctgccccccagtacatgaacctgctgatggactggattgaggtgcagatcaacaatgaggagatcttccccacctgtgtgggcgtgcccttccccaagaacttcctgcagatctgcaagaagatcctgtgccgcctcttccgggtgtttgtgcacgtgtacatccaccactttgacagagtcatcgtgatgggcgctgaggcccacgtgaacacctgctacaagcacttctactactttgtgacagagatgaacctgattgacaggaaggagctggagcccctgaaggagatgaccagcaggatgtgccactag

SEQ ID NO: 216714 - DNA, 651 bp, Artificial Sequence
  derived and/or modified sequence
atgagcatcgccctgaagcaggtgttcaacaaggacaagaccttccgcccgaaacgcaagttcgagcctggaacacaaagattcgagttgcacaagagggcacaggcctcactgaactccggcgtggatctgaaggccgccgttcaactgccctctggtgaggaccagaatgattgggtggccgttcacgtagttgacttttttaatcgcattaatttaatctatgggacaatttgcgaattttgcacagagcgtacttgtcccgttatgagcggcgggccaaagtacgaatatcgctggcaggatgaccttaagtacaaaaagcccacagcactgccagcccctcagtatatgaacttgctcatggattggatagaagtccagatcaacaatgaggagattttcccgacctgtgtcggggtgccgtttccaaagaatttcctacagatctgcaagaagatcctgtgccgtctcttccgagtttttgtccacgtgtatattcaccatttcgaccgggtgatagtgatgggagcagaggcccatgtcaacacatgttacaagcacttctactatttcgtgaccgagatgaacctgatcgataggaaggagctcgagcccctcaaggagatgacctcgcgtatgtgccattag

SEQ ID NO: 216715 - DNA, 6454 bp, Artificial Sequence
  derived and/or modified sequence
gtgcatgagggggctgctccggagcgacggcggctgcagctggagccaggcgctcgcccgtccgccggttggctcgccgggacctcgcgcaccggcggcagagtcccttgcgtggattggcaagcgacgccccacctgccccgagctcaccattttctttcgcgctggctgcagctgacccggcgaagggagccgaccgggccctgggctggaggtaaaaccccacggaaagaacatgaggttcccttggaaatcattcaagaggaagatggaaggggctgtttagaagagcttaaaagctacaggctgtaagactggggcctgagtgctggcagtggaaaacactgttgggctgtgatctctccctgaaaagttccaggtgccttttcgcttcctgcaaaagaaaggaagcgaaagagaagaccatgtccatagccctgaagcaggtattcaacaaggacaagaccttccgacccaagaggaaatttgaacctggcacacagaggtttgagctgcacaaacgggctcaggcatccctcaactcgggtgtggacctgaaggcggctgtgcagttgcccagtggggaggaccagaatgactgggtggcagtacatgtggtggacttcttcaatcggatcaacctcatctatggcaccatctgtgagttctgcaccgagcggacctgtcctgtgatgtcagggggccccaaatatgagtatcggtggcaggatgatctcaagtataagaagccaacagcgctgccagctccccagtacatgaaccttcttatggattggattgaggttcagatcaacaacgaggaaatatttccaacatgcgtgggtgttcccttcccaaagaacttccttcagatctgcaagaagatcctgtgccgccttttccgggtctttgtccacgtctatatccaccacttcgaccgggtcattgtgatgggtgcagaggcccatgtcaacacctgctacaaacacttctattactttgtcacagagatgaacctcatagaccgcaaggagctagagcctttgaaagaaatgacgagcaggatgtgtcactaatgctccacctcaccctttggaagaaaggaaagctgtttcctcctggtgccctgagcgggcaggaggtggaccaccctggctgaaatgacacacctactcccaggaacagcagaggtggaggcaagcagtgactcctgagagacattccccactcactttgtgtgctcttaaccttctgagtgctgctagcccagacctgtggacgaggcagaccacaacgtgaaagaaggaccagccccttgaccgttctggctggggaattgtccacgaggaagcctctgcacttccacacatggcacagttctgcctgtgacctgccgcctaagctttactggaattcaggttttgagactgagatgcgtgttcgtatttttccacttatctgtcttgtcagctggccgacttctctgtgattggttttttaagtgccgggtgaattttggacctctggatgtgcagcaagtttttatgcaataagccttcctttcaggtctctaaaagctcctgctctgatctgtggtttaacactgtgcagggctgtggagctctgagacacctgaacccctacccatcccctgcacctccctactctccctgccgaggcgtccatagcatttccctaataaatagttttatcagggacactccatggggtggcttgtctctgccccaaacagggtcttcacgttctaactgcagggaagagactggttactagcgtaaagctgacaagttaccagttcacctgatcagaatgtattttttataaccaccatcattccttgtctcttcagtggaagatattctttcctgtttcccagaagagagaaataaaagtcctaaataactaagaatgatcagcgggagcgttgggcatgattactgcagtgtttgttctttattaaagacagggagtcgtggctgtctctacataatactaacatttcagtgaaaaaagtacaattggttatttggtacgtgtagatttaacacccagacggctgacttgtaaccctccccactagccttctgagcatttaaacccagccgtcattctctccccactccacgctccccactcctctgccacgttatgttacggcacaaaattaatttctgcccctgtgattgggccacggttgccaaggtaacagtggagctggagctaacttccttctttcatcctttccaatttttctattccagaagacagtcagaataatgcattctgtactacatcctgccttttgaaacctaaatgagttttcgttgatgaaatgttgccttctctgattcattcacaaaactgtggtggttctgaccacctgtgacgaggggggtcataatacttccagtgatccttttaatttagcaaaatatttgtcggtggagggaagtagataagaatgtattagtgtattttaaagtaataatgattaaagaataactaaatgactctgattttgttttatcaatcataatgtgttaaagccctctgtggctgccacaaaagactagaatcatgaaatctttgtccaagctaagaaagggctgtctctgtgggtacagtggcattctctgttgacctaaccaagcagcctgaaccttgctttgtgtctcgtaaaggtcatctcacggaatccaattgctgctacctcaccatgttgctgtgccctggtcaacaataaacatacttttgtcccccttcctaagtaactttgagaggacaagataggcaaagttttttccctacatctcttttggccaaaagaatatctgaccatcacagagatccagagaacagaaacaagagcccctaagtcccagcctctgcaatacacagttaccagatgggaatgcagcacagtggcacagagaggtaactacggagcccatgccctggaggaactctgtagctgtgcatcatggaacgccacaggatttttacattaaaaagttgaatatgttcctgcatttcagcagtgcataatcgagcaggaggctggaatctggagacctttgttattcattctttttaaggttattttttattaactgtgcatatgaaatttccactcaatttaaaaatccaaatctttttaagcttcttggaagaatttcctcctgcttatattgttaattgcactaatgaactcttctagggtaaattctggcaaactaccctttttttttttttaatcacagaatattcctgttcccacagaactttggcacattctgaagaaaatctctgcagtcaatttttatctcctctgcttgactgcatctaactgttcatctctgttataaatggagcttcagccctctgggtcagagactgacaaccctccttcttcttcctaacctgtcctactctccttctttttctgctttcattttaattttgggaaattttaaagtaaaagtttcaaagttgaaagattatagtgagtacccttatgtcctttagtgcatcagttgttaatgttttgccttgttttcttttcttccttttttttttttaagagaaggggtctctccctattttacccaagctggccttgaaccccttgcctcaagtgagcttcaaccttagcctcctgagtagccaggactatggcatgtaccaccgcacctgcctcacattttctttctcactgtaaatacacattcttattcttgaaccttctgaaaataagttgcagacatcatgaaaatgtaaaatacttcatcatattctttcttttaataagagcattgtcctataaatctgcaatattttcacgcccatgaaactgaacactgatactgcataaatctaatatatgatccatattcaaaattctccagttgtccccaaaatatcctttatagctgtttatttttaaatccaggatccaatcaagaattatacgttatatgtagttgtcattctcttttgtttcctttaattgattagagttgcccttttgtgtgtgtctgagtggtgggtggtggggtggtgtttgtgtatgatgtgcagtgtgtgtgtgtgtggtgtgtctttcatgacactgacattattaaagagttcaggcaagtttgtggaatgtcccacaatctagacttttttactgattgtttcctcattacgagatacaggttacattttttttcccaagactgctacatgtgtgatgttgtttccttactactgcctcacctcaggaagcacataatgtctacttgtctcttttctgatattaggactgatcaggtgttgtctgcctgatccaatcattatcaagttccataattcattattaagctctgaaattcaggacacatacatttatagagtgtgaggctgtgcatacgtacattcatcccttaatgttctcaaggaggcccaggatccccaaaatattataagcattgcagtcagatgatatagcactagcaaagcattcatccctttccatataacaggagggaggggaagaaggaagtttccatgtgcaggcaatacgtgagagcatgggcaagtgaggatttgtatgctccctgtagccagaggtgaaatattcaacgcttttattttttctcccgtcttcaatgacctcccatttggacccatagtttatttatagagagcacacactccctaattgtcagatggtttttttgggaaaactcttagatagtacagtgagttgtgaccctccaaaggatcacaagtacataaacagatacaaagtatttatgtggtattaaaatttcatggtgatggtgcaagggagagatgattaggaagaaaatgtcttacacggctgtaattgagaaatactgatctagagtcatttcctgcttcttaaattgttcgttttctcttccctgggtattttctcatttccaaagacccagagtctcagagccaggttaagtggaagaaactttgagaggtttcttaatcaattccttctatctctcaaaccatgccagtaacttccttggtgaaaaaatctatactcctctcacagttcttcgggcatggaaattctatagcattctttggtataaccaacccactgaaccctccacaacatcttgaattccattcaactcgagctgaagtattctttttgagtttcagtatatcttttctagtgtcccacttttagaaaggtccaaagatgatatataataagtgaaaatacaattaatcagagctttatttgcatatccattaaatatctgaaggctattaccagttgtgcttcagcctcctttcccttgcaattctcccagggtggcatcctctacggagtcttgttgctccattgttgaccactgatgtaactcaacgtgaaaccttcccaaagctctccacatcactctctgttatggctgtgaccagcagtgaacatgaaaagaacttatttcatgccttctccaaactatattgtttctttgctaagtccagacctgctttttctacatttataggttttctattttaatcgccatgcaaaattctttatcatactcaatcattttggtttatcttcctgacttcttacctttaacatccctgttaaagattacactgttgttgtttcaaaaaaaaaaaaaaaaaaaccttaattggcaaaacattaagggacttgaatagaattacacttatctttttgtgctgatttatgtcaatccatcattctggttattgatggaagcaaattgcttcctatgttctctaaaccttatgtcccttccatactccatgagtaccacactgggagaaaacaaaagcaaaaagattgtgggaaaagtatagccattatctttgaggaaatgtgtaccaaggcacaatcattaaaaggagttggaggcatcatttggttgacactgttgtcattcttgttctgatcattttggaccttgaagaaattggtgattctctcctagaattagacaaacaaagtgtgtttggaaataatgattgttttcctgccttaaaaaatatattaacagaaagcttttataacaggctgtttccctctggacaggtattaattctgagtaagaattttcagtgactacataaggatttgtgtaacttatgaaggaagagtccatttctaatcaaataattcgcctgttttactagcttatagtgatctgatttcagaattttcctgtatcttttttacatacatcagaaaaagaaatgtttactatatttttggttccatttatgattgtattaagcatttgactataaggaaaactaacaattaaatcaattagaaaagcaacataaaattaaatgatatttaggaaatcagttatatgtgagcttgggtattcaaatgtcacaaataaaaagcatataaccatta

SEQ ID NO: 216716 - DNA, 651 bp, Artificial Sequence
  derived and/or modified sequence
atgtcaatcgcgctgaaacaggtcttcaacaaagataaaactttccgccctaagcgcaagttcgagcctggcacccagaggttcgagctgcacaagcgcgctcaagctagtcttaatagtggcgtagatctgaaggcggcagtgcaactgcccagtggggaggaccaaaatgactgggtcgctgtgcacgtagtagatttctttaataggatcaacctgatctatggcaccatctgcgaattctgcaccgaaagaacttgcccagtgatgtccggagggcctaaatatgagtaccggtggcaggacgatttgaagtacaagaagccgacagcactacctgcccctcaatacatgaatctgttgatggattggatcgaagtgcaaataaacaatgaggaaatctttccgacctgtgtaggcgtgccattcccgaagaacttcttacagatctgcaaaaaaattctttgcagactctttagagtgttcgttcatgtttacattcatcattttgatcgggtaattgtaatgggtgccgaagcccatgtaaatacttgctacaagcacttctactacttcgtcacagagatgaaccttatcgaccgaaaagagctggagcctctgaaggagatgactagtcggatgtgtcattag

SEQ ID NO: 216717 - protein, 323 aa, Artificial Sequence [sequence omitted]

SEQ ID NO: 216718 - DNA, 972 bp, Artificial Sequence
  derived and/or modified sequence
atggagagcagagtggccgacgccggcaccggcgagaccgccagagccgccggcggcagccccgccgtgggctgcaccaccagaggccccgtggtgagcgcccccctgggcgccgccagatggaagctgctgagacaggtgctgaagcagaagcacctggacgactgcctgagacacgtgagcgtgagaagattcgagagcttcaacctgttcagcgtgaccgagggcaaggagagagagaccgaggaggaggtgggcgcctgggtgcagtacaccagcatcttctgccccgagtacagcatcagcctgagacacaacagcggcagcctgaacgtggaggacgtgctgaccagcttcgacaacaccggcaacgtgtgcatctggcccagcgaggaggtgctggcctactactgcctgaagcacaacaacatcttcagagccctggccgtgtgcgagctgggcggcggcatgacctgcctggccggcctgatggtggccatcagcgccgacgtgaaggaggtgctgctgaccgacggcaacgagaaggccatcagaaacgtgcaggacatcatcaccagaaaccagaaggccggcgtgttcaagacccagaagatcagcagctgcgtgctgagatgggacaacgagaccgacgtgagccagctggagggccacttcgacatcgtgatgtgcgccgactgcctgttcctggaccagtacagagccagcctggtggacgccatcaagagactgctgcagcccagaggcaaggccatggtgttcgcccccagaagaggcaacaccctgaaccagttctgcaacctggccgagaaggccggcttctgcatccagagacacgagaactacgacgagcacatcagcaacttccacagcaagctgaagaaggagaaccccgacatctacgaggagaacctgcactaccccctgctgctgatcctgaccaagcacggctag

SEQ ID NO: 216719 - DNA, 972 bp, Artificial Sequence
  derived and/or modified sequence
atggaatcacgcgtagccgacgcaggcaccggcgagacagccagggctgctgggggctcacctgccgtgggatgcaccactcggggcccagtggtgtccgcaccactcggcgcagctcggtggaaattactgagacaagttctgaagcagaaacatttggatgactgcttaagacatgtctctgtgcggcgcttcgaatcttttaatctgttttccgtgacagagggtaaagagcgggagacagaggaggaggttggggcttgggtgcagtacacttctatcttctgtccggaatactcaatctcccttcgccataattcgggttctttgaatgtagaagacgtcctcacctcctttgataataccgggaatgtgtgtatttggccatcagaggaggtgcttgcgtactactgtctgaaacacaacaacatattcagagcactggccgtgtgcgagttaggcggtggcatgacctgcctggcaggcctgatggtggccatttctgccgacgtcaaagaagtgttgcttaccgatgggaacgagaaggcaattaggaacgttcaggatattataactcgaaatcagaaggccggggtgtttaaaacgcagaagatttcgtcttgtgtgctccgctgggacaatgagacagacgtctcccaactcgagggacattttgacattgtgatgtgtgccgactgtttatttctagatcagtacagagctagtcttgtggacgccattaagcgcctcctccaaccccggggaaaggctatggtgttcgcccccagacgtggcaacacactcaatcaattttgcaacttagctgagaaggctggcttctgcatacagcggcacgaaaattacgacgaacatataagcaatttccacagtaagctcaagaaagaaaatcctgacatctacgaagaaaacctccactacccgcttctattgattttaaccaagcatgggtag

SEQ ID NO: 216720 - DNA, 972 bp, Artificial Sequence
  derived and/or modified sequence
atggagagccgggtggctgatgctggcaccggggagacagcccgggctgctgggggcagccctgctgtgggctgcaccacccggggccctgtggtgtctgcccccctgggcgccgcccgctggaagctgctgcggcaggtgctgaagcagaagcacctggatgactgcctgcggcacgtgtctgtgagaagatttgagagcttcaacctcttctctgtgacagagggcaaggagcgggagacagaggaggaggtgggcgcctgggtgcagtacaccagcatcttctgcccagagtacagcatcagcctgcggcacaacagcggcagcctgaatgtggaggatgtgctgaccagctttgacaacacaggaaatgtgtgcatctggcccagcgaggaggtgctggcctactactgcctgaagcacaacaacatcttccgggccctggccgtgtgtgagctgggcggcggcatgacctgcctggccggcctgatggtggccatctctgcagatgtgaaggaggtgctgctgacagatggaaatgagaaggccatcagaaatgtgcaggacatcatcaccaggaaccagaaggccggggtcttcaagacccagaagatcagcagctgtgtgctgcgctgggacaatgaaacagatgtgtcccagctggagggccactttgatattgtgatgtgtgccgactgcctcttcctggaccagtaccgggccagcctggtggatgccatcaagaggctgctgcagccccggggcaaggccatggtgtttgccccccggcggggcaacaccctgaaccagttctgcaacctggccgagaaggccggcttctgcatccagagacatgagaactatgatgagcacatcagcaacttccacagcaagctgaagaaggagaacccagacatctatgaggagaacctgcactaccccctgctgctgatcctgaccaagcacggctag

SEQ ID NO: 216721 - DNA, 1495 bp, Artificial Sequence
  derived and/or modified sequence
gagctgcggcggtggcacctccgggtgtggaaggctccagtgagatggagtcgcgagtcgcggacgctgggaccggcgagaccgcgcgagcagcgggcgggagtccggcagttggctgcaccactcgggggcccgtagtctcggcgcccctgggagccgcccggtggaagctcctgcggcaggttctgaagcaaaaacacctggatgattgcctgcgacatgtatctgtaagaagatttgaatcatttaatctgttttcagtaacagaaggcaaagaaagggaaactgaagaggaggttggtgcatgggtccaatatacaagcatcttctgtcctgaatacagtatctccttaaggcataatagtggatccttgaatgttgaagatgtccttaccagctttgacaatacaggaaatgtttgcatctggccatctgaagaggttttggcttactactgcctcaagcacaataatatattcagggcccttgctgtgtgtgagctagggggtggcatgacatgcttggctgggctcatggttgctatttctgcagatgtcaaagaagttctgttaactgatgggaatgaaaaggccatcagaaatgtgcaagacatcatcacaaggaatcagaaggctggtgtgtttaagacccagaaaatatcaagctgcgttttacgatgggataatgagacagatgtctctcaactggaaggacattttgacattgttatgtgtgctgactgcctgtttctggaccagtacagagccagccttgttgatgcaataaagagattactccagcccagggggaaagcgatggtatttgccccacgccgagggaatactttaaaccagttttgcaatctagctgaaaaagctggtttctgtatccaaagacatgaaaattatgatgaacacatttcaaacttccactccaagttgaaaaaggaaaacccggacatatatgaagaaaaccttcattacccgcttctgcttattttgaccaaacatggatagaagattaagcttctcaaagacgaagaaacgtatcaagtgcatagggaatatttttacaaaaacggaaatctgtaaggggtataatcgcctgcctgcgccctttgcagcatttcacgtgtgggctatggactccacctgtcctcacccacgttattccccagctgccctctccagctccctccccgcctctttttacactctgcttgttgctcgtcctgccctaaacctttgtttgtctttaaatgtgtataagctgcctgtctgtgacttgaatttgactggtgaacaaactaaatatttttccctgtaattgagacagaatttcttttgatgatacccatccctccttcattttttttttttttttggtctttgttctgttttggtggtggtagtttttaatcagtaaacccagcaaatatcatgattctttcctggttagaaaaataaataaagtgtatctttttatctccctccaa

SEQ ID NO: 216722 - DNA, 972 bp, Artificial Sequence
  derived and/or modified sequence
atggagagccgggtggccgacgccggcaccggcgagaccgcccgggcagcgggtggcagtcctgccgtcgggtgcaccacccgcggacccgtggtttcagcccccctcggagcagcgagatggaaactgttgcgacaagtgctgaaacagaagcatctggatgactgtcttagacatgtttcagtccgtcgctttgaaagcttcaacctgttctccgttaccgagggaaaggaacgggaaactgaggaggaagtaggggcctgggtgcagtatacctcaatcttctgtccagagtacagcatctctctccgacacaacagcgggtcgctgaacgtcgaagacgtgctgacatcttttgataatacgggcaatgtctgcatctggccaagtgaggaggtgctcgcatattactgcctcaagcataacaacattttcagggctcttgcggtctgcgaactgggaggaggcatgacctgccttgccgggttgatggttgctatttccgccgacgtgaaagaggtgctcttaaccgatgggaatgagaaagctatccgaaacgtgcaggacatcattacaaggaatcagaaagctggtgtcttcaaaacccagaagatctcaagctgcgtactccggtgggataatgagacagatgtgagccagctggaggggcatttcgatatagtgatgtgtgccgactgtctgttcctggaccagtaccgtgcttccctggtcgacgcaatcaagaggcttctccagccccgaggaaaggcaatggtgtttgccccgcggcgcggtaataccctgaaccagttttgcaatcttgctgaaaaggccggcttctgcatccaaaggcacgagaattacgacgagcacatcagtaacttccacagcaagctaaagaaagaaaatcctgatatatacgaggagaacttgcactaccccctgctactgatcttaaccaaacatggatag

SEQ ID NO: 216723 - DNA, 972 bp, Artificial Sequence
  derived and/or modified sequence
atggagagtagggtggccgacgccggaacgggcgagactgctcgtgcagccggagggtctccagccgtgggctgcactacacgcggtcctgtggtgtccgcgccattaggcgctgccaggtggaagctgcttcgccaagtgctaaagcagaaacatctagatgattgcctgcggcacgttagtgtgagaaggtttgaaagcttcaacttattcagcgtcactgagggcaaggagcgggagaccgaagaggaagtgggagcgtgggtgcaatacacgagcatattctgtcctgaatactcgatcagcctgagacacaattctggatcattgaatgttgaagatgtgctcacatcattcgataataccgggaatgtatgcatatggccctcagaggaggtgttggcatactattgcctgaaacataataatatcttccgcgcattagccgtgtgtgaacttggagggggtatgacttgcctcgcaggattgatggtcgcaatatctgcggacgtcaaggaagtgctcttgacagatgggaacgaaaaggcaataaggaacgtgcaggacatcatcacccgcaatcaaaaggccggtgtgtttaagacccagaaaatatctagttgcgtcttgcgctgggataatgaaacagatgtgagccagctggaaggccactttgatattgtcatgtgcgcagactgcctttttctggatcagtaccgagctagcctggtagacgcaattaagcgattgctccagcctcgaggtaaagctatggtgtttgcaccaaggcgcggtaataccctgaaccagttttgcaatctagctgagaaggccggattctgtatacagcggcacgagaattacgacgaacacattagtaatttccactctaagctcaaaaaggagaaccctgatatatacgaagaaaaccttcactatccgttgctgctgatcttaactaagcacggttag

SEQ ID NO: 216724 - protein, 463 aa, Artificial Sequence
  derived and/or modified sequence
MSVAIRKRSWEEHVTHWMGQPFNSDDRNTACHHGLVADSLQASMEKDATLNVDRKEKCVSLPDCCHGSELRDFPGRPMGHLSKDVDENDSHEGEDQFLSLEASTETLVHVSDEDNNADLCLTDDKQVLNTQGQKTSGQHMIQGAGSLEKALPIIQSNQVSSNSWGIAGETELALVKESGERKVTDSISKSLELCNEISLSEIKDAPKVNAVDTLNVKDIAPEKQLLNSAVIAQQRRKPDPPKDENERSTCNVVQNEFLDTPCTNRGLPLLKTDFGSCLLQPPSCPNGMSAENGLEKSGFSQHQNKSPPKVKAEDGMQCLQLKETLATQEPTDNQVRLRKRKEIREDRDRARLDSMVLLIMKLDQLDQDIENALSTSSSPSGTPTNLRRHVPDLESGSESGADTISVNQTRVNLSSDTESTDLPSSTPVANSGTKPKTTAIQGISEKEKAGKLTFWFCFLANLF

SEQ ID NO: 216725 - DNA, 1497 bp, Artificial Sequence
  derived and/or modified sequence
atgagcgtggccatcagaaagagaagctgggaggagcacgtgacccactggatgggccagcccttcaacagcgacgacagaaacaccgcctgccaccacggcctggtggccgacagcctgcaggccagcatggagaaggacgccaccctgaacgtggacagaaaggagaagtgcgtgagcctgcccgactgctgccacggcagcgagctgagagacttccccggcagacccatgggccacctgagcaaggacgtggacgagaacgacagccacgagggcgaggaccagttcctgagcctggaggccagcaccgagaccctggtgcacgtgagcgacgaggacaacaacgccgacctgtgcctgaccgacgacaagcaggtgctgaacacccagggccagaagaccagcggccagcacatgatccagggcgccggcagcctggagaaggccctgcccatcatccagagcaaccaggtgagcagcaacagctggggcatcgccggcgagaccgagctggccctggtgaaggagagcggcgagagaaaggtgaccgacagcatcagcaagagcctggagctgtgcaacgagatcagcctgagcgagatcaaggacgcccccaaggtgaacgccgtggacaccctgaacgtgaaggacatcgcccccgagaagcagctgctgaacagcgccgtgatcgcccagcagagaagaaagcccgacccccccaaggacgagaacgagagaagcacctgcaacgtggtgcagaacgagttcctggacaccccctgcaccaacagaggcctgcccctgctgaagaccgacttcggcagctgcctgctgcagccccccagctgccccaacggcatgagcgccgagaacggcctggagaagagcggcttcagccagcaccagaacaagagcccccccaaggtgaaggccgaggacggcatgcagtgcctgcagctgaaggagaccctggccacccaggagcccaccgacaaccaggtgagactgagaaagagaaaggagatcagagaggacagagacagagccagactggacagcatggtgctgctgatcatgaagctggaccagctggaccaggacatcgagaacgccctgagcaccagcagcagccccagcggcacccccaccaacctgagaagacacgtgcccgacctggagagcggcagcgagagcggcgccgacaccatcagcgtgaaccagaccagagtgaacctgagcagcgacaccgagagcaccgacctgcccagcagcacccccgtggccaacagcggcaccaagcccaagaccaccgccatccagggcatcagcgagaaggagaaggccgccgtgaagagcgtgaagctggaggtggacgaggacaagagcaccaagggcagcaacttcagcaacagcgaggtggccatcggcctgagcccctacaccttcccccagaagagactgttccacgtggccggcgaggagaacatcacctag

SEQ ID NO: 216726 - DNA, 1837 bp, Artificial Sequence
  derived and/or modified sequence
ttttgttagactcacacactgcgtgaaactgctcagaatagagccatgatctcaaccacgaaatgggaacttagattttggagaaactaacggggacggacttctttcctagcctgagtgttgagcagtgtcatgccttggcgtttcagctcctcgttgtctaggtggtgaaatgacagaactcattcgcttctttgattggtgattttgaaataatctttcatcaagttccatctcctttaccctcatatggaatatatctctctgtctgttgttaaactacgatgacatgtctgtagctatcagaaagagaagctgggaagaacatgtgacccactggatgggacagccttttaattctgatgatcgtaacacagcatgtcatcatggactagtagctgacagcttgcaggcaagtatggaaaaagatgcaactctaaatgtggaccgcaaagagaagtgtgtttcactacctgactgctgtcatggatcagagctgagagattttcctgggaggccaatgggtcatctttcaaaggatgtggacgaaaatgacagccatgaaggtgaagatcagtttctttctctggaagccagcacagaaacactagtgcatgtttctgatgaggataacaatgctgatttatgccttacagatgataaacaggttttaaatacccaagggcagaaaacatcaggccaacatatgatccaaggagcaggctccttagaaaaggcactgcccatcatacaaagtaaccaagtttcttctaactcctggggaatagctggtgaaactgaattagcactggtaaaagaaagtggggagagaaaagttactgactctataagtaaaagcctggagctttgcaatgaaataagcttaagtgaaataaaagatgcacccaaagtaaatgcagtggatactttgaacgtgaaagatattgcacctgagaaacaattgcttaactctgctgtaattgctcagcaacgaaggaaacctgacccccctaaagatgaaaatgaaagaagcacctgcaatgtagtacaaaatgagttcttggatactccttgcacaaacagaggactgccattattaaaaacagattttggaagctgccttctgcagcctccttcctgccccaatggaatgtcagctgaaaatggcctggagaagagtggtttttcacaacatcaaaacaaaagtccaccaaaggtcaaggcagaagatggcatgcagtgtttacaattaaaggagaccctggccacccaggaacccacagataaccaagtcagacttcgtaagagaaaggaaataagagaagatcgagatagggcgcggctggactccatggtgctgctgattatgaaactggaccagcttgatcaggacatagaaaatgccctcagcaccagctcctctccatcaggcacaccaacaaacctgcggcggcacgttcctgatctggaatcaggatctgaaagtggagcagataccatttcagtaaatcagacacgagtaaatttgtcttctgacactgagtccacggacctcccatcttccactccagtagccaattctggaaccaaacccaagactacggctattcaaggtatttcagagaaggaaaaggctgcggtaaaatcagtaaagttggaagtggatgaagataagagcacaaagggatccaatttttccaactcggaagtggcaattggtttgtctccttacacctttccccagaagaggcttttccatgttgctggagaagaaaacatcacctaggccggtgtgtgcctggcagaacactgcactccaatttcctcgggcagccac

SEQ ID NO: 216727 - DNA, 1497 bp, Artificial Sequence
  derived and/or modified sequence
atgtccgtggccattagaaaacgtagttgggaagagcacgtgacacactggatgggccagcctttcaacagcgatgaccgcaatactgcatgtcaccacggcctagttgccgactctcttcaggcatctatggagaaagacgctactttaaacgttgatcgtaaagagaagtgcgtctctctgcctgactgttgccatggatcggaactcagggactttccaggcagacctatgggtcacctctctaaagatgtcgacgaaaatgactcccatgagggggaagaccagttcctatcactggaggcttcgactgagactttggtacatgttagcgatgaagacaacaacgcggacttatgcctcacggacgacaaacaggtattaaacacccaaggacagaagacctccggacagcatatgattcaaggagcgggcagcctcgagaaggcactgccgattatccagtctaatcaggtctctagcaattcctggggtatcgccggtgaaacagaactcgctctcgtgaaagaatccggtgaaagaaaggtaacagatagtatttctaagtcgttggagctttgtaacgagatctccttgtccgagattaaagatgcacctaaagtaaacgcggtcgataccctaaacgtaaaggatatcgctcctgagaaacagcttctaaattccgctgtcatcgctcaacagcgacgtaagcctgaccctcccaaggacgaaaatgaacgcagcacctgcaacgtcgtgcagaacgagtttctggacaccccatgtacaaatagaggcctgccactgttgaagacagattttgggagctgcctgctacagcccccatcctgccccaatggaatgagcgctgagaacggcctagaaaaaagtgggttttcccagcaccagaacaagagccccccaaaagtgaaagccgaggacggaatgcagtgtcttcagctgaaggaaactctggcgacccaggagccaacagacaaccaggtgcggctgaggaagcggaaagagattagggaagaccgcgaccgggcacggctcgatagcatggtcctccttatcatgaaacttgaccagctggaccaagacattgaaaatgcgctctccacttcttctagcccttcagggacccctacgaacctgcgcagacacgtccctgacctggagtccggcagtgaatcgggtgccgacacaatctccgtgaatcagacccgcgtcaatctctcctctgatacggaaagtacagatctcccttcttccacacccgtggccaatagtggtacaaaacccaagacaacagctattcaaggaatttctgagaaagaaaaggctgctgtgaagtctgtaaagctggaagttgatgaggacaaatcaacgaagggatccaacttcagcaacagcgaagtcgccatcggcctgtctccatacacctttccccagaaacggctctttcacgtagctggggaagaaaatatcacatag

SEQ ID NO: 216728 - DNA, 1497 bp, Artificial Sequence
  derived and/or modified sequence
atgtctgtggccatcaggaagaggtcctgggaggagcacgtgacccactggatgggccagcccttcaacagtgatgacaggaacacagcctgccaccacggcctggtggccgacagcctgcaggcctccatggagaaggatgccaccctgaatgtggacaggaaggagaagtgtgtgtccctgcctgactgctgccacggcagcgagctgcgggacttccctggccggcccatgggccacctgagcaaggatgtggatgaaaatgacagccatgaaggagaggaccagttcctgagcctggaggccagcacagagaccctggtgcacgtgtctgatgaggacaacaatgctgacctgtgcctgacagatgacaagcaggtgctgaacacccagggccagaagaccagcggccagcacatgatccagggcgccggcagcctggagaaggccctgcccatcatccagagcaaccaggtgagcagcaacagctggggcattgctggggagacagagctggccctggtgaaggagagcggggagaggaaggtgacagacagcatcagcaagagcctggagctgtgcaatgagatcagcctgtctgagatcaaggatgcccccaaggtgaatgctgtggacaccctgaatgtgaaggacatcgcccctgagaagcagctgctgaacagcgctgtgattgcccagcagaggaggaagccagacccccccaaggatgaaaatgaaagaagcacctgcaatgtggtgcagaatgagttcctggacaccccctgcaccaacagaggcctgcccctgctgaagacagactttggcagctgcctgctgcagccccccagctgccccaacggcatgtctgcagaaaatggcctggagaagagcggcttcagccagcaccagaacaagagcccccccaaggtgaaggcagaagatggcatgcagtgcctgcagctgaaggagaccctggccacccaggagcccacagacaaccaggtgcggctgaggaagaggaaggagatcagagaagatcgggaccgggcccggctggacagcatggtgctgctgatcatgaagctggaccagctggaccaggacattgaaaatgccctgagcaccagcagcagccccagcggcacccccaccaacctgcggagacatgtgcctgacctggagagcggcagcgagagcggggctgacaccatctctgtgaaccagaccagggtgaacctgagcagtgacacagagagcacagacctgcccagcagcacccctgtggccaacagcggcaccaagcccaagaccacagccatccagggcatcagcgagaaggagaaggctgctgtgaagtctgtgaagctggaggtggatgaggacaagagcaccaagggcagcaacttcagcaacagcgaggtggccatcggcctgagcccctacaccttcccccagaagaggctcttccacgtggccggggaggagaacatcacctag

SEQ ID NO: 216729 - DNA, 1497 bp, Artificial Sequence
  derived and/or modified sequence
atgagcgtggccatccggaagcggagctgggaggagcacgtgacccactggatggggcagcctttcaacagcgacgacaggaataccgcgtgtcaccatgggctcgtggccgacagtcttcaggcatccatggagaaagatgcaacattaaacgttgacagaaaggagaagtgtgtttctcttcccgattgttgtcatggatctgagctgcgggattttcctggtagacctatgggccatctttccaaggacgtggatgagaatgatagccatgaaggcgaggaccagttcttgtctctcgaagcgagcacagagacattagttcatgtctccgatgaggacaataacgctgacctctgcctcacggacgataagcaggtcctgaatacccagggacagaaaacctccggacagcacatgatacagggcgccggatcgcttgagaaggcccttcctataatccagagtaatcaagtcagctccaattcctggggcattgctggcgagacagagttggccctggttaaagagtcaggagagcgcaaggtcacagacagcatctccaagagcctagaattatgcaatgagatttcgctctctgaaatcaaggatgcccctaaggtaaacgccgttgacaccttgaatgtcaaggatatcgcaccagaaaagcagctgctgaactccgccgtcatcgcacagcagcgccgcaagccagacccgccaaaggacgaaaacgagagaagcacctgcaatgtcgtgcagaacgaatttctggataccccgtgtactaacagagggctgccattgctgaaaactgattttggctcttgcctgctgcagccgccatcttgtcccaatggcatgtcagccgaaaacggcctcgaaaagagtggttttagtcaacaccaaaacaagtcaccgcccaaagtcaaggctgaagacgggatgcagtgcctccagctgaaggagaccctcgctacacaagagccgactgacaaccaggttcgcctgcggaagaggaaagaaatcagggaagaccgggacagggctaggcttgatagcatggttctcctgatcatgaagttagatcagttagatcaagacattgaaaacgctctgtctacgagtagctctccaagtggcacgccaacaaatttacggcggcatgtgcccgatctggagagcggttctgagagtggagctgacacaatctccgtcaaccaaacacgcgtcaacctgtcgtctgacaccgagtctacagatctcccttcctctacaccagtggctaacagtggaacaaaacccaagactactgccatccagggaatcagcgaaaaagaaaaagccgcggtgaagtcggtcaagctcgaggttgatgaagacaaatccactaagggctccaatttctcaaattcagaagtggcaatcgggctgtcaccgtacaccttcccgcaaaaacggctgttccatgtggcaggcgaggagaacatcacctag

SEQ ID NO: 216730 - DNA, 1497 bp, Artificial Sequence
  derived and/or modified sequence
atgagtgttgcaattcggaaaagatcctgggaagagcacgtgactcattggatgggccaaccgtttaatagcgatgacagaaacaccgcatgtcaccacgggctggtggccgactctctgcaggcgagtatggaaaaggatgcaacactgaacgtagatagaaaagagaaatgcgtcagtttaccagactgttgccatgggtctgagttgagggactttcctgggcgaccaatgggccacttaagtaaggatgtcgatgaaaatgatagccacgagggggaggaccagttcttgagcctagaggccagtaccgagacattggttcatgtctccgacgaggacaacaacgctgatctctgtctaactgacgacaaacaggtattaaacacacaggggcagaaaacgagtggccaacatatgatacagggagcaggctcgctggaaaaagccctacctattatacagtcaaatcaagtgtcttccaattcttgggggatcgctggggagaccgaactggccctggtgaaggaaagtggggagagaaaggtgactgactctatctccaaaagcctcgagctttgtaacgagatatccctctcggagatcaaagacgcaccaaaggtcaatgccgtggacaccctgaacgtgaaggacatcgcacctgaaaagcagctcctcaattctgccgtcatcgctcagcaacggagaaaaccggatcccccaaaggatgagaatgaacgatcgacctgtaatgttgtccagaacgaattcctggacacaccctgcaccaacagaggtctgcctctgctcaagacagactttggcagctgcctgctgcagccaccatcttgccctaatgggatgtctgccgagaacggcctcgagaagagcgggttttcccagcatcagaataaaagcccccctaaggttaaggcagaggacggaatgcagtgcctccagctgaaagagacacttgctacacaagagcctacagataatcaggttagattgcgcaagcgtaaggagataagagaggatagggatagggccaggcttgattctatggttttgctgattatgaaattggatcagctggaccaggacatcgaaaacgccctgagcacatcgtctagtccctccggcactcccactaatcttaggagacacgtccccgacctggagtccgggagtgaatctggcgctgataccataagcgtcaaccagacacgtgtgaatctctcatccgacaccgaaagcaccgacctaccctcttccacaccagtggccaattccggaaccaagcccaagacaacagcaatccagggcatcagtgagaaggaaaaggcagctgttaaatctgtcaagctggaggttgatgaagataagtctaccaagggctcaaacttttcgaacagcgaagttgcgataggactcagcccctacacttttccccaaaaaaggctgttccatgttgctggcgaggagaacatcacatag

SEQ ID NO: 216731 - DNA, 1392 bp, Artificial Sequence
  derived and/or modified sequence
atgagcgtggccatcagaaagagaagctgggaggagcacgtgacccactggatgggccagcccttcaacagcgacgacagaaacaccgcctgccaccacggcctggtggccgacagcctgcaggccagcatggagaaggacgccaccctgaacgtggacagaaaggagaagtgcgtgagcctgcccgactgctgccacggcagcgagctgagagacttccccggcagacccatgggccacctgagcaaggacgtggacgagaacgacagccacgagggcgaggaccagttcctgagcctggaggccagcaccgagaccctggtgcacgtgagcgacgaggacaacaacgccgacctgtgcctgaccgacgacaagcaggtgctgaacacccagggccagaagaccagcggccagcacatgatccagggcgccggcagcctggagaaggccctgcccatcatccagagcaaccaggtgagcagcaacagctggggcatcgccggcgagaccgagctggccctggtgaaggagagcggcgagagaaaggtgaccgacagcatcagcaagagcctggagctgtgcaacgagatcagcctgagcgagatcaaggacgcccccaaggtgaacgccgtggacaccctgaacgtgaaggacatcgcccccgagaagcagctgctgaacagcgccgtgatcgcccagcagagaagaaagcccgacccccccaaggacgagaacgagagaagcacctgcaacgtggtgcagaacgagttcctggacaccccctgcaccaacagaggcctgcccctgctgaagaccgacttcggcagctgcctgctgcagccccccagctgccccaacggcatgagcgccgagaacggcctggagaagagcggcttcagccagcaccagaacaagagcccccccaaggtgaaggccgaggacggcatgcagtgcctgcagctgaaggagaccctggccacccaggagcccaccgacaaccaggtgagactgagaaagagaaaggagatcagagaggacagagacagagccagactggacagcatggtgctgctgatcatgaagctggaccagctggaccaggacatcgagaacgccctgagcaccagcagcagccccagcggcacccccaccaacctgagaagacacgtgcccgacctggagagcggcagcgagagcggcgccgacaccatcagcgtgaaccagaccagagtgaacctgagcagcgacaccgagagcaccgacctgcccagcagcacccccgtggccaacagcggcaccaagcccaagaccaccgccatccagggcatcagcgagaaggagaaggccggcaagctgaccttctggttctgcttcctggccaacctgttctag

SEQ ID NO: 216732 - DNA, 2451 bp, Artificial Sequence
  derived and/or modified sequence
tgggcctggttgtggaggccccttttgcaaaacctcagtctgaatttagtagacagaagtcactaggaatgccttgacaggatcctgccttagctaaggctccctccagctgcagagggtgtttttgttagactcacacactgcgtgaaactgctcagaatagagccatgatctcaaccacgaaatgggaacttagattttggagaaactaacggggacggacttctttcctagcctgagtgttgagcagtgtcatgccttggcgtttcagctcctcgttgtctaggtggtgaaatgacagaactcattcgcttctttgattggtgattttgaaataatctttcatcaagttccatctcctttaccctcatatggaatatatctctctgtctgttgttaaactacgatgacatgtctgtagctatcagaaagagaagctgggaagaacatgtgacccactggatgggacagccttttaattctgatgatcgtaacacagcatgtcatcatggactagtagctgacagcttgcaggcaagtatggaaaaagatgcaactctaaatgtggaccgcaaagagaagtgtgtttcactacctgactgctgtcatggatcagagctgagagattttcctgggaggccaatgggtcatctttcaaaggatgtggacgaaaatgacagccatgaaggtgaagatcagtttctttctctggaagccagcacagaaacactagtgcatgtttctgatgaggataacaatgctgatttatgccttacagatgataaacaggttttaaatacccaagggcagaaaacatcaggccaacatatgatccaaggagcaggctccttagaaaaggcactgcccatcatacaaagtaaccaagtttcttctaactcctggggaatagctggtgaaactgaattagcactggtaaaagaaagtggggagagaaaagttactgactctataagtaaaagcctggagctttgcaatgaaataagcttaagtgaaataaaagatgcacccaaagtaaatgcagtggatactttgaacgtgaaagatattgcacctgagaaacaattgcttaactctgctgtaattgctcagcaacgaaggaaacctgacccccctaaagatgaaaatgaaagaagcacctgcaatgtagtacaaaatgagttcttggatactccttgcacaaacagaggactgccattattaaaaacagattttggaagctgccttctgcagcctccttcctgccccaatggaatgtcagctgaaaatggcctggagaagagtggtttttcacaacatcaaaacaaaagtccaccaaaggtcaaggcagaagatggcatgcagtgtttacaattaaaggagaccctggccacccaggaacccacagataaccaagtcagacttcgtaagagaaaggaaataagagaagatcgagatagggcgcggctggactccatggtgctgctgattatgaaactggaccagcttgatcaggacatagaaaatgccctcagcaccagctcctctccatcaggcacaccaacaaacctgcggcggcacgttcctgatctggaatcaggatctgaaagtggagcagataccatttcagtaaatcagacacgagtaaatttgtcttctgacactgagtccacggacctcccatcttccactccagtagccaattctggaaccaaacccaagactacggctattcaaggtatttcagagaaggaaaaggctggtaagttgacattttggttctgttttctcgccaatctattttagaataaatttcaccttaaaataggcattttattaaatatataaaatgtatacatctcatgaatatatgggaaaatgttgtttaaattctgtaaaagaaatttgttttgctcaatatgtaagaaaaatatacgtggttttctgacataatgacattgtgttagaataagatatgtgtttcttggggtcttccttgtaactgcaaccacaatttttttttcttaagcaaaagaattaaatgttgatcaaggttctggggaatgaatttggaaattagttattaataattaccaaggtttatttttactcttaatgacttagtagccacagaaaaagatgtaattgatgcttaaagctgatgccatactatcaaaaatatagtgatgaagcaatgtgaataattgtattgaagaaaaaaattatagtatttttctgtgttctgtgctttaattataattatttaacagtattatgggaaatggacaaggactgatgagaaatgaaaatatgaaaaattagacatggattggtagatctatgtgtttttaaaaaatcatactatcttatgtgttctgtgtaataaaaacgaaaacagattaaaggtatattatctaacttgaagtacatcacttagtttgtagacatttgtga

SEQ ID NO: 216733 - DNA, 1392 bp, Artificial Sequence
  derived and/or modified sequence
atgtcggtggccatcaggaaaaggagctgggaagaacatgttacccactggatgggtcagccatttaactccgacgaccggaataccgcctgtcatcacggccttgtggctgacagcctgcaggcatctatggaaaaagacgctactctcaacgttgacaggaaggagaaatgcgtgtcccttcccgactgttgccacggaagtgaacttcgcgattttcctggtaggcccatgggacacctatccaaggatgtggatgagaatgactctcatgaaggggaagaccagttcctgtcattagaggcatccacggaaacactggtccatgttagcgacgaggataacaatgcggacctctgcttgaccgacgacaaacaggtcctgaatacacaaggccagaagacttccggacaacatatgatacagggcgccggatctctggagaaagcgctcccgatcattcaatctaatcaggtctcttccaatagctggggcattgcaggagagacagagttggcccttgtgaaggagagtggagaacgaaaagtcactgattccatctctaaaagcctcgagctttgcaatgagatcagcttgtctgagatcaaagacgccccaaaagttaatgccgtagacaccctgaatgtgaaagatatcgctcctgaaaagcagctactcaacagcgccgtaatagctcagcaaaggaggaaacccgatccaccgaaagacgaaaacgaacggtctacatgcaatgtcgtgcagaatgaatttctggacacaccctgcacaaatcgtggtctcccactgctgaaaacagacttcggaagttgcctgctccagccaccctcctgtcctaatgggatgtcagccgaaaatgggctggagaagtccggattcagccagcaccagaataagtcaccccccaaagtgaaggccgaggacggtatgcaatgcttacaacttaaagagacgctggccacccaagagccaacggacaatcaggtacggctgagaaaacgaaaagagatccgggaagacagggaccgcgccaggttggattcaatggtgcttctgatcatgaaacttgaccagctggatcaagacatagaaaatgcactgagtactagctcttctcctagtggcaccccgacaaacctccggcgacatgtgccagacctggagtctggttcggagtccggcgctgacactattagcgtgaatcagacccgcgtgaatctttcatctgacacagaatcaacggatttgccctcctctacccctgtcgctaacagcggaacaaaaccaaaaacaacagccattcagggcattagcgagaaggagaaggctggcaagttaaccttctggttttgctttttagcaaatttgttctag

SEQ ID NO: 216734 - DNA, 1392 bp, Artificial Sequence
  derived and/or modified sequence
atgtctgtggccatcaggaagaggtcctgggaggagcacgtgacccactggatgggccagcccttcaacagtgatgacaggaacacagcctgccaccacggcctggtggccgacagcctgcaggcctccatggagaaggatgccaccctgaatgtggacaggaaggagaagtgtgtgtccctgcctgactgctgccacggcagcgagctgcgggacttccctggccggcccatgggccacctgagcaaggatgtggatgaaaatgacagccatgaaggagaggaccagttcctgagcctggaggccagcacagagaccctggtgcacgtgtctgatgaggacaacaatgctgacctgtgcctgacagatgacaagcaggtgctgaacacccagggccagaagaccagcggccagcacatgatccagggcgccggcagcctggagaaggccctgcccatcatccagagcaaccaggtgagcagcaacagctggggcattgctggggagacagagctggccctggtgaaggagagcggggagaggaaggtgacagacagcatcagcaagagcctggagctgtgcaatgagatcagcctgtctgagatcaaggatgcccccaaggtgaatgctgtggacaccctgaatgtgaaggacatcgcccctgagaagcagctgctgaacagcgctgtgattgcccagcagaggaggaagccagacccccccaaggatgaaaatgaaagaagcacctgcaatgtggtgcagaatgagttcctggacaccccctgcaccaacagaggcctgcccctgctgaagacagactttggcagctgcctgctgcagccccccagctgccccaacggcatgtctgcagaaaatggcctggagaagagcggcttcagccagcaccagaacaagagcccccccaaggtgaaggcagaagatggcatgcagtgcctgcagctgaaggagaccctggccacccaggagcccacagacaaccaggtgcggctgaggaagaggaaggagatcagagaagatcgggaccgggcccggctggacagcatggtgctgctgatcatgaagctggaccagctggaccaggacattgaaaatgccctgagcaccagcagcagccccagcggcacccccaccaacctgcggagacatgtgcctgacctggagagcggcagcgagagcggggctgacaccatctctgtgaaccagaccagggtgaacctgagcagtgacacagagagcacagacctgcccagcagcacccctgtggccaacagcggcaccaagcccaagaccacagccatccagggcatcagcgagaaggagaaggccggcaagctgaccttctggttctgcttcctggccaacctcttctag

SEQ ID NO: 216735 - DNA, 1392 bp, Artificial Sequence
  derived and/or modified sequence
atgagcgtggccatccggaagcggagctgggaggagcacgtgacccactggatgggccagccattcaacagcgatgataggaacacggcttgccaccatgggcttgtggcagactccctgcaggcgagtatggagaaagacgctaccctcaatgtggaccgcaaagagaagtgtgtctctctgccagactgctgccacggatcagaactcagggactttccaggtcgtcccatgggacacctgtcaaaggatgtggacgaaaacgattcgcacgagggggaggaccagtttctgagtttggaagcttctacagaaacacttgtgcacgtgagcgacgaggataacaacgccgatctctgcttgaccgacgataagcaggtgctgaatacccagggacaaaagacatcggggcaacatatgattcaaggggccggttctctggaaaaggccctgcctatcatccagagcaatcaggtcagctctaattcctggggcatcgccggggagacagaactagctcttgtcaaggaatccggcgagaggaaagttaccgactccatttccaaatctctagaactgtgtaatgagatatccctgagcgaaatcaaggatgcccctaaagtgaatgcagtggacaccctcaacgtgaaagacatagcacctgaaaagcagttactgaacagcgctgtcattgcgcagcagcgcaggaaaccggacccaccaaaagatgagaacgagaggagcacttgcaacgtagtccagaacgagtttctcgacacaccttgtaccaataggggcctccccctccttaagacggatttcggctcctgtcttcttcagccaccatcgtgtcccaacggaatgagcgcagagaacggcctagagaaatccggtttttcacagcaccagaacaaatctcctcccaaggtcaaggccgaggacggtatgcagtgtctgcagttaaaagaaacactggccactcaggagcctaccgataatcaggtgagactccgtaagaggaaggagatccgggaagatagagaccgggcaagactggatagtatggtgctgctcattatgaagctggatcagttggaccaggacatcgagaacgcgctcagtaccagtagctccccttcagggactccaaccaacctgcgtcgtcatgtaccagacctggagagtgggagcgagagcggggccgatactatcagcgtgaaccaaacaagggtgaatctgtcttcagatactgaatccacagacctgcctagttccacgcccgtcgctaactccggcaccaaacccaaaactacagcaatacagggaatatccgaaaaggagaaagccgggaaacttaccttctggttctgtttcctggccaacttattctag

SEQ ID NO: 216736 - DNA, 1392 bp, Artificial Sequence
  derived and/or modified sequence
atgagcgtggccattaggaagagatcatgggaggagcatgtcactcactggatgggacagccatttaactccgacgaccgcaataccgcgtgtcaccacggcctagtggctgattcactgcaggcctctatggagaaggatgctactctgaacgtggatcgaaaagagaaatgcgtttccctgccagactgttgccacggatccgaattaagagattttcccggtagacccatggggcacctgtccaaggatgtggatgagaacgatagccatgaaggtgaggaccagtttctctctctagaagcaagtactgaaacgctggtgcacgtgtcagatgaggataataatgccgacctgtgtctgacagacgacaaacaggtactgaatacacagggccagaaaacatctggacagcatatgatccaaggagcagggtcacttgagaaagccttacctattatacaatccaatcaggtgtcatccaactcctggggcatcgccggagagacagaactggctttagtgaaagaatccggggagcgcaaggtgactgactctatatccaagtccttggagctctgcaatgagattagcctgtcagagatcaaagatgccccaaaagtgaacgcagtggacacactcaatgttaaggacatagcacccgagaaacaactgctcaacagcgccgtgattgctcaacaacgtcggaaacctgatccaccaaaggacgaaaacgagcggtccacttgtaacgtcgtgcaaaacgagtttcttgacaccccctgtaccaatagaggcctacccctgctgaagactgatttcggttcctgccttttgcagcctcctagctgccctaatggcatgtccgcagaaaacggactagagaagtctggattcagccagcatcagaataagagcccacccaaggtcaaggcagaggacgggatgcagtgcttgcaactcaaggaaacgctcgccacccaggaacctaccgacaaccaagtcagactgcggaaacggaaagaaataagggaggatcgagaccgagcgagactggactctatggtgctcctgataatgaagttggaccagctggatcaagatatagagaatgctctgtccacctccagcagtccaagtggcacaccaaccaaccttcgacgccatgttccagacctggagagcgggagcgagagtggggctgacactatcagcgtcaatcagacacgcgttaatctgagctccgataccgaatcaacggatctaccaagctctaccccagtggcaaactccggtaccaagcccaagaccaccgccattcaaggtatatccgaaaaagagaaagctggcaaactcacattctggttttgtttcttggccaatttgttctag

SEQ ID NO: 216737 - protein, 373 aa, Artificial Sequence
  derived and/or modified sequence
MSLLLLLLLVSYYVGTLGTHTEIKRVAEEKVTLPCHHQLGLPEKDTLDIEWLLTDNEGNQKVVITYSSRHVYNNLTEEQKGRVAFASNFLAGDASLQIEPLKPSDEGRYTCKVKNSGRYVWSHVILKVLVRPSKPKCELEGELTEGSDLTLQCESSSGTEPIVYYWQRIREKEGEDERLPPKSRIDYNHPGRVLLQNLTMSYSGLYQCTAGNEAGKESCVVRVTVQYVQSIGMVAGAVTGIVAGALLIFLLVWLLIRRKDKERYEEEERPNEIREDAEAPKARLVKPSSSSSGSRSSRSGSSSTRSTANSASRSQRTLSTDAAPQPGLATQAYSLVGPEVRGSEPKKVHHANLTKAETTPSMIPSQSRAFQTV

SEQ ID NO: 216738 - DNA, 1122 bp, Artificial Sequence
  derived and/or modified sequence
atgtccttgttgctccttcttttgctcgtgtcatactatgtggggacactgggaactcatactgagataaagagggttgccgaggaaaaggtgacgctcccttgtcaccaccaactggggctcccggaaaaagacacactggatatcgagtggctcttaaccgacaatgaagggaatcaaaaagtggtgatcacatactccagcaggcacgtgtataacaacctgactgaggaacagaagggccgtgtcgcttttgccagcaacttcctggcgggggacgccagcttacaaatagaacccttgaaaccatctgacgagggcaggtacacctgtaaggtgaaaaactctggtaggtacgtgtggtcccatgtaatcctgaaagtgcttgtgagaccgagcaagcccaaatgtgagctggagggggaacttacagaaggcagcgacctcacgctacaatgcgaatcctccagcggcacagagccaatcgtgtattactggcaacggatcagagaaaaagaaggagaagatgaacgattaccccctaagtcaagaatcgattataatcaccccggtagggtgctactacagaatctgaccatgagctactctggactgtaccagtgcactgccggcaacgaggccggcaaggagtcttgtgtggttcgagttaccgtacagtatgtgcagagcattggaatggtagctggggcagttactgggatcgtcgctggggctcttttaattttcttgctggtctggctgctcatacgaagaaaagacaaagagaggtacgaggaagaagagcggcctaacgaaatcagagaggatgcagaggcaccgaaggctcgattggtgaagcccagcagttcatccagcggctcccggagcagtaggtctggatccagctctacgcgctccactgcaaattccgccagtcggagtcaaaggacgcttagcacagatgctgctccccagcctggcctggccacccaggcctattcgctggtcggacctgaggtccgaggatctgaacccaagaaggtccaccacgccaatctgaccaaggctgagacaacacctagtatgattccaagccagtctcgcgcatttcaaaccgtctag

SEQ ID NO: 216739 - DNA, 1122 bp, Artificial Sequence
  derived and/or modified sequence
atgagcctgctgctgctgctgctgctggtgtcctactacgtgggcaccctgggcacccacacagagatcaagagggtggccgaggagaaggtgaccctgccctgccaccaccagctgggcctgcctgagaaggacaccctggacatcgagtggctgctgacagacaatgaaggcaaccagaaggtggtgatcacctacagcagccgccacgtgtacaacaacctgacagaggagcagaagggccgggtggcctttgccagcaacttcctggccggagatgccagcctgcagatcgagcccctgaagcccagtgatgagggccgctacacctgcaaggtgaagaacagcggccgctacgtgtggagccacgtgatcctgaaggtgctggtgcggcccagcaagcccaagtgtgagctggagggggagctgacagagggcagtgacctgaccctgcagtgtgagagcagcagcggcacagagcccatcgtgtactactggcagaggatccgggagaaggagggagaagatgagcggctgccccccaagagcagaattgactacaaccaccctggccgggtgctgctgcagaacctgaccatgagctacagcggcctgtaccagtgcacagctggaaatgaggccggcaaggagagctgtgtggtgcgggtgacagtgcagtatgtgcagagcatcggcatggtggccggggctgtgactggaattgtggccggggccctgctgatcttcctgctggtgtggctgctgatccggaggaaggacaaggagagatatgaggaggaggagcggcccaatgagatcagagaagatgctgaggcccccaaggcccggctggtgaagcccagcagcagcagcagcggcagccgcagcagccgcagcggcagcagcagcaccaggagcacagccaacagcgccagccgcagccagaggaccctgagcacagatgctgccccccagcccggcctggccacccaggcctacagcctggtgggccctgaggtgcggggcagcgagcccaagaaggtgcaccacgccaacctgaccaaggccgagaccacccccagcatgatccccagccagagccgggccttccagacagtgtag

SEQ ID NO: 216740 - DNA, 1122 bp, Artificial Sequence
  derived and/or modified sequence
atgagcctgctgctgctgctgctgctggtgagctactacgtgggcactcttggaacccataccgagataaaaagggtcgcagaggagaaagttacacttccttgtcaccaccaactcggactaccagaaaaggatacgctcgacatcgagtggcttctgacggacaacgaagggaatcagaaagtcgttattacatatagttctcggcacgtgtacaacaacctgacggaagagcagaaaggtcgcgtcgcattcgccagcaattttctggccggcgatgcgagcctgcaaattgaaccactcaaaccaagcgatgagggcaggtacacatgtaaagtgaagaactcagggagatatgtctggtcacatgtgatcctgaaagtcctcgtgcgtccttccaaaccaaagtgtgagctcgaaggcgagctgaccgaaggctccgacttaacactacagtgtgagtcctcttctggcactgagcctattgtgtactactggcagagaattcgtgagaaggagggtgaggatgaacggcttcctccgaagtccaggatcgattataaccatccagggagggtgctgctccagaatctgacaatgagttactccgggctgtaccaatgcactgctggcaacgaagcaggaaaagaatcttgcgtggtccgtgtcactgttcagtacgtgcagagcattggcatggtggcgggcgcagtaaccggcatcgtagccggagccctgctgattttcctgctcgtatggctgctgatcagacgaaaggataaagaacgttacgaggaggaagagagacctaatgagatccgggaagacgctgaagcgccaaaggcacgcctcgtgaagccgtctagcagtagcagcgggagtagatcatcccgcagtgggagctcctccactagatcaacagccaactccgcaagccggagtcagcgaaccctgtcgaccgacgcagctccacagcctgggctggcaacacaggcgtactccctcgtgggccctgaggtgaggggaagcgagcctaagaaggtgcatcatgccaatctaactaaagcggaaaccactccttctatgatccctagccagagtagggcctttcagacagtgtag

SEQ ID NO: 216741 - DNA, 1122 bp, Artificial Sequence
  derived and/or modified sequence
atgtcattactcctcctcctgttacttgtttcctactatgtaggaactctcggaactcacaccgaaatcaaacgagtggccgaggaaaaagtgacattgccttgtcaccaccagcttgggctgccggaaaaagatacgctggacatcgagtggctgctcacagataacgaggggaatcaaaaagtcgtcattacctactcaagcaggcatgtctataacaatcttaccgaggaacagaaaggaagagtggcattcgccagcaactttcttgcgggtgatgcttcgctgcagatcgaaccgctaaagccgagcgacgaaggaagatacacctgcaaggtcaagaacagtggacgctacgtgtggtcacacgtcatcttaaaggtgcttgtcagacctagcaagcccaagtgtgaactggagggagagttaaccgagggtagcgatttgactttacagtgtgaatcttccagcggtactgaaccaattgtctactattggcagcggatcagagagaaagagggggaggatgagagactgcccccaaaatctagaatcgattacaaccatcctggcagggtcctgcttcagaatctgactatgagctactctggcctgtaccagtgtacggctggtaatgaagcaggtaaggaatcctgcgtggtgagggtaacagttcagtatgttcaatctatcggaatggtggctggcgctgttactggcatcgtagcgggagcattgctaattttcttgctggtgtggcttctgattcgccgaaaggataaagagagatacgaagaagaggagcggcctaacgagatccgcgaagatgcggaggctcctaaagctcgtctcgtaaaaccttccagctcctccagcggctcccgaagcagccggtcgggcagttctagcacccgatccaccgccaactctgcttcgagaagtcagcgcacactgtcaactgacgcggctccccagcctggtttggcgactcaggcttactctctggtgggccctgaggtgagggggtccgaacctaagaaggtgcaccatgctaatctgacgaaagccgaaacaaccccatcgatgataccatctcaatctcgggcatttcaaacggtatag

SEQ ID NO: 216742 - DNA, 2610 bp, Artificial Sequence
  derived and/or modified sequence
agctgaattttttttttccctctctctttcttcactcctttttctttccaaacagggaaaagtgttccacgaagcggtagcgccttttcgcctcgcgttttcctccctgaccctggtcccggctcccgtccgggcgccagctggtggggcgagcgccgggagcccatctgcccccaggggcacggggcgcggggccggctcccgcccggcacatggctgcagccacctcgcgcgcaccccgaggcgccgcgcccagctcgcccgaggtccgtcggaggcgcccggccgccccggagccaagcagcagctgagcggggaagcgcccgcgtccggggatcgggatgtccctcctccttctcctcttgctagtttcctactatgttggaaccttggggactcacactgagatcaagagagtggcagaggaaaaggtcactttgccctgccaccatcaactggggcttccagaaaaagacactctggatattgaatggctgctcaccgataatgaagggaaccaaaaagtggtgatcacttactccagtcgtcatgtctacaataacttgactgaggaacagaagggccgagtggcctttgcttccaatttcctggcaggagatgcctccttgcagattgaacctctgaagcccagtgatgagggccggtacacctgtaaggttaagaattcagggcgctacgtgtggagccatgtcatcttaaaagtcttagtgagaccatccaagcccaagtgtgagttggaaggagagctgacagaaggaagtgacctgactttgcagtgtgagtcatcctctggcacagagcccattgtgtattactggcagcgaatccgagagaaagagggagaggatgaacgtctgcctcccaaatctaggattgactacaaccaccctggacgagttctgctgcagaatcttaccatgtcctactctggactgtaccagtgcacagcaggcaacgaagctgggaaggaaagctgtgtggtgcgagtaactgtacagtatgtacaaagcatcggcatggttgcaggagcagtgacaggcatagtggctggagccctgctgattttcctcttggtgtggctgctaatccgaaggaaagacaaagaaagatatgaggaagaagagagacctaatgaaattcgagaagatgctgaagctccaaaagcccgtcttgtgaaacccagctcctcttcctcaggctctcggagctcacgctctggttcttcctccactcgctccacagcaaatagtgcctcacgcagccagcggacactgtcaactgacgcagcaccccagccagggctggccacccaggcatacagcctagtggggccagaggtgagaggttctgaaccaaagaaagtccaccatgctaatctgaccaaagcagaaaccacacccagcatgatccccagccagagcagagccttccaaacggtctgaattacaatggacttgactcccacgctttcctaggagtcagggtctttggactcttctcgtcattggagctcaagtcaccagccacacaaccagatgagaggtcatctaagtagcagtgagcattgcacggaacagattcagatgagcattttccttatacaataccaaacaagcaaaaggatgtaagctgattcatctgtaaaaaggcatcttattgtgcctttagaccagagtaagggaaagcaggagtccaaatctatttgttgaccaggacctgtggtgagaaggttggggaaaggtgaggtgaatatacctaaaacttttaatgtgggatattttgtatcagtgctttgattcacaattttcaagaggaaatgggatgctgtttgtaaattttctatgcatttctgcaaacttattggattattagttattcagacagtcaagcagaacccacagccttattacacctgtctacaccatgtactgagctaaccacttctaagaaactccaaaaaaggaaacatgtgtcttctattctgacttaacttcatttgtcataaggtttggatattaatttcaaggggagttgaaatagtgggagatggagaagagtgaatgagtttctcccactctatactaatctcactatttgtattgagcccaaaataactatgaaaggagacaaaaatttgtgacaaaggattgtgaagagctttccatcttcatgatgttatgaggattgttgacaaacattagaaatatataatggagcaattgtggatttcccctcaaatcagatgcctctaaggactttcctgctagatatttctggaaggagaaaatacaacatgtcatttatcaacgtccttagaaagaattcttctagagaaaaagggatctaggaatgctgaaagattacccaacataccattatagtctcttctttctgagaaaatgtgaaaccagaattgcaagactgggtggactagaaagggagattagatcagttttctcttaatatgtcaaggaaggtagccgggcatggtgccaggcacctgtaggaaaatccagcaggtggaggttgcagtgagccaagattatgccattgcactccagcctgggtgacaaagcaagactccatctc

SEQ ID NO: 216743 - DNA, 1122 bp, Artificial Sequence
  derived and/or modified sequence
atgagcctgctgctgctgctgctgctggtgagctactacgtgggcaccctgggcacccacaccgagatcaagagagtggccgaggagaaggtgaccctgccctgccaccaccagctgggcctgcccgagaaggacaccctggacatcgagtggctgctgaccgacaacgagggcaaccagaaggtggtgatcacctacagcagcagacacgtgtacaacaacctgaccgaggagcagaagggcagagtggccttcgccagcaacttcctggccggcgacgccagcctgcagatcgagcccctgaagcccagcgacgagggcagatacacctgcaaggtgaagaacagcggcagatacgtgtggagccacgtgatcctgaaggtgctggtgagacccagcaagcccaagtgcgagctggagggcgagctgaccgagggcagcgacctgaccctgcagtgcgagagcagcagcggcaccgagcccatcgtgtactactggcagagaatcagagagaaggagggcgaggacgagagactgccccccaagagcagaatcgactacaaccaccccggcagagtgctgctgcagaacctgaccatgagctacagcggcctgtaccagtgcaccgccggcaacgaggccggcaaggagagctgcgtggtgagagtgaccgtgcagtacgtgcagagcatcggcatggtggccggcgccgtgaccggcatcgtggccggcgccctgctgatcttcctgctggtgtggctgctgatcagaagaaaggacaaggagagatacgaggaggaggagagacccaacgagatcagagaggacgccgaggcccccaaggccagactggtgaagcccagcagcagcagcagcggcagcagaagcagcagaagcggcagcagcagcaccagaagcaccgccaacagcgccagcagaagccagagaaccctgagcaccgacgccgccccccagcccggcctggccacccaggcctacagcctggtgggccccgaggtgagaggcagcgagcccaagaaggtgcaccacgccaacctgaccaaggccgagaccacccccagcatgatccccagccagagcagagccttccagaccgtgtag

SEQ ID NO: 216744 - protein, 237 aa, Artificial Sequence
  derived and/or modified sequence
MGRKSSKAKEKKQKRLEERAAMDAVCAKVDAANRLGDPLEAFPVFKKYDRNGLNVSIECKRVSGLEPATVDWAFDLTKTNMQTMYEQSEWGWKDREKREEMTDDRAWYLIAWENSSVPVAFSHFRFDVECGDEVLYCYEVQLESKVRRKGLGKFLIQILQLMANSTQMKKVMLTVFKHNHGAYQFFREALQFEIDDSSPSMSGCCGEDCSYEILSRRTKFGDSHHSHAGGHCGGCCH

SEQ ID NO: 216745 - protein, 197 aa, Artificial Sequence
  derived and/or modified sequence
MPFVPKWTLPTGLNVSIECKRVSGLEPATVDWAFDLTKTNMQTMYEQSEWGWKDREKREEMTDDRAWYLIAWENSSVPVAFSHFRFDVECGDEVLYCYEVQLESKVRRKGLGKFLIQILQLMANSTQMKKVMLTVFKHNHGAYQFFREALQFEIDDSSPSMSGCCGEDCSYEILSRRTKFGDSHHSHAGGHCGGCCH

SEQ ID NO: 216746 - protein, 167 aa, Artificial Sequence
  derived and/or modified sequence
MSEWMKKGPLEWQDYIYKEVRVTASEKNEYKGWVLTTDPVSANIVLVNFLEDGSMSVTGIMGHAVQTVETMNEGDHRVREKLMHLFTSGDCKAYSPEDLEERKNSLKKWLEKNHIPITEQGDAPRTLCVAGVLTIDPPYGPENCSSSNEIILSRVQDLIEGHLTASQ

SEQ ID NO: 216747 - protein, 111 aa, Artificial Sequence
  derived and/or modified sequence
MSEWMKKGPLEWQDYIYKEVRVTASEKNEYKGWVLTTDPVSAKVLLSPRLECSGEISALCNLHLAGSSDSPALASRVAGTTGICHHVWLIFVFFVETGLRHVAQYCPCELP

SEQ ID NO: 216748 - DNA, 504 bp, Artificial Sequence
  derived and/or modified sequence
atgtctgagtggatgaagaagggccccctggaatggcaagattacatctataaggaagtaagagtcactgcatccgaaaaaaacgagtacaaaggttgggtcctgactacagaccctgtatcagccaacatcgtcttggttaatttcctcgaagatggttctatgagtgtgaccggcattatgggccacgccgtccagacggtggagaccatgaatgaaggcgaccatagggtgcgggagaaactgatgcacctcttcacgtccggcgattgtaaggcgtatagcccagaagacctggaagaacgcaagaactctttaaagaaatggctcgaaaagaaccacattccaatcacagagcagggggacgctcctcgaaccctgtgcgtggccggtgtcctgacaatagaccccccgtacgggcctgagaactgttcatcatccaacgagatcatcctcagtcgtgtccaggatttgatcgagggccatcttacagcttcccagtag

SEQ ID NO: 216749 - DNA, 336 bp, Artificial Sequence
  derived and/or modified sequence
atgagtgagtggatgaagaagggccctctagaatggcaagactatatctacaaggaggtgcgggtcactgctagtgagaaaaatgagtataagggttgggttctcaccacagacccagtgtctgcaaaagttcttctttccccacggcttgaatgtagcggagagatttctgctctgtgtaacctacacctggctggttctagtgatagccctgcactcgcaagccgagtggcagggacaaccgggatatgtcaccacgtctggctcatcttcgttttttttgtggagaccggcttaaggcatgtggcacagtactgtccttgtgagctcccatag

SEQ ID NO: 216750 - DNA, 504 bp, Artificial Sequence
  derived and/or modified sequence
atgtctgagtggatgaagaagggccccctggagtggcaggactacatctacaaggaggtgcgggtgacagccagcgagaagaatgagtacaagggctgggtgctgaccacagatcctgtgtctgccaacatcgtgctggtgaacttcctggaggatggctccatgtctgtgacaggcatcatgggccatgctgtgcagacagtggagaccatgaatgaaggagaccaccgggtgcgggagaagctgatgcacctgttcaccagcggggactgcaaggcctacagccctgaggacctggaggagaggaagaacagcctgaagaagtggctggagaagaaccacatccccatcacagagcagggagatgcccccaggaccctgtgtgtggccggcgtgctgaccattgatcctccctacggccctgagaactgcagcagcagcaatgagatcatcctgagccgggtgcaggacctgattgagggccacctgacagccagccagtag

SEQ ID NO: 216751 - DNA, 336 bp, Artificial Sequence
  derived and/or modified sequence
atgtctgagtggatgaagaagggccccctggagtggcaggactacatctacaaggaggtgcgggtgacagccagcgagaagaatgagtacaagggctgggtgctgaccacagatcctgtgtctgccaaggtgctgctgagcccccggctggagtgcagcggggagatcagcgccctgtgcaacctgcacctggccggcagcagtgacagccctgccctggccagccgggtggccggcaccaccggcatctgccaccacgtgtggctgatctttgtgttctttgtggagaccggcctgcggcacgtggcccagtactgcccctgtgagctgccctag

SEQ ID NO: 216752 - DNA, 504 bp, Artificial Sequence
  derived and/or modified sequence
atgagcgagtggatgaagaagggccccctggagtggcaggactacatttacaaagaggtgcgcgtgactgcctccgaaaaaaacgagtataagggttgggtactgacgaccgatcctgtgtctgccaacatcgtgttggttaactttctggaagacgggtctatgtccgtgactggaattatgggccatgcagtgcaaactgtggagaccatgaatgagggcgatcaccgtgttagggaaaagctgatgcatctttttacttctggcgattgtaaggcctactcgccagaagatctagaagaacggaagaacagcttaaagaaatggcttgaaaaaaatcacataccaataactgagcagggagatgctccccggacattgtgtgtggccggggtcttgaccatcgacccgccatatggccccgaaaactgcagttccagtaacgaaatcattctttcccgagtacaagaccttattgaggggcaccttaccgcatctcagtag

SEQ ID NO: 216753 - DNA, 336 bp, Artificial Sequence
  derived and/or modified sequence
atgagcgagtggatgaagaagggccccctggagtggcaggactacatttataaggaggtgagggtaaccgcctccgaaaagaacgaatacaagggttgggtgctgaccacggacccggttagtgccaaagtcctgctgtcgccacgcctggaatgctctggagagatttcagcactgtgtaatctgcatttggcagggtctagtgacagccctgcgctggcctcccgcgtcgccggcaccaccgggatttgccaccatgtttggctgatcttcgtttttttcgtggagaccggtctgcgccacgttgctcagtactgcccttgcgagctcccatag

SEQ ID NO: 216754 - DNA, 504 bp, Artificial Sequence
  derived and/or modified sequence
atgtccgaatggatgaagaagggccctctcgaatggcaagattacatttataaggaagtacgtgtgactgctagtgagaagaatgaatataagggttgggtcttgaccaccgatcctgtctccgcgaatatagtactggtcaacttcctcgaggatgggagcatgagcgtcaccggtatcatgggacacgccgtccaaacagtcgagactatgaatgaaggggatcatcgagtgcgggaaaaactcatgcacctgttcacatctggagattgcaaggcctactcacctgaagatctcgaggagagaaaaaattccctgaaaaaatggctcgagaagaaccatattcctattaccgagcagggagacgctccacgaactctctgcgtggccggagtgttgactatcgatccgccatacggtccagagaattgctcttcgtctaatgaaattatcctgtcacgcgttcaggatctgatcgagggtcatctcaccgcgtctcagtag

SEQ ID NO: 216755 - DNA, 336 bp, Artificial Sequence
  derived and/or modified sequence
atgtctgaatggatgaaaaaggggccactggagtggcaggactacatctataaggaggtcagggtaacagctagcgagaagaacgagtataaagggtgggtgctgacaactgacccagtaagcgctaaagtgttactgtcacctcgactggaatgcagcggagaaatctctgccctttgtaaccttcatctggccggttcatcagactcaccagctctggcaagcagagtggctggtactacaggtatatgccatcacgtctggttgatattcgtgtttttcgtcgagaccggactgagacacgtagcccagtattgtccatgcgaactgccttag

SEQ ID NO: 216756 - DNA, 1184 bp, Artificial Sequence
  derived and/or modified sequence
ggcgcaaagcatgctggtctcaggcggtctccgctcaacgatccttcctcaaagcatggttgctgagtacccagagttgcgaggagttttttaactgatttagccaggtggcaatcatgagtgaatggatgaagaaaggccccttagaatggcaagattacatttacaaagaggtccgagtgacagccagtgagaagaatgagtataaaggatgggttttaactacagacccagtctctgccaatattgtccttgtgaacttccttgaagatggcagcatgtctgtgaccggaattatgggacatgctgtgcagactgttgaaactatgaatgaaggggaccatagagtgagggagaagctgatgcatttgttcacgtctggagactgcaaagcatacagcccagaggatctggaagagagaaagaacagcctaaagaaatggcttgagaagaaccacatccccatcactgaacagggagacgctccaaggactctctgtgtggctggggtcctgactatagacccaccatatggtccagaaaattgcagcagctctaatgagattattctgtcgcgtgttcaggatcttattgaaggacatcttacagcttcccaatgagaggccaggaagtgtgaacatactgatagaaaaagactatattttatccctcataaaatgttttaaatgtaaatgtacatgactgtgtgtgtgtatgtgtgtgtgtgtataattctttgttgttttggtaaaatcagaggagtgggttataagtgctaatttccttgggaaattaatgaactagggcaagtatagcatcccatgcataaaattagcacagggacatcagaattgtatgggtcttcttttttctttttttcttttttttttgagatggagtctcgctctgttgccaggtttgagtgcagtggcgcaatctcagctcagtgcaacctccgcctcccaggttcaaccgattcccctgcctcagcctctcgagtagctgggactacaggtgcacgccaccactcccagctaattttttgtattttagtagagatggggtttcacctgtatgggtcttttcttgtgatggggttacacccccatttttgttaggcaagaaaagcatttggaaaaaaatgtaacatgttagattcaatataaaatattatggtaagatca

SEQ ID NO: 216757 - DNA, 504 bp, Artificial Sequence
  derived and/or modified sequence
atgagcgagtggatgaagaagggccccctggagtggcaggactacatctacaaggaggtgagagtgaccgccagcgagaagaacgagtacaagggctgggtgctgaccaccgaccccgtgagcgccaacatcgtgctggtgaacttcctggaggacggcagcatgagcgtgaccggcatcatgggccacgccgtgcagaccgtggagaccatgaacgagggcgaccacagagtgagagagaagctgatgcacctgttcaccagcggcgactgcaaggcctacagccccgaggacctggaggagagaaagaacagcctgaagaagtggctggagaagaaccacatccccatcaccgagcagggcgacgcccccagaaccctgtgcgtggccggcgtgctgaccatcgaccccccctacggccccgagaactgcagcagcagcaacgagatcatcctgagcagagtgcaggacctgatcgagggccacctgaccgccagccagtag

SEQ ID NO: 216758 - DNA, 336 bp, Artificial Sequence
  derived and/or modified sequence
atgagcgagtggatgaagaagggccccctggagtggcaggactacatctacaaggaggtgagagtgaccgccagcgagaagaacgagtacaagggctgggtgctgaccaccgaccccgtgagcgccaaggtgctgctgagccccagactggagtgcagcggcgagatcagcgccctgtgcaacctgcacctggccggcagcagcgacagccccgccctggccagcagagtggccggcaccaccggcatctgccaccacgtgtggctgatcttcgtgttcttcgtggagaccggcctgagacacgtggcccagtactgcccctgcgagctgccctag

SEQ ID NO: 216759 - protein, 1746 aa, Artificial Sequence
  derived and/or modified sequence
MSACNTFTEHVWKPGECKNCFKPKSLHQLPPDPEKAPITHGNVKTNANHSNNHRIRNTGNFRPPVAKKPTIAVKPTMIVADGQSICGELSIQEHCENKPVIIGWNRNRAALSQKPLNNNNEDDEGISHVPKPYGNNDSAKKMSDNNNGLTEVLKEIAGLDTAPQIRGNETNSRETFLGRINDCYKRSLERKLPPSCMIGGIKETQGKHVILSGSTEVISNEGGRFCYPEFSSGEESEEDVLFSNMEEEHESWDESDEELLAMEIRMRGQPRFANFRANTLSPVRFFVDKKWNTIPLRNKSLQRICAVDYDDSYDEILNGYEENSVVSYGQGSIQSMVSSDSTSPDSSLTEESRSETASSLSQKICNGGLSPGNPGDSKDMKEIEPNYESPSSNNQDKDSSQASKSSIKVPETHKAVLALRLEEKDGKIAVQTEKEESKASTDVAGQAVTINLVPTEEQAKPYRVVNLEQPLCKPYTVVDVSAAMASEHLEGPVNSPKTKSSSSTPNSPVTSSSLTPGQISAHFQKSSAIRYQEVWTSSTSPRQKIPKVELITSGTGPNVPPRKNCHKSAPTSPTATNISSKTIPVKSPNLSEIKFNSYNNAGMPPFPIIIHDEPTYARSSKNAIKVPIVINPNAYDNLAIYKSFLGTSGELSVKEKTTSVISHTYEEIETESKVPDNTTSKTTDCLQTKGFSNSTEHKRGSVAQKVQEFNNCLNRGQSSPQRSYSSSHSSPAKIQRATQEPVAKIEGTQESQMVGSSSTREKASTVLSQIVASIQPPQSPPETPQSGPKACSVEELYAIPPDADVAKSTPKSTPVRPKSLFTSQPSGEAEAPQTTDSPTTKVQKDPSIKPVTPSPSKLVTSPQSEPPAPFPPPRSTSSPYHAGNLLQRHFTNWTKPTSPTRSTEAESVLHSEGSRRAADAKPKRWISFKSFFRRRKTDEEDDKEKEREKGKLVGLDGTVIHMLPPPPVQRHHWFTEAKGESSEKPAIVFMYRCDPAQGQLSVDQSKARTDQAAVMEKGRAENALLQDSEKKRSHSSPSQIPKKILSHMTHEVTEDFSPRDPRTVVGKQDGRGCTSVTTALSLPELEREDGKEDISDPMDPNPCSATYSNLGQSRAAMIPPKQPRQPKGAVDDAIAFGGKTDQEAPNASQPTPPPLPKKMIIRANTEPISKDLQKSMESSLCVMANPTYDIDPNWDASSAGSSISYELKGLDIESYDSLERPLRKERPVPSAANSISSLTTLSIKDRFSNSMESLSSRRGPSCRQGRGIQKPQRQALYRGLENREEVVGKIRSLHTDALKKLAVKCEDLFMAGQKDQLRFGVDSWSDFRLTSDKPCCEAGDAVYYTASYAKDPLNNYAVKICKSKAKESQQYYHSLAVRQSLAVHFNIQQDCGHFLAEVPNRLLPWEDPDDPEKDEDDMEETEEDAKGETDGKNPKPCSEAASSQKENQGVMSKKQRSHVVVITREVPCLTVADFVRDSLAQHGKSPDLYERQVCLLLLQLCSGLEHLKPYHVTHCDLRLENLLLVHYQPGGTAQGFGPAEPSPTSSYPTRLIVSNFSQAKQKSHLVDPEILRDQSRLAPEIITATQYKKCDEFQTGILIYEMLHLPNPFDENPELKEREYTRADLPRIPFRSPYSRGLQQLASCLLNPNPSERILISDAKGILQCLLWGPREDLFQTFTACPSLVQRNTLLQNWLDIKRTLLMIKFAEKSLDREGGISLEDWLCAQYLAFATTDSLSCIVKILQHR

SEQ ID NO: 216760 - DNA, 5241 bp, Artificial Sequence
  derived and/or modified sequence
atgagcgcctgcaacaccttcaccgagcacgtgtggaagcccggcgagtgcaagaactgcttcaagcccaagagcctgcaccagctgccccccgaccccgagaaggcccccatcacccacggcaacgtgaagaccaacgccaaccacagcaacaaccacagaatcagaaacaccggcaacttcagaccccccgtggccaagaagcccaccatcgccgtgaagcccaccatgatcgtggccgacggccagagcatctgcggcgagctgagcatccaggagcactgcgagaacaagcccgtgatcatcggctggaacagaaacagagccgccctgagccagaagcccctgaacaacaacaacgaggacgacgagggcatcagccacgtgcccaagccctacggcaacaacgacagcgccaagaagatgagcgacaacaacaacggcctgaccgaggtgctgaaggagatcgccggcctggacaccgccccccagatcagaggcaacgagaccaacagcagagagaccttcctgggcagaatcaacgactgctacaagagaagcctggagagaaagctgccccccagctgcatgatcggcggcatcaaggagacccagggcaagcacgtgatcctgagcggcagcaccgaggtgatcagcaacgagggcggcagattctgctaccccgagttcagcagcggcgaggagagcgaggaggacgtgctgttcagcaacatggaggaggagcacgagagctgggacgagagcgacgaggagctgctggccatggagatcagaatgagaggccagcccagattcgccaacttcagagccaacaccctgagccccgtgagattcttcgtggacaagaagtggaacaccatccccctgagaaacaagagcctgcagagaatctgcgccgtggactacgacgacagctacgacgagatcctgaacggctacgaggagaacagcgtggtgagctacggccagggcagcatccagagcatggtgagcagcgacagcaccagccccgacagcagcctgaccgaggagagcagaagcgagaccgccagcagcctgagccagaagatctgcaacggcggcctgagccccggcaaccccggcgacagcaaggacatgaaggagatcgagcccaactacgagagccccagcagcaacaaccaggacaaggacagcagccaggccagcaagagcagcatcaaggtgcccgagacccacaaggccgtgctggccctgagactggaggagaaggacggcaagatcgccgtgcagaccgagaaggaggagagcaaggccagcaccgacgtggccggccaggccgtgaccatcaacctggtgcccaccgaggagcaggccaagccctacagagtggtgaacctggagcagcccctgtgcaagccctacaccgtggtggacgtgagcgccgccatggccagcgagcacctggagggccccgtgaacagccccaagaccaagagcagcagcagcacccccaacagccccgtgaccagcagcagcctgacccccggccagatcagcgcccacttccagaagagcagcgccatcagataccaggaggtgtggaccagcagcaccagccccagacagaagatccccaaggtggagctgatcaccagcggcaccggccccaacgtgccccccagaaagaactgccacaagagcgcccccaccagccccaccgccaccaacatcagcagcaagaccatccccgtgaagagccccaacctgagcgagatcaagttcaacagctacaacaacgccggcatgccccccttccccatcatcatccacgacgagcccacctacgccagaagcagcaagaacgccatcaaggtgcccatcgtgatcaaccccaacgcctacgacaacctggccatctacaagagcttcctgggcaccagcggcgagctgagcgtgaaggagaagaccaccagcgtgatcagccacacctacgaggagatcgagaccgagagcaaggtgcccgacaacaccaccagcaagaccaccgactgcctgcagaccaagggcttcagcaacagcaccgagcacaagagaggcagcgtggcccagaaggtgcaggagttcaacaactgcctgaacagaggccagagcagcccccagagaagctacagcagcagccacagcagccccgccaagatccagagagccacccaggagcccgtggccaagatcgagggcacccaggagagccagatggtgggcagcagcagcaccagagagaaggccagcaccgtgctgagccagatcgtggccagcatccagcccccccagagcccccccgagaccccccagagcggccccaaggcctgcagcgtggaggagctgtacgccatcccccccgacgccgacgtggccaagagcacccccaagagcacccccgtgagacccaagagcctgttcaccagccagcccagcggcgaggccgaggccccccagaccaccgacagccccaccaccaaggtgcagaaggaccccagcatcaagcccgtgacccccagccccagcaagctggtgaccagcccccagagcgagccccccgcccccttccccccccccagaagcaccagcagcccctaccacgccggcaacctgctgcagagacacttcaccaactggaccaagcccaccagccccaccagaagcaccgaggccgagagcgtgctgcacagcgagggcagcagaagagccgccgacgccaagcccaagagatggatcagcttcaagagcttcttcagaagaagaaagaccgacgaggaggacgacaaggagaaggagagagagaagggcaagctggtgggcctggacggcaccgtgatccacatgctgccccccccccccgtgcagagacaccactggttcaccgaggccaagggcgagagcagcgagaagcccgccatcgtgttcatgtacagatgcgaccccgcccagggccagctgagcgtggaccagagcaaggccagaaccgaccaggccgccgtgatggagaagggcagagccgagaacgccctgctgcaggacagcgagaagaagagaagccacagcagccccagccagatccccaagaagatcctgagccacatgacccacgaggtgaccgaggacttcagccccagagaccccagaaccgtggtgggcaagcaggacggcagaggctgcaccagcgtgaccaccgccctgagcctgcccgagctggagagagaggacggcaaggaggacatcagcgaccccatggaccccaacccctgcagcgccacctacagcaacctgggccagagcagagccgccatgatcccccccaagcagcccagacagcccaagggcgccgtggacgacgccatcgccttcggcggcaagaccgaccaggaggcccccaacgccagccagcccacccccccccccctgcccaagaagatgatcatcagagccaacaccgagcccatcagcaaggacctgcagaagagcatggagagcagcctgtgcgtgatggccaaccccacctacgacatcgaccccaactgggacgccagcagcgccggcagcagcatcagctacgagctgaagggcctggacatcgagagctacgacagcctggagagacccctgagaaaggagagacccgtgcccagcgccgccaacagcatcagcagcctgaccaccctgagcatcaaggacagattcagcaacagcatggagagcctgagcagcagaagaggccccagctgcagacagggcagaggcatccagaagccccagagacaggccctgtacagaggcctggagaacagagaggaggtggtgggcaagatcagaagcctgcacaccgacgccctgaagaagctggccgtgaagtgcgaggacctgttcatggccggccagaaggaccagctgagattcggcgtggacagctggagcgacttcagactgaccagcgacaagccctgctgcgaggccggcgacgccgtgtactacaccgccagctacgccaaggaccccctgaacaactacgccgtgaagatctgcaagagcaaggccaaggagagccagcagtactaccacagcctggccgtgagacagagcctggccgtgcacttcaacatccagcaggactgcggccacttcctggccgaggtgcccaacagactgctgccctgggaggaccccgacgaccccgagaaggacgaggacgacatggaggagaccgaggaggacgccaagggcgagaccgacggcaagaaccccaagccctgcagcgaggccgccagcagccagaaggagaaccagggcgtgatgagcaagaagcagagaagccacgtggtggtgatcaccagagaggtgccctgcctgaccgtggccgacttcgtgagagacagcctggcccagcacggcaagagccccgacctgtacgagagacaggtgtgcctgctgctgctgcagctgtgcagcggcctggagcacctgaagccctaccacgtgacccactgcgacctgagactggagaacctgctgctggtgcactaccagcccggcggcaccgcccagggcttcggccccgccgagcccagccccaccagcagctaccccaccagactgatcgtgagcaacttcagccaggccaagcagaagagccacctggtggaccccgagatcctgagagaccagagcagactggcccccgagatcatcaccgccacccagtacaagaagtgcgacgagttccagaccggcatcctgatctacgagatgctgcacctgcccaaccccttcgacgagaaccccgagctgaaggagagagagtacaccagagccgacctgcccagaatccccttcagaagcccctacagcagaggcctgcagcagctggccagctgcctgctgaaccccaaccccagcgagagaatcctgatcagcgacgccaagggcatcctgcagtgcctgctgtggggccccagagaggacctgttccagaccttcaccgcctgccccagcctggtgcagagaaacaccctgctgcagaactggctggacatcaagagaaccctgctgatgatcaagttcgccgagaagagcctggacagagagggcggcatcagcctggaggactggctgtgcgcccagtacctggccttcgccaccaccgacagcctgagctgcatcgtgaagatcctgcagcacagatag

SEQ ID NO: 216761 - DNA, 5241 bp, Artificial Sequence
  derived and/or modified sequence
atgtccgcatgtaatacctttactgagcatgtgtggaagcccggggaatgcaaaaactgcttcaaaccgaagtctctacatcagttaccacctgatcccgaaaaagcaccgataacccacggcaacgtgaagacaaacgccaatcatagcaacaaccatcgcatacgaaacacagggaacttcagacccccagtcgcaaagaagcccaccatagcagtgaagccaacgatgatcgtagccgatgggcagtccatctgcggggagctaagcattcaagagcactgcgagaataaacctgtaatcattggatggaatcggaacagagccgctctgagccagaaaccattgaataacaacaacgaagacgacgaggggatctcccatgtaccaaaaccctacggcaacaacgattccgccaagaagatgagcgataacaataacggacttactgaagtgctgaaggaaattgcaggcctggatactgccccccagatacgaggaaacgaaaccaacagccgggagaccttcctgggccggatcaacgactgttacaagcgaagcttagaaaggaagctgcccccctcctgcatgatcgggggcataaaggagacacaaggtaaacacgtcatcctgtcagggtcgactgaggtcatatctaacgagggcgggaggttttgctacccggagttctcaagcggcgaggagtcagaagaagacgttttattcagcaatatggaggaagaacacgagtcttgggatgaatcagatgaggagttgctggcgatggagattcgcatgaggggacagcctcgctttgcgaacttcagagcaaatacactaagtccagtgagatttttcgttgacaaaaagtggaatacaattccccttagaaacaagtccctgcagcggatctgcgcagttgattacgacgattcctatgacgagatcttgaatggctacgaagagaatagcgttgtttcgtatgggcagggctccatccagagtatggtgtcttctgattcaacatctccagattccagcctcactgaggagtctcggtccgaaaccgcctctagtctaagccagaagatctgcaatggaggcctgagtcctggcaaccctggagacagcaaggatatgaaggaaatagagcccaactacgagagcccaagttctaacaaccaagataaagacagcagccaggcgtctaagagttcaatcaaggtccccgaaacccataaagctgtgctggcacttcggctcgaagagaaggatgggaagattgctgtgcagacagaaaaagaagagagcaaggcaagcactgatgtggccgggcaggccgtcacaattaatcttgttcccaccgaagagcaggccaaaccttatagagttgtgaatctggagcagcccctgtgtaagccctataccgtagtggatgtaagtgcggctatggccagcgaacacctggagggtcctgtcaacagtccaaagacaaaatctagctcctcaactccgaacagcccagtgacatcctcgagcctcacacccggtcagatctccgcccatttccagaagagctcagcaatacgatatcaggaggtttggacctcatcgacaagtcccaggcagaagattcccaaggtggagttaatcaccagcggtactggcccgaatgtgccccccaggaagaattgtcacaaatccgctccgacttccccaacagctactaacataagttcaaaaacaatcccagtgaagtcccctaacctgagtgaaatcaaattcaattcttacaataatgccggcatgccaccctttcctattatcatccacgatgagccaacctatgcaagatcttctaaaaatgctattaaagtaccaatcgtcattaaccccaatgcatacgacaatctggctatttacaaatccttcctgggcacctcgggggagctgagtgtgaaagagaagacaacctccgtgatttcacacacttacgaagagatcgagactgaaagcaaggttccggataacactacatcaaagaccaccgattgcctgcagaccaagggcttctcaaacagcactgagcacaaaaggggctccgtggctcagaaagttcaggaattcaacaattgcttgaacagagggcagagctcgcctcaaaggtcttattcctcgagccattcttcaccagcaaagatccaacgggcaacgcaagagcccgtcgcgaagatcgagggtactcaagaatcacagatggtcggcagtagctccacccgcgagaaggcctccacagtgctctcgcagattgtggcttccattcagccgcctcagtcccctcccgaaacgcctcagtccggacccaaggcctgttctgtggaggaattgtacgcaattcctccggacgctgatgtagccaaatcaacccccaagagcacccccgttaggccaaaatccctgttcacttcacagccgtccggggaggctgaagctccccagaccactgattcccccaccactaaagtgcagaaagatccttcaattaaacctgtgaccccttcaccctccaaactcgtcacttcccctcaaagcgagcctccggccccctttccaccccctcgatcaactagctcaccgtaccatgcagggaacttgcttcagcgccacttcacgaactggacaaaaccaacgagtcccacccgcagtactgaggcagagtccgtgctgcactcggagggcagtcggcgggcagccgatgcaaagcccaaacggtggattagctttaaatccttttttagaaggaggaaaactgatgaagaagatgataaagagaaggaacgagagaagggcaaactggtgggcctggacgggactgtgatccacatgctgccgcctcctcctgtccagcggcaccattggtttactgaagccaaaggggaatcgagtgaaaagccagcaatcgtttttatgtaccgatgcgatcctgcccagggacaactgtcagtcgaccaatccaaagccaggacagaccaagctgctgtcatggagaaaggacgcgccgagaacgcgctgctccaagactctgagaagaagaggagtcatagctcaccttcccagatcccgaagaagattctcagtcacatgacacacgaggtaacagaagatttctccccccgagatccacgtaccgtggtcggcaagcaggatggtagaggatgcacatccgtgacgactgcattgtcactacccgaacttgaaagggaggacggcaaggaggacatatctgatcctatggatcccaacccctgttccgcaacatacagtaaccttggacaaagccgggcagccatgattccacctaagcagccaaggcaaccgaaaggagccgtggatgatgctatcgcctttgggggaaaaaccgatcaggaggctcctaatgcctcgcagcctacgcctccgccgttacctaagaaaatgatcattcgtgccaacactgagccgatttcaaaagacctgcagaaatcaatggagtcaagcttgtgtgtgatggccaaccctacctacgatatcgatcctaattgggatgcctcctcagctggaagtagcatctcttacgagttgaaagggctggatattgaaagctatgattcactcgagcggcctctcaggaaagagagacctgtgccatccgcagcgaacagtatttcatctctcacaacattgagcataaaggataggttctcgaattccatggaaagcctgagctcgcggcggggcccgtcttgtcgacaggggcgaggaatccagaagccacagcgccaagctctctacaggggtctggaaaacagagaggaggtcgtgggcaaaatccgatcactgcacaccgacgcattgaaaaaactggcagtgaagtgtgaggatttattcatggcaggacagaaagaccagctgcggttcggtgtggactcttggtctgattttcggctcacaagcgacaagccctgctgcgaggctggcgacgcggtttattatactgcatcctacgccaaagatccactcaacaactacgccgtcaagatttgcaagtcgaaggctaaggagtcccaacagtattaccattcattggctgtgagacagagcctagctgtgcatttcaatattcagcaggattgcgggcattttctggcggaagttcctaacagactgctcccttgggaggaccctgacgatccagagaaggacgaagatgatatggaggagacagaggaagatgccaaaggagaaacagacggcaagaaccccaaaccttgctcagaggcggctagctcccaaaaggagaatcagggcgtgatgtcaaaaaagcagagatcccatgtggttgttattacacgtgaggtgccgtgcttgacagtggcggactttgtaagagatagcttggcacagcatggtaagagcccggatctgtatgagaggcaggtgtgtttactcctcctgcagttatgttccggtcttgaacatctgaaaccgtatcatgtgacacattgcgacctgcgattagagaacctgttactagtgcactatcagcctgggggaactgctcagggctttgggcctgccgagcccagcccaacttccagctacccaactagactgattgtgtccaacttcagtcaggcaaaacagaaatctcacctggtagaccctgagatcctgcgagatcagagcagactggcaccagagattatcacggctacacagtataaaaagtgcgatgaatttcagaccggtatactgatctacgagatgctccatctccccaacccctttgacgaaaacccggagcttaaggaaagggagtacacgcgcgcggatttgccgaggataccattcaggagtccatacagccgagggcttcagcagcttgcctcttgccttttaaatccaaacccaagcgagaggatactcatatccgacgccaaaggcatcctccagtgtttactttgggggccccgagaggacctgttccaaacattcaccgcttgtccttcacttgtacagcggaatactcttcttcagaactggctggatataaaaaggactctactgatgataaaattcgctgagaagtcacttgaccgggaaggggggatctcccttgaggactggctctgcgcacagtacttggccttcgccacaacagactccctcagttgcatcgtcaagattctgcagcaccgttag

SEQ ID NO: 216762 - DNA, 5241 bp, Artificial Sequence
  derived and/or modified sequence
atgagcgcttgcaatacatttaccgagcatgtttggaagcctggagaatgcaagaactgtttcaagcctaagtcgctgcaccagctcccgccagaccctgaaaaggctcccattacacacgggaacgtgaaaacaaacgcaaatcattcaaataaccacaggatccgtaacactggcaattttagacccccagtggccaagaagccgaccatcgccgttaagccaacaatgatcgtcgctgacggacaaagcatctgcggggagctctcaattcaggaacattgcgagaacaaaccagtgataatcggatggaaccgtaatagggctgccctgtcccagaaaccgctcaataacaataacgaggacgacgaaggtattagccacgtgccgaaaccctatggcaacaatgactccgcaaagaaaatgagcgacaataataacggcctaacagaggtgttaaaagagattgccgggctggataccgctccacagataaggggtaacgaaactaattctcgggaaactttcctcggacgcatcaacgactgctacaagagatctttggagcgcaaattgcctccgtcatgtatgatcggaggcatcaaggagacgcagggcaagcacgtaattctctctggcagcacagaagtcatcagtaatgaggggggacgcttttgctaccccgaattttcctccggggaggagtccgaggaggatgtcctgttctccaatatggaggaggaacacgagagttgggacgaatctgacgaagaactgctggccatggaaatccgcatgagaggccagccaaggtttgcaaattttagagcaaacactctctccccagttcggttttttgtagataaaaagtggaacaccattccactgcgtaataagagtcttcagaggatttgcgccgttgattacgacgactcctacgatgaaattcttaatggatacgaggagaactcagtggtgtcctatgggcaggggtccatccaatcaatggtctctagcgacagtacttccccggactctagtctcaccgaagagtctcgttccgagaccgcaagttcactgtcacaaaagatttgcaacggaggcctttccccaggaaacccgggggactcaaaggatatgaaagagatcgaacccaattatgagagtccctccagcaacaaccaggacaaagactcctcccaggcgtccaagtcttctataaaggtcccagagacacataaggctgtgctggccttgaggctggaagagaaagatggcaaaattgcagtgcagaccgagaaggaggagagtaaggcatcaacggacgttgcgggccaggcagtgaccataaacctcgttcccaccgaggagcaagctaagccatatagagtggtaaatcttgaacagccactttgcaagccctacacagtagtcgacgtatcggcagccatggcaagtgagcacttggaaggacccgttaacagtccaaaaaccaaatcaagcagttcaacccctaactcacctgttacttcttcatccctaacgcctggtcagatctccgctcattttcagaaaagctctgccatcagataccaagaggtatggacctccagcacttccccacgccagaaaatacctaaggtagagctgatcacgagcgggaccggccctaatgtgccccctaggaagaactgtcacaagtcagcacctactagtccaaccgccacgaacatatcctcgaaaacgatccccgtaaagagtccaaacctgagcgagataaagttcaactcatacaataacgccggaatgccacctttccccattattattcatgacgaacctacctatgcacgctcgagcaagaatgctatcaaagtgccgattgtcattaacccaaatgcatatgataatttggctatatataaatcttttctggggacatctggcgaactctctgtgaaggaaaagactacctctgtgatttcacacacttacgaagaaattgagacggaatctaaagtgcccgacaacacaacaagcaagacaactgactgtctgcaaactaaagggttctcaaatagcaccgagcacaagcgaggatccgtggcccagaaagtccaggaattcaataattgcttgaacaggggtcagtcttctccgcagaggagctattcctcaagccatagcagccctgccaaaatccagcgagccacccaagaacctgtggctaagattgagggcactcaggaaagtcagatggtgggctcaagctccactcgagagaaggcctctacggtgctcagtcagatagtggcttctattcagccaccccagtcacctcccgaaactccacaatctggccccaaggcctgctccgtggaagagctctacgctatacctcccgatgctgacgtagctaaaagcactcccaagagcactcccgttcgtccgaagagcctcttcacttcacagcccagtggcgaagcagaagccccacagacaactgactcccctacaaccaaagttcaaaaagatccatccattaaacctgttacccccagcccatctaagttagtgactagtcctcaatctgagccccctgcccctttcccgccaccccggagcacttcgtctccatatcatgcggggaatctgctacagcgtcacttcactaattggactaagcccacttcccccacacgctccaccgaagcagaatccgtactgcatagcgaggggtccagaagagccgccgacgccaagcctaagcggtggatctcctttaaaagcttctttagacgcaggaaaactgacgaggaagacgacaaagagaaagaacgcgaaaaaggtaagcttgttggattagatggaacagtgatccatatgcttcccccacccccagttcagcggcaccactggttcacagaggccaagggtgagagcagtgaaaaaccagccatcgtctttatgtatcgctgtgaccccgcacaggggcaactctctgtggaccagagcaaggcgcgtacagaccaggctgcggtcatggaaaagggccgggcagagaacgctctgctgcaggacagcgagaagaagaggtcacatagttctccctcacagataccaaagaagatactgtcacatatgacacacgaggttaccgaggacttctctccgagggaccctagaacagttgtaggcaaacaggacggccgtggatgtacatcggtcacaaccgccctgtcacttcctgaactcgaacgcgaagatggaaaggaggatatcagcgacccgatggaccctaatccctgctccgctacatactccaaccttggccagtccagggctgctatgattccccctaaacaacctcggcaacccaagggagccgtcgatgatgcaattgccttcggtggcaaaacagaccaggaagccccaaatgcgagccagccgacgccaccccctttgccgaagaagatgattatcagagctaacactgagccaatttccaaggacctgcagaaatcaatggaaagttctctgtgcgtgatggccaaccccacatacgatatcgatccaaattgggatgcttctagcgcagggagctccatcagttatgagctcaaggggctcgatatagaatcttatgacagtcttgagagacctctgcgcaaggagcggcctgtgccgtcagctgccaatagtatttcgtcactgaccacactctcaattaaagaccggttttccaatagcatggagtccctctcatcacgaaggggccccagctgtcgtcagggaagaggcatccagaagccccaacgccaagcgctctaccggggtcttgagaatcgagaagaggtagtaggaaagataaggagcctgcacacagatgctttgaagaagctagcggtcaaatgtgaagatctcttcatggctgggcagaaggaccagctacggtttggtgtggactcgtggtccgactttcgcctcacttctgataaaccatgttgcgaagctggagacgcagtgtactatacagccagctatgcaaaggacccactgaacaattatgctgtcaagatctgtaaaagcaaggcaaaggagtctcagcagtattaccacagtctggctgttaggcagagcctggcagtgcactttaatattcagcaggactgtggtcacttcctggcggaggtgccaaatagattgttgccctgggaggatcctgacgatcccgagaaggacgaggacgatatggaggaaacagaagaagacgcaaagggagagaccgatggcaagaacccgaaaccatgttccgaagccgctagctctcagaaggaaaatcagggggtcatgtctaaaaaacaaaggtcccacgtggtggttatcacgagagaggtaccctgtcttactgttgctgatttcgtgcgggattctctagcacaacacggtaagtctccggacctgtacgagcgacaggtgtgtctcctgcttctgcagctatgcagtggacttgaacatttaaagccgtaccacgtgacacattgtgatctgagactcgagaacctcctgctggtgcactatcagcccggcggaaccgcccagggtttcggcccggcggaacctagtccaacctctagctatcccaccaggctcatcgtgagcaacttttcacaggcgaaacagaaatctcatttagtggatcctgaaatattgcgtgaccagtccaggcttgcccctgagattatcactgcaactcagtacaagaagtgtgatgagttccagactggcattctgatatatgaaatgctgcatctccctaatccctttgatgaaaaccccgagcttaaggagcgggagtatactagagccgatttaccacgaataccatttcggtcaccgtacagccgggggctgcagcagttagcctcttgcctgctaaacccgaacccttcggagcgtatcctcatcagcgacgccaaggggattctgcaatgcctgctttggggccccagagaagatctttttcagacgtttacagcatgcccatccctggtgcagcggaatacacttctgcagaactggttggacataaagagaacgctcctcatgattaaattcgccgagaagtccttggacagagagggaggtatatcattggaagattggttgtgtgcccagtatttagcatttgccacaacagatagcctttcctgcatcgtcaagattttgcagcatcggtag

SEQ ID NO: 216763 - DNA, 5241 bp, Artificial Sequence
  derived and/or modified sequence
atgtctgcctgcaacaccttcacagagcacgtgtggaagccaggagagtgcaagaactgcttcaagcccaagagcctgcaccagctgcccccagaccctgagaaggcccccatcacccacggcaatgtgaagaccaatgccaaccacagcaacaaccaccgcatccggaacacaggcaacttccggccccctgtggccaagaagcccaccatcgctgtgaagcccaccatgattgtggctgatggccagagcatctgtggggagctgagcatccaggagcactgtgagaacaagcctgtgatcatcggctggaacagaaacagagctgccctgagccagaagcccctgaacaacaacaatgaagatgatgagggcatcagccacgtgcccaagccctacggcaacaatgacagcgccaagaagatgtctgacaacaacaacggcctgacagaggtgctgaaggagattgctggcctggacacagccccccagatcagaggaaatgagaccaacagccgggagaccttcctgggccgcatcaatgactgctacaagaggagcctggagaggaagctgccccccagctgcatgattggaggcatcaaggagacccagggcaagcacgtgatcctgagcggcagcacagaggtgatcagcaatgaaggaggccgcttctgctacccagagttcagcagcggggaggagagcgaggaggatgtgctcttcagcaacatggaggaggagcacgagagctgggatgaaagtgatgaggagctgctggccatggagatccgcatgaggggccagcccaggtttgccaacttccgggccaacaccctgagccctgtgcgcttctttgtggacaagaagtggaacaccatccccctgaggaacaagagcctgcagaggatctgtgctgtggactatgatgacagctatgatgagatcctgaatggctatgaggagaacagcgtggtgtcctatggccagggcagcatccagagcatggtgtccagtgacagcaccagcccagacagcagcctgacagaggagagccgctcagaaacagccagcagcctgagccagaagatctgcaatggaggcctgagccctggcaaccctggggacagcaaggacatgaaggagattgagcccaactatgagagccccagcagcaacaaccaggacaaggacagcagccaggccagcaagagcagcatcaaggtgcctgagacccacaaggctgtgctggccctgcggctggaggagaaggatggcaagattgctgtgcagacagagaaggaggagagcaaggccagcacagatgtggccggccaggccgtgaccatcaacctggtgcccacagaggagcaggccaagccctacagagtggtgaacctggagcagcccctgtgcaagccctacacagtggtggatgtgtctgctgccatggccagcgagcacctggagggccctgtgaacagccccaagaccaagagcagcagcagcacccccaacagccctgtgaccagcagcagcctgaccccaggccagatcagcgcccacttccagaagagcagcgccatccgctaccaggaggtgtggaccagcagcaccagcccccggcagaagatccccaaggtggagctgatcaccagcggcaccggccccaacgtgccccccaggaagaactgccacaagagcgcccccaccagccccacagccaccaacatcagcagcaagaccatccctgtgaagagccccaacctgtctgagatcaagttcaacagctacaacaatgccggcatgccacccttccccatcatcatccatgatgagcccacctacgcccggagcagcaagaatgccatcaaggtgcccatcgtcatcaaccccaatgcctatgacaacctggccatctacaagagcttcctgggcaccagcggggagctgtctgtgaaggagaagaccaccagcgtcatcagccacacctatgaggagattgaaacagagagcaaggtgcctgacaacaccaccagcaagaccacagactgcctgcagaccaagggcttcagcaacagcacagagcacaagaggggctctgtggcccagaaggtgcaggagttcaacaactgcctgaacagaggccagagcagcccccagaggagctacagcagcagccacagcagccctgccaagatccagagggccacccaggagcctgtggccaagattgagggcacccaggagagccagatggtgggcagcagcagcacccgggagaaggccagcacagtgctgagccagatcgtggccagcatccagcccccccagagccccccagagaccccccagagcggccccaaggcctgcagcgtggaggagctgtatgccatccccccagatgctgatgtggccaagagcacccccaagagcacccctgtgcggcccaagagcctcttcaccagccagcccagcggggaggccgaggccccccagaccacagacagccccaccaccaaggtgcagaaggaccccagcatcaagcctgtgacccccagccccagcaagctggtgaccagcccccagagcgagcccccagcccccttccccccacccaggagcaccagcagcccctaccacgccggcaacctgctgcagaggcacttcaccaactggaccaagcccaccagccccaccaggagcacagaagctgagagcgtgctgcacagcgagggcagcagaagagctgctgatgccaagcccaagcgctggatctccttcaagagcttcttcagaagaaggaagacagatgaggaggatgacaaggagaaggagcgggagaagggcaagctggtgggcctggatggcaccgtcatccacatgctgcccccacctcctgtgcagaggcaccactggttcacagaggccaagggggagagcagcgagaagccagccatcgtgttcatgtaccgctgtgaccctgcccagggccagctgtctgtggaccagagcaaggccaggacagaccaggccgctgtgatggagaagggccgggcagaaaatgccctgctgcaggacagcgagaagaagaggagccacagcagccccagccagatccccaagaagatcctgagccacatgacccatgaggtgacagaggacttcagcccccgggaccccaggacagtggtgggcaagcaggacggccggggctgcacctctgtgaccacagccctgagcctgcctgagctggagcgggaggatggcaaggaggacatcagtgaccccatggaccccaacccctgcagcgccacctacagcaacctgggccagagcagagctgccatgatcccccccaagcagccccggcagcccaagggagctgtggatgatgccatcgccttcggcggcaagacagaccaggaggccccaaatgccagccagcccaccccaccacccctgcccaagaagatgatcatccgggccaacacagagcccatcagcaaggacctgcagaagtccatggagagcagcctgtgtgtgatggccaaccccacctatgacatcgaccccaactgggatgccagcagcgctggcagcagcatctcctatgagctgaagggcctggacatcgagagctatgacagcctggagcggcccctgaggaaggagaggcctgtgcccagcgctgccaacagcatcagcagcctgaccaccctgagcatcaaggaccgcttcagcaacagcatggagagcctgagcagcagaagaggccccagctgccggcagggccggggcatccagaagccccagaggcaggccctgtaccggggcctggagaaccgggaggaggtggtgggcaagatccgcagcctgcacacagatgccctgaagaagctggccgtgaagtgtgaggacctcttcatggccggccagaaggaccagctgcgctttggagtggacagctggagcgacttccggctgaccagtgacaagccctgctgtgaggccggagatgctgtgtactacacagccagctatgccaaggaccccctgaacaactatgctgtgaagatctgcaagagcaaggccaaggagagccagcagtactaccacagcctggccgtgcggcagagcctggccgtgcacttcaacatccagcaggactgtggccacttcctggccgaggtgcccaaccggctgctgccctgggaggaccctgatgatcctgagaaggatgaagatgacatggaggagacagaagaagatgccaagggggagacagatggcaagaaccccaagccctgcagcgaggccgccagcagccagaaggagaaccagggcgtgatgagcaagaagcagaggagccacgtggtggtgatcacccgggaggtgccctgcctgactgtggccgactttgtgcgggacagcctggcccagcacggcaagagcccagacctgtatgagcggcaggtgtgcctgctgctgctgcagctgtgcagcggcctggagcacctgaagccctaccacgtgacccactgtgacctgcggctggagaacctgctgctggtgcactaccagcccggcggcacagcccagggcttcggccctgctgagcccagccccaccagcagctaccccaccaggctcatcgtgagcaacttcagccaggccaagcagaagagccacctggtggaccctgagatcctgcgggaccagagccggctggcccctgagatcatcacagccacccagtacaagaagtgtgatgagttccagacaggcatcctgatctatgagatgctgcacctgcccaacccctttgatgaaaatcctgagctgaaggagcgggagtacaccagggctgacctgccccgcatccccttccgcagcccctacagccggggcctgcagcagctggccagctgcctgctgaaccccaaccccagcgagcgcatcctgatcagtgatgccaagggcatcctgcagtgcctgctgtggggcccccgggaggacctcttccagaccttcaccgcctgccccagcctggtgcagaggaacaccctgctgcagaactggctggacatcaagaggaccctgctgatgatcaagtttgctgagaagagcctggaccgggagggcggcatcagcctggaggactggctgtgtgcccagtacctggcctttgccaccacagacagcctgagctgcatcgtgaagatcctgcagcacaggtag

SEQ ID NO: 216764 - DNA, 5241 bp, Artificial Sequence
  derived and/or modified sequence
atgagcgcctgcaacaccttcaccgagcacgtgtggaagcccggcgagtgcaaaaactgctttaaacctaagtcactacatcagctgccaccagatccggaaaaggcccccatcacgcacgggaatgttaaaaccaatgctaatcacagcaataaccaccggataaggaataccggtaactttcgccccccagtcgcaaaaaagccaaccatcgccgtgaagcccacaatgatagtagcggacgggcagtcaatttgcggggagctgagcatccaggaacactgtgagaataaaccggttataatcgggtggaatcgaaatcgagccgcgttgtctcagaaaccacttaacaataataatgaggatgacgaaggcatatcccacgtgcccaagccttatgggaacaacgactcagcaaaaaagatgtccgataataataacggactcactgaagtgttaaaagagatcgctggcctggatacagcgccacagatccgcgggaacgagaccaactcacgcgagactttcctgggtaggatcaacgactgctacaagcggtctctcgaaagaaagctgccaccatcgtgtatgatcggcgggatcaaagagactcaggggaaacacgtgattctgtccggatcaacggaggtcattagcaatgagggtggacgattctgctacccggaattcagctctggcgaggagtctgaagaggacgtcctttttagcaatatggaagaagagcatgaatcgtgggacgaaagtgacgaggagctgctggccatggaaattagaatgcgcgggcagcccaggttcgcaaatttcagagcaaatacgttaagccccgttcggtttttcgtcgacaagaaatggaatacgattccgttaaggaacaagagcctgcagagaatttgtgcagtggattacgacgattcctatgacgaaattttgaatggctatgaggagaactcagtcgtaagctacggccagggctctatccagtctatggttagcagtgactccacctccccggactcctctctgacagaggagtctaggtcggaaaccgccagctccttgtcccaaaagatttgcaacggagggctgtcccctggcaaccctggggacagcaaggacatgaaagagattgagcctaattatgagtccccatcttccaataaccaggacaaagactcctcacaggcatctaagtcgtctataaaagtgccagaaactcataaagccgtactcgctctgcgcctcgaagagaaggacggtaagatcgcggtgcagaccgaaaaagaggagagcaaggcgtctactgatgtcgccggacaggccgtgaccataaatctggtcccgactgaagagcaggccaaaccctatcgggtcgtcaacctggaacaaccgctgtgtaagccctacaccgtggttgatgtctcggcagccatggcctctgaacacctcgagggtcccgtcaactcccctaagaccaaatctagcagctccaccccgaattctcccgtgaccagcagcagcctaacccccggccagattagcgcccactttcaaaagtcatccgctattcgctatcaggaagtctggaccagctctacgtcacctagacagaaaattcccaaggtggagctgatcaccagcggcacgggcccaaacgtgccccctcgcaaaaattgccacaagagtgctcccacaagccctactgctaccaatattagctccaaaaccatcccagtgaagagcccaaatctgtccgagattaagttcaattcctacaacaatgcaggaatgcccccctttccgattattatccatgatgaacccacctacgccagatcctcaaagaatgcgattaaggtacctatcgtaatcaatcccaatgcctatgacaacctcgcaatttacaagagctttctgggcacgtctggcgagcttagcgtcaaagagaagaccacgagtgtgatcagtcacacttacgaggagatcgagactgagtccaaagtgccagataacacaacctcaaaaactaccgactgtttacagaccaaaggcttctccaactccactgaacataaaaggggatcagtcgctcagaaggtccaagaattcaacaattgtctgaacagaggacagtcgagtccccagcgatcctactcgagcagccatagcagccccgccaaaatccagcgcgcgacacaggaaccagtggcaaagatagagggcacccaggagtcacaaatggttggcagtagctctacccgcgagaaggcctctacggtgttatcccagatagtggcgtctatccaacctccacagtcccctcccgagaccccacagagcggccccaaggcctgttcggtggaagagctctacgctatccccccagatgccgatgtagccaaatctacccccaagtccaccccggtaaggccaaagtccctgttcacaagccaaccctcaggcgaggcggaagccccacagacaactgattccccgacaacgaaggtgcagaaagatcccagtattaagcccgtgactcctagtcctagcaagctggtcacatccccgcagagcgagccaccagccccctttcctcccccacgctctacctcttctccatatcacgccggtaaccttcttcagcgccatttcacgaattggactaaaccaacctcccccacccgtagcactgaagcagagtccgtcttgcactccgaagggagcagaagagccgccgacgccaagcccaagagatggatttcctttaagagtttctttcggcggcggaagaccgacgaagaggacgataaagaaaaggaaagagaaaagggcaaacttgtaggcttagacggaaccgtgattcacatgctgcctccaccacctgtccagagacaccactggtttacagaggccaagggagagtcttctgagaaacccgctatcgtattcatgtatcggtgcgatccggctcagggacagctgtctgtggaccagtcaaaggcgcggacggatcaagcggctgtgatggagaagggacgggctgagaatgccttgctgcaagactccgaaaaaaaaagatctcattcctcaccatcccagattcccaagaagattctctctcacatgactcacgaagttaccgaggacttttccccacgtgacccacgaaccgttgtggggaaacaggacggcaggggttgcacaagtgttacaacggctctcagcctgccagagctcgaaagggaagatgggaaggaggacataagcgaccccatggatcctaatccatgcagtgctacgtacagcaatttggggcagtcaagagcagcaatgataccccctaaacaaccgaggcagcccaagggagctgtggacgatgctatagcgtttggcggtaaaacagatcaggaggcgccgaatgcttcccagccaacaccccccccgttgccgaagaagatgattattagagccaatactgagccaataagcaaagacctacagaagagcatggagagctctctgtgtgtgatggcaaacccaacttatgatatcgaccccaattgggacgcttcctccgcaggtagctctattagctatgagctgaagggtctcgacattgagtcgtatgactcattggagcgccccttgcgcaaagagaggcccgtgccgtctgcagctaatagcatttcttctctgaccaccttatccattaaagaccggttcagcaactccatggagtccctgtcttctcggcgcgggccaagctgcagacagggcaggggaatccagaagccacagcggcaggcactgtatcggggactggagaaccgggaagaagttgtgggaaaaatcagaagtcttcatacagacgcccttaaaaagctggcagtaaaatgcgaagatttattcatggccggacaaaaagatcagctccgtttcggggttgattcctggagcgatttcagactgacatccgacaagccgtgctgtgaggcaggggatgcagtatattacaccgcaagctacgcaaaggaccctttaaacaactacgccgtaaagatctgcaaaagcaaggccaaggagagccagcagtactatcatagcttggccgtccgtcagagtttagctgttcattttaacatccagcaagattgcgggcactttctcgccgaggttccaaatcgtctcttaccatgggaggaccccgacgacccagagaaggatgaagacgacatggaagagaccgaggaggatgctaaaggtgagacagatggcaagaaccctaaaccctgctctgaagccgcctcttctcagaaggagaaccagggcgtaatgtccaagaaacagcgcagtcatgtggttgtgattacccgtgaggttccttgcctaaccgttgctgacttcgttagagactcgctggcccagcatggaaaaagcccagatctgtacgagagacaagtgtgtctactgttgcttcagctatgcagcggtctcgagcatctaaagccttatcatgtcacccactgcgatcttcgattggagaacctcctacttgtccattaccaacccggagggactgcacagggcttcggtcccgcagagcccagtcctaccagcagttacccaacaagactgatcgtgagcaatttcagtcaggcaaaacaaaaatcccatctggtggacccagagattctgcgggaccaatctagacttgctccagaaatcattacggctacacagtataaaaaatgtgatgaatttcagacaggcatcctaatttacgaaatgctacacctgccgaatcccttcgatgagaacccagagctgaaggagcgagagtacacgcgggccgatctccccaggataccttttcgcagcccctacagccgggggctacagcaacttgcttcttgcctgctgaatcccaatcctagtgagaggatacttattagtgacgctaaagggatcttgcagtgtttactttggggcccaagagaagacctgtttcagacttttacagcatgcccttcattagtgcagagaaacacactgctgcagaattggctggatataaagagaactctcctgatgatcaagttcgcagagaaatcactagaccgcgaaggtggcatctcattagaggactggctgtgtgcccagtatctggcttttgctactactgattcactgtcttgcatcgtgaaaattctgcagcataggtag

SEQ ID NO: 216765 - DNA, 5241 bp, Artificial Sequence
  derived and/or modified sequence
atgagcgcctgcaacaccttcaccgagcacgtgtggaagcccggcgaatgcaagaattgtttcaagcccaaatctctccatcaactgccgccagatccagagaaggctccgattacccatgggaatgtcaaaaccaacgccaatcatagcaacaaccacagaataaggaatacgggaaactttaggccgccggtggctaaaaagcctactattgcagtgaagccaacgatgatagtagccgacgggcaatctatctgcggcgagctgagtattcaagagcactgcgagaataaacctgtaatcatcggctggaatcggaatagagcggcattatctcaaaaacccttgaataacaacaacgaggacgatgagggaatttcccacgttcccaagccctatggaaacaacgattcagccaagaagatgagcgataataataacggcttgaccgaggtccttaaagaaatagcaggcctggacactgccccacagatcaggggcaacgaaacaaatagccgagagacattcctcggccgcatcaatgattgctataagagaagcctggagcggaagctgccccctagctgtatgattggagggatcaaggagacccaaggtaagcatgtgatcctcagcggatcaaccgaagtcatctccaacgaaggcggccgcttttgctatcccgagttctcaagtggagaagagtccgaggaggatgtcttgttttccaatatggaggaagagcacgagtcttgggacgaaagtgatgaggagttactcgctatggaaattagaatgcgtggtcaacccaggttcgctaatttcagagccaacaccctctccccagtgagattctttgtggataagaagtggaataccatccccctccgtaataaaagcctgcagagaatctgtgcggtggactacgacgactcctatgatgagatcctgaacggctacgaggaaaattctgtggtaagctatgggcaggggagcatacaatccatggtgtcctccgacagcactagccctgatagttccctcaccgaggagtcccgatctgaaactgcgtcctcgctttctcagaagatttgcaacggcgggctatctcctggaaatccaggagactcaaaagacatgaaggaaatcgaaccaaattacgagtctcccagctccaacaatcaggataaggactcctcacaggctagcaaatcttcaatcaaggtacctgagacgcataaagccgtgctggctctacggttggaggagaaagatggcaaaatcgccgtccagacagagaaagaagagtctaaggccagcaccgatgtggctggtcaggcggttactataaacctagtgccgaccgaggaacaagccaaaccttaccgcgttgtcaatctagaacagcccctgtgtaagccatatacagtagttgacgtgtctgcagccatggcctccgagcacctagaggggcccgtgaattccccaaagacaaagagcagtagctccacccctaattcgccggtgacaagctcttctctgacacccgggcaaatctcagcacatttccaaaagagttccgcaattcggtaccaggaagtgtggacttcttcaacttcaccccgccaaaaaatccccaaagtggagctgatcacgtcagggaccggccctaacgtgccgccaaggaaaaactgccataaaagcgcgcctacatctccaactgctactaatatctctagcaagactatccctgttaagagcccgaatctctcagaaattaaatttaatagttataacaacgcgggcatgccaccgttcccaatcatcatccatgatgagcccacgtacgctcgtagctctaagaacgccatcaaagtgccgatcgtgatcaatccaaacgcctacgataacctggcaatttataagagttttctgggcactagcggcgagctgtctgtgaaggagaaaacaacgtccgtcatctcacatacctatgaggaaatcgagacagagtcaaaggtccctgacaacacgacgtcaaaaactaccgactgtctccagacaaaaggtttttccaactctaccgagcacaagcgtggatctgtcgcccagaaagtccaggaatttaacaattgtctcaacagaggtcagtcatcaccacaacgcagctacagcagtagccattcctcacccgctaagatccagcgcgctactcaggaacctgtggcaaaaattgagggaacccaggagagccagatggtgggatctagcagcacaagagagaaagcttcgaccgttctgagccagatagtggcttccattcagcctccccagtctccccccgagactccccagtcaggaccaaaggcttgcagcgttgaggagctgtacgcgatcccccccgatgccgatgtggcaaaaagcactccaaaaagcacacctgtcagacctaaatctctgttcacatcacaacctagtggagaggctgaggccccccagaccaccgactctccaacaaccaaggttcagaaagatccaagtatcaagcctgtcacacccagtcccagtaagctcgtgacctctcctcagtccgaacctcctgccccgtttcctccccctcgcagcaccagttcgccttaccatgctgggaatctgttgcagagacacttcaccaactggaccaagccgacctcccctacgagaagcactgaggcagagagcgttctgcatagcgagggctctagacgggcagcggacgcaaagcccaaacgttggatttccttcaagtctttcttcaggcggcgaaagacagacgaagaagacgacaaagaaaaagaacgtgagaagggcaagttggtgggcttggacggcacagtgattcacatgcttcccccgcctcctgtgcagcggcaccactggttcaccgaggccaagggggagtcctccgagaagcccgccatcgtattcatgtacagatgtgaccctgctcaaggccagctgtctgttgatcagtctaaagcccggactgaccaggcggctgtcatggagaaaggccgtgcggaaaacgccctcctgcaggattctgaaaagaagcgctcacactcctccccatcccagatcccaaaaaagattctgtcccacatgactcatgaagttactgaggacttcagcccaagagacccccggactgtcgttggcaaacaggacgggcggggttgcacctcagtgacaaccgccctgagtctgcccgaactggaaagagaggacggcaaggaggacatttccgaccctatggatcctaacccgtgttctgctacttactccaatttaggccagtcccgggccgctatgattccccctaagcagccacgacaacccaagggagccgtagacgacgcaatcgcatttggtggaaagacggaccaggaggcacctaatgcatcacagcccacgcccccgcccttaccaaagaagatgattatcagggccaacacggaacccattagtaaggacctgcagaagagcatggagagcagtctgtgcgtcatggccaaccccacctatgatatcgatcctaattgggacgccagctcagccggctccagtatctcttacgagctcaaaggactcgacatagaatcatacgactccctggaacgccccctccggaaggagcgtccagtgccatcagccgccaactcaatctcctccctgacaaccctgagcattaaggacaggttctcaaacagcatggagagcctctcgtccaggcgtggccccagctgtaggcaggggaggggtatccagaaacctcagaggcaagccctctatcggggactggaaaatcgggaggaggtcgtgggaaagattcggagcctgcacacagatgcattgaaaaagttagcagtcaagtgcgaagatctgttcatggccggacaaaaagatcaacttcggtttggcgtagattcatggtccgatttccggttaacctccgacaaaccttgctgtgaggctggcgatgcagtctactacactgctagctacgccaaagatcctctgaataattatgctgtgaaaatatgcaaatctaaagcaaaagagagccagcagtactaccattctcttgccgtgaggcagtcactcgcggtgcatttcaacatacagcaggactgcggccactttttggctgaggttcctaacagattactcccctgggaagacccagatgaccccgaaaaggacgaagacgatatggaggagacagaggaggacgccaagggagaaactgatggcaagaatcctaaaccatgcagtgaggcggccagtagccagaaggagaatcagggcgtaatgtctaaaaagcagcgaagccatgtcgtcgtgattactcgggaagtgccctgtctcacagtggcagattttgtccgagactctttggctcagcacggcaagtctcctgatctgtacgagcgccaggtatgtcttctcttactgcagctgtgcagtggattggagcacctgaaaccatatcacgtcacacactgcgaccttaggctcgaaaatctgctgctcgtgcactatcaacccggaggtactgcccagggcttcggtcctgccgaacccagcccaacgtcaagttaccctacacgcctgatcgtgtcaaactttagtcaggctaaacagaaatctcaccttgtcgaccccgaaattctcagagatcagtctcggttggcacccgagatcataacagctactcagtataaaaagtgcgacgaatttcagactggcatcttgatttacgagatgttacacctccctaatccgttcgacgaaaatcccgaactcaaggagagagaatacactcgagcagatctcccaagaatccccttccgatccccttacagtcgggggctgcagcagcttgcatcctgcctcctgaatccaaacccatccgagcgcattctaatcagcgatgctaaaggaattctgcagtgtcttctgtggggccccagggaggatctgttccagacttttacagcatgtccaagcctcgtacagcggaatacactgctccagaattggctggacattaaacgtaccctgctgatgattaagttcgctgagaagtctctagatcgggagggaggtatctccctggaggactggctgtgcgcacagtatttagcttttgcaacaaccgatagtctgtcttgtatcgttaaaattcttcaacaccgctag

SEQ ID NO: 216766 - DNA, 11547 bp, Artificial Sequence
  derived and/or modified sequence
tgcagtaaacattgctatcttcagaaattaaggaatgagaggcaaggaagaaaggacattcatcttggaaagacccaaagcaccttgaaatttggaaggaatgttttgctagctgctaaaaccacctttgtcaccagaatgaatgaagtgcttcagatttaaataattgatcattcttagaagagctgctgtaacacataggggaagtgaaaactaacagatgaaagttttgtcatgcactgaaagaaaagcattgtctgtgaagttctatttttaaaaatgtctgcttgtaacacctttactgaacatgtttggaaacctggtgaatgcaagaattgctttaaacctaaaagtttgcaccagcttcccccagaccctgagaaggcacccatcacccatggcaatgtgaaaactaatgccaatcacagtaacaaccaccgcatcaggaacacgggcaatttccggcctcctgtggctaaaaaacccactatagctgtgaagcccactatgatagtggcagatgggcaaagtatatgtggtgagcttagcatccaagaacactgtgagaacaaacctgtcatcatagggtggaaccgaaacagagctgccttgagtcagaaaccacttaacaataataatgaagatgatgaaggaattagccatgttcctaagccttatggcaataatgatagtgcaaagaagatgtcagataacaataatggactaactgaagtgttaaaggagatagcaggcttggatactgcccctcagataagaggaaatgaaacaaactccagagaaacattcttgggaagaataaatgattgctataaacgatcattggaaagaaagcttccaccaagttgcatgataggtgggataaaggaaactcagggcaagcatgttattctgagtgggagcacagaagtgattagtaatgaagggggccggttctgttacccagagttttccagtggcgaggagagtgaagaggatgtacttttcagtaacatggaggaggagcacgagagttgggatgagagtgatgaagagctgttggccatggagattcgcatgagagggcaacctcgctttgccaacttcagagcaaacacattgtctcctgttcgattctttgtggacaaaaaatggaataccatccccctgcgaaacaagtctctgcagagaatctgtgctgtggactatgatgacagctatgatgaaatcctgaatggttatgaggaaaattctgtggtctcttatggacaaggaagcattcagagcatggtgtcatctgactccacatcaccagattcttctttaacagaagaatcacgttctgagacagccagtagtttatcccagaagatttgtaatgggggattatctcctggtaacccaggagattctaaggacatgaaggaaattgagcccaattatgaaagtccctctagtaataatcaggataaagattcatcacaggcttccaaaagctcaataaaagttccagagacccacaaagcagtccttgctctccgattagaagagaaagatggcaagattgctgtacaaactgagaaggaagaaagtaaagcctctacagatgttgctgggcaagcagtaaccataaaccttgtccccacagaagagcaagcaaaaccttaccgagttgtgaacctggaacagccattgtgcaagccatatactgtcgtggatgtgtcagcagccatggccagtgagcacctcgagggccctgttaacagccccaagacaaaaagctcatcctctactccaaactctccagttacatcatcttcattgacaccaggacaaataagtgcccatttccaaaaatccagtgcaattcgataccaagaagtatggacttctagcaccagtccacgacaaaagatacctaaagtagaactaattactagtggaactggaccaaatgttcctccaaggaaaaactgtcacaaatcagcacctacatcacccacagctacaaacatttcctccaaaaccatccctgttaagtcacctaatttgtctgaaattaaatttaatagttataacaatgctggtatgccaccttttccaattatcattcatgacgagccaacttatgctcggagttccaaaaatgctatcaaagttcccattgttatcaatccaaatgcatatgacaatctagctatctacaaaagttttctgggaacaagtggagaactctcagtgaaggaaaaaaccacaagtgtaataagccatacttatgaagaaatagaaacagaaagcaaagtgcctgataacaccactagcaaaaccactgactgtcttcaaactaaagggttttcaaacagcacagagcataaaaggggctcagtggctcagaaggttcaagagtttaacaactgtctcaacagaggtcagtcttcaccacagagaagctatagttccagccacagctccccagcaaagatccagagagccactcaagagcctgtggccaaaatagaaggcactcaggagtctcagatggtgggcagcagcagcaccagagagaaagcaagcacagtgctttctcagattgtggcttcaatccaacccccacagtctcctccagaaacacctcaatctggccctaaagcttgcagtgtggaagagctttatgccattcctccagatgctgatgttgctaagagcacacctaagagtacgccagtccggcccaaatctctctttacatctcagcctagtggtgaggctgaagcacctcagaccacagacagtcctaccaccaaagtacagaaagacccatccataaagccagtcaccccctctccctccaaattagtgactagcccccaaagtgagccaccagctccctttcccccgccacgctctacttcttctccttaccatgcaggtaaccttttgcagaggcatttcaccaactggaccaagccaaccagccctaccaggtcaacagaagctgaatcagttttgcactctgaaggcagcaggcgggcagctgatgcaaaacctaagcgctggatatcatttaaaagcttcttccgccgtcggaaaacagatgaggaggatgacaaagagaaagagcgagagaaagggaaactggtgggcctggatggcacagtcattcacatgctgcctcctcctccagttcagcgccatcactggttcacagaggcgaaaggagagtccagtgagaaaccagccattgtcttcatgtacaggtgcgaccctgctcaaggccagctcagtgtggatcagagcaaggctaggacagaccaggcagcagtcatggagaagggtagagcagagaatgcattactacaggactcagagaagaagaggagtcattcttctccatcacagattcctaaaaagattctcagtcacatgacccatgaagtaacagaggatttttctcctcgggatccaagaactgttgttgggaagcaagatggcaggggctgcacttcagtcacaacagcattgtccctacctgaactggaaagggaagatggaaaagaagacatttcagatcctatggacccgaacccttgtagtgcaacatacagcaacttagggcaatctagagcagccatgatacctcccaagcagccacgacagcccaagggagctgtggacgatgccatcgcctttggagggaaaacagaccaagaagcacccaatgcttcccaacctacaccacccccactgccaaagaagatgatcataagagccaatacagagccaatctccaaggacctccaaaaatccatggaaagtagtctttgtgtcatggctaatcccacctatgatatcgaccccaactgggatgccagcagtgctggttcttccatcagctatgaactcaaaggactggacattgagtcttatgactccttggaaaggcctttgcgcaaggagagacctgtcccctcagcagcaaacagcatttccagcttaaccactctcagtattaaggatagattttccaacagcatggaatccctctccagccggcgtgggccctcttgcagacagggccgaggcatccagaagccgcagagacaagcactttatcgaggacttgagaatcgggaggaagtagtgggtaaaatccgaagccttcatacagatgccttgaagaaactggctgttaaatgcgaagaccttttcatggctgggcagaaagaccagctccgttttggagtggacagctggtcagacttcaggctaaccagtgacaaaccatgttgtgaggcaggtgatgcggtttactatactgcttcatatgcaaaagatccacttaataactatgcagtcaagatctgtaagagcaaagctaaagaatctcagcagtattatcacagcttggctgtccggcagagtctggctgtccattttaacattcagcaggactgtggtcatttccttgctgaagtccctaaccgtctgcttccctgggaggatccagatgaccctgaaaaggatgaggatgacatggaagagactgaagaagacgccaaaggagaaacggatgggaaaaacccaaagccctgttctgaagcagcatcatcccagaaagagaatcagggagtcatgagcaagaagcagaggagccacgttgtggtcatcaccagggaggttccatgtcttactgtggctgattttgtgcgagactctctggcccagcatgggaaaagccctgatttgtatgagaggcaggtgtgtctgctgctcttacagctatgctctggtcttgagcacctcaaaccctaccatgtcactcactgcgatctacgcctagagaacctgctacttgtccactaccagcctggggggactgcccaaggctttgggcctgcagagcccagccccacctcatcttatcccactaggcttatagtgagcaacttctctcaggccaagcagaagagccatctggtggaccccgagatcctccgggaccagtctcgccttgccccagagatcataacagctacccagtataaaaagtgtgatgagttccagacaggcatcctcatctatgagatgctgcacctacccaacccctttgatgagaacccagagctgaaggagagggaatacacacgagcagacctgcctcgcatcccattccgctccccctactcccggggtctgcagcagctggccagctgcctcctgaatcccaacccttctgagcggatcctcatttcagacgccaaaggcatcctccagtgtctgctctggggcccccgcgaagatctcttccagactttcaccgcctgccctagcctagtacagaggaacaccctgctccaaaactggctagacatcaagcgaacactgctcatgatcaagtttgctgagaagtccctggacagggaaggtggaatcagccttgaggactggctttgtgctcagtatttggcttttgccactacagactccctcagttgtattgtgaaaattctgcagcaccgttaatgtgtacctggatgatgcttttactacatcttcaccttcttcatgtcacccatgcacttcccctccctagtgctcactccaaattcaaggaaagaagaaaggcaaacctctatccctgtccgtgaacaagtgggtctattcagaaaggttatccactgccccagattgaatgagaagctgagtctgtcttaactttacagaaattcagctgcacaaacttgcagttgccttcccttgaaacaccttctatcctaatagtcccataaatgcaggtaaaaatgaaaatccatattcttgaagggacagcttctttggtatgaactcagccagtgagctgtgtccatttcctccataattctggatatcacctatctttttagcaccaagtatttattctcactagcagtagacagacttaaccagtctctaccacgacccagtagactctgacaacagactcttcctttaaggtgtcaacaactgacttactaggcaggactgccatccttagcatcagcccagttttggttaccagggactatatcttttgttccaggagagagtagaaagaaaaggagagatcccatccttgggtcatagacccattttcattgccattatctgtaagtatgtgcactgcatggaggacagccctaatagtctcccctctgctgccactgcctgattctccactctgtccccacttgccagtgaagtttggatttatcagccacttgtggcccattacagagctgacccaaggtggtgtcaccaatgcctcagcagggtggagtgcagttcagagcttataaatagctggcagggcatgaggagatgattttcttgcatgtgcaattctctaggggccatcaggaaacagagtttaaagtaccctttgattactgtcagaactgtcagcatttgcagttttccccgagcagtaattggccagctcccttctatcagtagccagtgttaactagtttaccaaatgctgtaaacaattgccctgaatgaaatagctgtcagtggagctctaagatctcctttagagggcacagtgaggtgggctgttgggatggccgtaggcaggggagaggaagaaggccactgatgagactgctgacctcctcagaaggttgacctcttctagagagactgcctcccagtgtttaagtggctcattgctccttctgactctgtaaaatggctctggaggacagctcacaggaattctgattgctgaggtgggtgattgagagctgttcaccatgtgtgcagcctgtgctccccttctatggatatgtgtgcaatttttgtatgtatttttttagctgtatattacagtgtttatgttgcaacttcacctgaagcgagtctacagaaaccctcccccttcttcccttggcacatatttgcgctaagagatgagcgttccttccactggggttgtgtgtgtgtgtgtgtgtgtgtgtgtgtgtgtgtgtgtgtgtgtatgtatacacatgttcacctgtgcttgttttattcaaaactgtgagtatgtgtttactttgaccttgaaatcccaagagtcactcgaacaatgtgtgtgtacacttgtgtgcccatgtgtgcgtgcacacgcatgctggaagtagaggccaggcctctagaaaagcaacctgtggcagggttgacagacatgttctctgtgcctagtgagtgagtgagccctgaggcccctcatctaccagtgcagagtttccttaaagccaagactgactgtgcagtattacttacatagcacattagtggccttggaaatttctaaacttttaacatttttaacagcttttcatgtgattcatgtataacaaagaggatcaggaaaggaaaataatgtattttattgtgctcttattacttttttaagtgattgtaatatgtgaggctctatttggagaatgtcccttatcccctggccagcaatataggactcacaggaaagaaggctggttagcccacaaagagtcttgcctcctctagccagagtgcagggctctgctcctaggaatggccatggagtgggcatgctgctgcaggccagcagtctgctcttggtgtcctgtggcatggccgcgccttgccttgaaggttggtgtttggttcatcttagcatagaacatgtgcacataactccttgcctgattatgcactgaagggcagcacacagaccactgaccatgtcagccagcacattcccttaacctcccccacctcccatcttgcaatgtcttgcatattgagatataccttctcaatgtcatgttcgtggtgccttgcccatgtaaatttcaatgttgactatttaatgaggttacatatttaatgctgaatgtttcctggtccctctatttgttatgtctctacttatctttttttttctttctctttttctgttatgatttggatccagtcttcactttaactctatggtataataagcatggacacctccactaccattatcttacagcactggtaaaccaagcacctcttcatatcagatgtttttagtactgtttttatattcagatttgttaagggcaaaagatgaatgcaaactagccagagaaaagcctcaggcttcccagagacaggtggctagattaatttttctctgggtgatggccaaagaatgtgagatagagagggaagggggtgttacaggttagagcagaatagagaaagaaactatatttctaggcaaaaagtactacatgagttggtcttcagaatatttttccaaaaaaatgaaattcagtcagtttaacattatcacaaatatttttcattttaattgtggtaggacctttgaatttgttcatcaactggaaagaaatcctaccctctgtagacacatacacacacatttatatatctatgtgtttgaattgtgactagtatagcactttacattttctcaagtaacaggaagttattgccttcaatattgattggaaattgttttctattgaagtctatactgtagagttttccatttatattgagagtttgaacaattaagctcctattggaacttttccttaagccacatgagcatgaacaatctctgtgacacttgggtgctagagaaacacaacagtggctaaagtagccaagagcaagactgaatgtatagcagagtgccttgttagagtggtaacctagtcttggaagcaattcagtggatgtttcataaagaggactagaacttcaagaagcctcctgtgctggctgaggtgagcccttttggtatatgtacactactgggttgcctagaagccaattcatgaagaataacagcaggatgagaaaaagagtcactgtaacctgtggaacaacaacgtaagaatcaccaacccctaggctgagctagaactggaagccaggaatatggcaatgagtttcaagatttgccctcagaagatgaactgggtgaggtatgggttgaggtgagggcacaagcactcatcctacctaccctgctgctgttgaggagctagaagtaaaacatattggttaggattttaacagttggagtagcctcccattatcagattaagtgggggtcacttttgcttccaaactcagaataagtttgtaaacatgggaaagtctaagccaagagatctaaagctctagaaatattaatgacatttctgggagtaaaactactaaaaattatatcttaaaagtttctagtagtatgaagttcccaggccaggcgcagtggctcacgcctgtaatcccaacactttaggagggcgaggtgggcagatcacctgaggtcaggagtttgagaccagcctggccaacatggtgaaactccatctctactaaaaatacaaaaattagccgggcatgatggcaggcacctgtaatctaagctactcgggaggctgaggcaagagaatctcttgaacccaggaggcaaaggttgcagtgagccaagatcacgccatcgcactccagcctgggagattgagcaacttcgtctcaaaaaaaagtttccaggaaagatctttgggtcctactaagcgtctcaattttgagttatgaatactttggttcagggaagtaacctgacatttggttttgctggaattagggttttcgctagatttgactgcaattaggatttcttctagattttaccagcagtgatctgaaaaagtacaggctagtcacagaaatagagatggatttaggatactacactatatttcaaatgattctagatgtgtaaatatagtatgaacattcttggagaggggtgagacaaactggacttgctgggccaaccctggcatgtttttcattctcctcactagttgacaaggattgaaaattccgctccagcctaatgagtgaacaggatggctgcccacaaaaccaagttattagctttatgtcatcgaagctcatattctcaaaggcccaaagtgctgtgccgagacaaatccaagtgctgctcttgctgaagtgcgcactgaagtccagctgtccgtgcttacagcagtgccaaaagtggggattccatggaccaaaaacggtgccataagggaagccagaagagttgcagtgcaagatcctgggagagattataccaaagaaatcaagcctttttatcctgatgcttctaagatgatgagggtgagctgtgacagatgctgtgggaggggagttcacatacattccatgtcaaggcatttagctgataaatccatcctcagaaaagcacctttttaaaaagaagtccattttgtatattagaagatgatgatgatgatgaagatgaagaaagccctggcagatacaaagttcctcagtatttaaggagaaggatctcttccatgtccccttgacatgactgtggctattgcccaaacctcagcttgagaacatcatataatactgagagcggaagatttttttaaagagatatggtagtttaaataggtttgtttaaagaactcttgggaaatttcttaacaaattgtaattgtttttataaaccttcctacagagttgtgtaccattcatcatcaccatcatttaatatctgtaagtgcccagaaggtacaaggtgctatacagccgttaaacaccccctccctgcaactgtttaaaattagaatagatttttgcatcaaccactgctagaagctttccccacctaggtgggctgcaagggcctgcattcccaacatcccattacatgtttcccactccagaaagtctctgggtttattccagctttttatcttgacgtgtcccattcacccccatggtttggtttggtttggttttgttttttaaatcaagaaagtttcagggaatcaaaagaggtcggacattttttaacctagcagaagtacagagtcatatattttgctacgaatattgttgtagtacagaaaacccactttgcccgttagtgtgtggatagtatgtgtgtgtccgcactcatgataacttgaatgttgaaccagacatagggttcatttttgaaaggttaaaccacactgtttcaggaacttgctccaaatactacttggttatcccttcctttaccagttagaactaaagagtgtgatgtatgaacacactgggttgggattttctgttgaggatatgcagggcattttggcatgaggcaaatacagaagcaagatttcattctacttggtgatttgaatcatgacagtcctcattccaatctctctttaattctctctggccctgcccacactctgtatttgaaaatcttgtttttgctctttccggagcttcacccctctacttacatattgtaaagttgtataaatctatcattgaaaggtcctctctgccagcagtggtgccaccctttggtttgctgtggtactttgctgtgtactccgtggcatcatgttactgtgtaaataaattcattttaatacacactaaaaaacagacaaatgcttgtccttttggcgactc

SEQ ID NO: 216767 - DNA, 11239 bp, Artificial Sequence
  derived and/or modified sequence
atgtctgcttgtaacacctttactgaacatgtttggaaacctggtgaatgcaagaattgctttaaacctaaaagtttgcaccagcttcccccagaccctgagaaggcacccatcacccatggcaatgtgaaaactaatgccaatcacagtaacaaccaccgcatcaggaacacgggcaatttccggcctcctgtggctaaaaaacccactatagctgtgaagcccactatgatagtggcagatgggcaaagtatatgtggtgagcttagcatccaagaacactgtgagaacaaacctgtcatcatagggtggaaccgaaacagagctgccttgagtcagaaaccacttaacaataataatgaagatgatgaaggaattagccatgttcctaagccttatggcaataatgatagtgcaaagaagatgtcagataacaataatggactaactgaagtgttaaaggagatagcaggcttggatactgcccctcagataagaggaaatgaaacaaactccagagaaacattcttgggaagaataaatgattgctataaacgatcattggaaagaaagcttccaccaagttgcatgataggtgggataaaggaaactcagggcaagcatgttattctgagtgggagcacagaagtgattagtaatgaagggggccggttctgttacccagagttttccagtggcgaggagagtgaagaggatgtacttttcagtaacatggaggaggagcacgagagttgggatgagagtgatgaagagctgttggccatggagattcgcatgagagggcaacctcgctttgccaacttcagagcaaacacattgtctcctgttcgattctttgtggacaaaaaatggaataccatccccctgcgaaacaagtctctgcagagaatctgtgctgtggactatgatgacagctatgatgaaatcctgaatggttatgaggaaaattctgtggtctcttatggacaaggaagcattcagagcatggtgtcatctgactccacatcaccagattcttctttaacagaagaatcacgttctgagacagccagtagtttatcccagaagatttgtaatgggggattatctcctggtaacccaggagattctaaggacatgaaggaaattgagcccaattatgaaagtccctctagtaataatcaggataaagattcatcacaggcttccaaaagctcaataaaagttccagagacccacaaagcagtccttgctctccgattagaagagaaagatggcaagattgctgtacaaactgagaaggaagaaagtaaagcctctacagatgttgctgggcaagcagtaaccataaaccttgtccccacagaagagcaagcaaaaccttaccgagttgtgaacctggaacagccattgtgcaagccatatactgtcgtggatgtgtcagcagccatggccagtgagcacctcgagggccctgttaacagccccaagacaaaaagctcatcctctactccaaactctccagttacatcatcttcattgacaccaggacaaataagtgcccatttccaaaaatccagtgcaattcgataccaagaagtatggacttctagcaccagtccacgacaaaagatacctaaagtagaactaattactagtggaactggaccaaatgttcctccaaggaaaaactgtcacaaatcagcacctacatcacccacagctacaaacatttcctccaaaaccatccctgttaagtcacctaatttgtctgaaattaaatttaatagttataacaatgctggtatgccaccttttccaattatcattcatgacgagccaacttatgctcggagttccaaaaatgctatcaaagttcccattgttatcaatccaaatgcatatgacaatctagctatctacaaaagttttctgggaacaagtggagaactctcagtgaaggaaaaaaccacaagtgtaataagccatacttatgaagaaatagaaacagaaagcaaagtgcctgataacaccactagcaaaaccactgactgtcttcaaactaaagggttttcaaacagcacagagcataaaaggggctcagtggctcagaaggttcaagagtttaacaactgtctcaacagaggtcagtcttcaccacagagaagctatagttccagccacagctccccagcaaagatccagagagccactcaagagcctgtggccaaaatagaaggcactcaggagtctcagatggtgggcagcagcagcaccagagagaaagcaagcacagtgctttctcagattgtggcttcaatccaacccccacagtctcctccagaaacacctcaatctggccctaaagcttgcagtgtggaagagctttatgccattcctccagatgctgatgttgctaagagcacacctaagagtacgccagtccggcccaaatctctctttacatctcagcctagtggtgaggctgaagcacctcagaccacagacagtcctaccaccaaagtacagaaagacccatccataaagccagtcaccccctctccctccaaattagtgactagcccccaaagtgagccaccagctccctttcccccgccacgctctacttcttctccttaccatgcaggtaaccttttgcagaggcatttcaccaactggaccaagccaaccagccctaccaggtcaacagaagctgaatcagttttgcactctgaaggcagcaggcgggcagctgatgcaaaacctaagcgctggatatcatttaaaagcttcttccgccgtcggaaaacagatgaggaggatgacaaagagaaagagcgagagaaagggaaactggtgggcctggatggcacagtcattcacatgctgcctcctcctccagttcagcgccatcactggttcacagaggcgaaaggagagtccagtgagaaaccagccattgtcttcatgtacaggtgcgaccctgctcaaggccagctcagtgtggatcagagcaaggctaggacagaccaggcagcagtcatggagaagggtagagcagagaatgcattactacaggactcagagaagaagaggagtcattcttctccatcacagattcctaaaaagattctcagtcacatgacccatgaagtaacagaggatttttctcctcgggatccaagaactgttgttgggaagcaagatggcaggggctgcacttcagtcacaacagcattgtccctacctgaactggaaagggaagatggaaaagaagacatttcagatcctatggacccgaacccttgtagtgcaacatacagcaacttagggcaatctagagcagccatgatacctcccaagcagccacgacagcccaagggagctgtggacgatgccatcgcctttggagggaaaacagaccaagaagcacccaatgcttcccaacctacaccacccccactgccaaagaagatgatcataagagccaatacagagccaatctccaaggacctccaaaaatccatggaaagtagtctttgtgtcatggctaatcccacctatgatatcgaccccaactgggatgccagcagtgctggttcttccatcagctatgaactcaaaggactggacattgagtcttatgactccttggaaaggcctttgcgcaaggagagacctgtcccctcagcagcaaacagcatttccagcttaaccactctcagtattaaggatagattttccaacagcatggaatccctctccagccggcgtgggccctcttgcagacagggccgaggcatccagaagccgcagagacaagcactttatcgaggacttgagaatcgggaggaagtagtgggtaaaatccgaagccttcatacagatgccttgaagaaactggctgttaaatgcgaagaccttttcatggctgggcagaaagaccagctccgttttggagtggacagctggtcagacttcaggctaaccagtgacaaaccatgttgtgaggcaggtgatgcggtttactatactgcttcatatgcaaaagatccacttaataactatgcagtcaagatctgtaagagcaaagctaaagaatctcagcagtattatcacagcttggctgtccggcagagtctggctgtccattttaacattcagcaggactgtggtcatttccttgctgaagtccctaaccgtctgcttccctgggaggatccagatgaccctgaaaaggatgaggatgacatggaagagactgaagaagacgccaaaggagaaacggatgggaaaaacccaaagccctgttctgaagcagcatcatcccagaaagagaatcagggagtcatgagcaagaagcagaggagccacgttgtggtcatcaccagggaggttccatgtcttactgtggctgattttgtgcgagactctctggcccagcatgggaaaagccctgatttgtatgagaggcaggtgtgtctgctgctcttacagctatgctctggtcttgagcacctcaaaccctaccatgtcactcactgcgatctacgcctagagaacctgctacttgtccactaccagcctggggggactgcccaaggctttgggcctgcagagcccagccccacctcatcttatcccactaggcttatagtgagcaacttctctcaggccaagcagaagagccatctggtggaccccgagatcctccgggaccagtctcgccttgccccagagatcataacagctacccagtataaaaagtgtgatgagttccagacaggcatcctcatctatgagatgctgcacctacccaacccctttgatgagaacccagagctgaaggagagggaatacacacgagcagacctgcctcgcatcccattccgctccccctactcccggggtctgcagcagctggccagctgcctcctgaatcccaacccttctgagcggatcctcatttcagacgccaaaggcatcctccagtgtctgctctggggcccccgcgaagatctcttccagactttcaccgcctgccctagcctagtacagaggaacaccctgctccaaaactggctagacatcaagcgaacactgctcatgatcaagtttgctgagaagtccctggacagggaaggtggaatcagccttgaggactggctttgtgctcagtatttggcttttgccactacagactccctcagttgtattgtgaaaattctgcagcaccgttaatgtgtacctggatgatgcttttactacatcttcaccttcttcatgtcacccatgcacttcccctccctagtgctcactccaaattcaaggaaagaagaaaggcaaacctctatccctgtccgtgaacaagtgggtctattcagaaaggttatccactgccccagattgaatgagaagctgagtctgtcttaactttacagaaattcagctgcacaaacttgcagttgccttcccttgaaacaccttctatcctaatagtcccataaatgcaggtaaaaatgaaaatccatattcttgaagggacagcttctttggtatgaactcagccagtgagctgtgtccatttcctccataattctggatatcacctatctttttagcaccaagtatttattctcactagcagtagacagacttaaccagtctctaccacgacccagtagactctgacaacagactcttcctttaaggtgtcaacaactgacttactaggcaggactgccatccttagcatcagcccagttttggttaccagggactatatcttttgttccaggagagagtagaaagaaaaggagagatcccatccttgggtcatagacccattttcattgccattatctgtaagtatgtgcactgcatggaggacagccctaatagtctcccctctgctgccactgcctgattctccactctgtccccacttgccagtgaagtttggatttatcagccacttgtggcccattacagagctgacccaaggtggtgtcaccaatgcctcagcagggtggagtgcagttcagagcttataaatagctggcagggcatgaggagatgattttcttgcatgtgcaattctctaggggccatcaggaaacagagtttaaagtaccctttgattactgtcagaactgtcagcatttgcagttttccccgagcagtaattggccagctcccttctatcagtagccagtgttaactagtttaccaaatgctgtaaacaattgccctgaatgaaatagctgtcagtggagctctaagatctcctttagagggcacagtgaggtgggctgttgggatggccgtaggcaggggagaggaagaaggccactgatgagactgctgacctcctcagaaggttgacctcttctagagagactgcctcccagtgtttaagtggctcattgctccttctgactctgtaaaatggctctggaggacagctcacaggaattctgattgctgaggtgggtgattgagagctgttcaccatgtgtgcagcctgtgctccccttctatggatatgtgtgcaatttttgtatgtatttttttagctgtatattacagtgtttatgttgcaacttcacctgaagcgagtctacagaaaccctcccccttcttcccttggcacatatttgcgctaagagatgagcgttccttccactggggttgtgtgtgtgtgtgtgtgtgtgtgtgtgtgtgtgtgtgtgtgtgtatgtatacacatgttcacctgtgcttgttttattcaaaactgtgagtatgtgtttactttgaccttgaaatcccaagagtcactcgaacaatgtgtgtgtacacttgtgtgcccatgtgtgcgtgcacacgcatgctggaagtagaggccaggcctctagaaaagcaacctgtggcagggttgacagacatgttctctgtgcctagtgagtgagtgagccctgaggcccctcatctaccagtgcagagtttccttaaagccaagactgactgtgcagtattacttacatagcacattagtggccttggaaatttctaaacttttaacatttttaacagcttttcatgtgattcatgtataacaaagaggatcaggaaaggaaaataatgtattttattgtgctcttattacttttttaagtgattgtaatatgtgaggctctatttggagaatgtcccttatcccctggccagcaatataggactcacaggaaagaaggctggttagcccacaaagagtcttgcctcctctagccagagtgcagggctctgctcctaggaatggccatggagtgggcatgctgctgcaggccagcagtctgctcttggtgtcctgtggcatggccgcgccttgccttgaaggttggtgtttggttcatcttagcatagaacatgtgcacataactccttgcctgattatgcactgaagggcagcacacagaccactgaccatgtcagccagcacattcccttaacctcccccacctcccatcttgcaatgtcttgcatattgagatataccttctcaatgtcatgttcgtggtgccttgcccatgtaaatttcaatgttgactatttaatgaggttacatatttaatgctgaatgtttcctggtccctctatttgttatgtctctacttatctttttttttctttctctttttctgttatgatttggatccagtcttcactttaactctatggtataataagcatggacacctccactaccattatcttacagcactggtaaaccaagcacctcttcatatcagatgtttttagtactgtttttatattcagatttgttaagggcaaaagatgaatgcaaactagccagagaaaagcctcaggcttcccagagacaggtggctagattaatttttctctgggtgatggccaaagaatgtgagatagagagggaagggggtgttacaggttagagcagaatagagaaagaaactatatttctaggcaaaaagtactacatgagttggtcttcagaatatttttccaaaaaaatgaaattcagtcagtttaacattatcacaaatatttttcattttaattgtggtaggacctttgaatttgttcatcaactggaaagaaatcctaccctctgtagacacatacacacacatttatatatctatgtgtttgaattgtgactagtatagcactttacattttctcaagtaacaggaagttattgccttcaatattgattggaaattgttttctattgaagtctatactgtagagttttccatttatattgagagtttgaacaattaagctcctattggaacttttccttaagccacatgagcatgaacaatctctgtgacacttgggtgctagagaaacacaacagtggctaaagtagccaagagcaagactgaatgtatagcagagtgccttgttagagtggtaacctagtcttggaagcaattcagtggatgtttcataaagaggactagaacttcaagaagcctcctgtgctggctgaggtgagcccttttggtatatgtacactactgggttgcctagaagccaattcatgaagaataacagcaggatgagaaaaagagtcactgtaacctgtggaacaacaacgtaagaatcaccaacccctaggctgagctagaactggaagccaggaatatggcaatgagtttcaagatttgccctcagaagatgaactgggtgaggtatgggttgaggtgagggcacaagcactcatcctacctaccctgctgctgttgaggagctagaagtaaaacatattggttaggattttaacagttggagtagcctcccattatcagattaagtgggggtcacttttgcttccaaactcagaataagtttgtaaacatgggaaagtctaagccaagagatctaaagctctagaaatattaatgacatttctgggagtaaaactactaaaaattatatcttaaaagtttctagtagtatgaagttcccaggccaggcgcagtggctcacgcctgtaatcccaacactttaggagggcgaggtgggcagatcacctgaggtcaggagtttgagaccagcctggccaacatggtgaaactccatctctactaaaaatacaaaaattagccgggcatgatggcaggcacctgtaatctaagctactcgggaggctgaggcaagagaatctcttgaacccaggaggcaaaggttgcagtgagccaagatcacgccatcgcactccagcctgggagattgagcaacttcgtctcaaaaaaaagtttccaggaaagatctttgggtcctactaagcgtctcaattttgagttatgaatactttggttcagggaagtaacctgacatttggttttgctggaattagggttttcgctagatttgactgcaattaggatttcttctagattttaccagcagtgatctgaaaaagtacaggctagtcacagaaatagagatggatttaggatactacactatatttcaaatgattctagatgtgtaaatatagtatgaacattcttggagaggggtgagacaaactggacttgctgggccaaccctggcatgtttttcattctcctcactagttgacaaggattgaaaattccgctccagcctaatgagtgaacaggatggctgcccacaaaaccaagttattagctttatgtcatcgaagctcatattctcaaaggcccaaagtgctgtgccgagacaaatccaagtgctgctcttgctgaagtgcgcactgaagtccagctgtccgtgcttacagcagtgccaaaagtggggattccatggaccaaaaacggtgccataagggaagccagaagagttgcagtgcaagatcctgggagagattataccaaagaaatcaagcctttttatcctgatgcttctaagatgatgagggtgagctgtgacagatgctgtgggaggggagttcacatacattccatgtcaaggcatttagctgataaatccatcctcagaaaagcacctttttaaaaagaagtccattttgtatattagaagatgatgatgatgatgaagatgaagaaagccctggcagatacaaagttcctcagtatttaaggagaaggatctcttccatgtccccttgacatgactgtggctattgcccaaacctcagcttgagaacatcatataatactgagagcggaagatttttttaaagagatatggtagtttaaataggtttgtttaaagaactcttgggaaatttcttaacaaattgtaattgtttttataaaccttcctacagagttgtgtaccattcatcatcaccatcatttaatatctgtaagtgcccagaaggtacaaggtgctatacagccgttaaacaccccctccctgcaactgtttaaaattagaatagatttttgcatcaaccactgctagaagctttccccacctaggtgggctgcaagggcctgcattcccaacatcccattacatgtttcccactccagaaagtctctgggtttattccagctttttatcttgacgtgtcccattcacccccatggtttggtttggtttggttttgttttttaaatcaagaaagtttcagggaatcaaaagaggtcggacattttttaacctagcagaagtacagagtcatatattttgctacgaatattgttgtagtacagaaaacccactttgcccgttagtgtgtggatagtatgtgtgtgtccgcactcatgataacttgaatgttgaaccagacatagggttcatttttgaaaggttaaaccacactgtttcaggaacttgctccaaatactacttggttatcccttcctttaccagttagaactaaagagtgtgatgtatgaacacactgggttgggattttctgttgaggatatgcagggcattttggcatgaggcaaatacagaagcaagatttcattctacttggtgatttgaatcatgacagtcctcattccaatctctctttaattctctctggccctgcccacactctgtatttgaaaatcttgtttttgctctttccggagcttcacccctctacttacatattgtaaagttgtataaatctatcattgaaaggtcctctctgccagcagtggtgccaccctttggtttgctgtggtactttgctgtgtactccgtggcatcatgttactgtgtaaataaattcattttaatacacactaaaaaa

SEQ ID NO: 216768 - DNA, 5241 bp, Artificial Sequence
  derived and/or modified sequence
atgagtgcctgtaacaccttcactgagcatgtgtggaagcccggtgagtgcaagaattgttttaagcctaaaagcctgcaccaattacctcctgatcccgaaaaagcccctattacccacgggaacgtcaagacaaacgccaaccactccaataatcacaggatccggaacaccggaaactttaggccacccgtagcaaaaaagcccacgatagctgtgaaaccaaccatgatcgtagcagacggtcagtccatttgcggcgagctatccattcaggaacactgtgagaataagccagtgatcattggttggaatagaaatcgggctgctctctctcaaaagcccttgaacaacaacaatgaagacgacgaaggcatctctcacgtccccaagccctacggaaacaacgatagcgcaaaaaagatgtcagataacaataacgggctgacagaggtgctgaaagaaattgccggactggatactgcacctcaaattagagggaacgagacaaattctcgcgagacctttctgggcagaatcaacgactgttataagcgctctcttgaacggaagttgcccccttcttgtatgattggcggaattaaggaaacacaagggaagcatgtgatactttctgggagcacagaagtaatcagcaatgagggaggcaggttctgctatcccgaattctcatccggggaggagtcagaggaggacgtgctgttttccaacatggaagaagaacatgagagctgggacgagagtgatgaggagttgttggccatggagataaggatgaggggacaacccaggtttgcaaactttcgcgctaataccctctcacctgtgagattcttcgtagataaaaaatggaataccatacccctgcggaacaaaagcctgcaacgtatctgtgcggttgattacgatgacagctacgatgaaatccttaacggctacgaggaaaatagcgtggtgagctatggacaggggagtatccaaagtatggtgtccagtgactcgactagccccgattcatcccttactgaggagagccgtagtgagaccgcctcatctctgagtcagaagatctgtaatggcggattatccccaggtaaccccggagactctaaggacatgaaggagatagaacccaattatgagtctccttctagtaacaaccaggataaagatagcagtcaggcctctaaatcttccatcaaagtccctgagacacacaaggctgtcctggctctgcggttggaagagaaagatggtaaaatcgccgtccagactgagaaagaggagtccaaggccagcaccgacgtcgccggacaggctgtaactatcaatttggtgccgacggaagaacaggcaaagccatatcgggtcgtgaatctggagcagccattgtgtaaaccttacacagtggttgatgtgtctgcggcaatggcttctgagcacctggagggaccagtgaactcgccaaagacgaaaagctccagtagcactccgaacagtcccgtaacatcctcaagtttgacgccaggccaaatatcggcacacttccaaaaatcaagtgctataagatatcaggaggtgtggacgtcctccacaagccccagacagaagattccaaaagtggagctcatcacctcaggcacaggccctaatgtgccaccaaggaagaactgccataaaagcgccccaacctctccaacggcgacaaacatttccagcaaaacgatccctgtcaagtctccaaatctaagcgagattaagtttaatagctataacaacgctggcatgccacccttccctatcattattcacgacgagccaacttatgcacgtagttctaaaaacgctatcaaagtgcccatagtcattaacccaaacgcatatgataatctcgctatctataagtctttccttgggacgagcggtgagctgtcggtgaaggagaagactacatcagtcattagtcatacttatgaggaaatcgaaacggaatctaaagtccctgacaatacaacttcaaagaccacagattgtctgcaaaccaaaggatttagcaactctacagagcacaagcgcggatccgtggcacagaaagtgcaagaatttaataattgtctgaaccgaggtcagtcaagcccccagcgaagctattcttctagtcatagctcccccgctaaaatacagcgggctacacaagagcccgtggccaaaatcgaagggacacaagaaagccagatggttggatcctcctctacacgcgagaaggcctccaccgtgctctctcaaattgtagccagcatccagccaccacagagccctcccgagacaccacagtccggccctaaagcctgtagtgtcgaggagttgtacgcaattcccccagacgcagacgtggccaaaagcaccccaaaatctaccccagtccgacctaagtccctttttacatcccagcctagtggtgaagcggaagcacctcaaacaactgatagtcccaccactaaggttcagaaggatcccagcatcaaaccggttaccccctctcccagcaaacttgtgacatcaccacaaagtgaaccacccgctccgttcccacctcctcggtcaacatcctctccctaccacgctgggaatctcctgcagagacacttcactaattggactaagcccacctctcccactcgcagtactgaagcggagagtgtgctgcattccgaggggtctagacgagcagcggatgctaagccaaagagatggatctcttttaagagcttcttccgcaggagaaaaacggatgaagaggacgacaaggagaaggagcgggagaaggggaaactcgtgggactggatggtacggtgatccacatgttaccaccgccaccggtacaaagacaccattggtttactgaagctaagggggagagcagtgagaagcccgcaatagtgttcatgtaccggtgcgatcccgctcaggggcaactgtctgtagaccagagtaaggccagaactgaccaggctgctgtaatggagaaagggagagccgaaaatgctctgcttcaggacagtgagaagaagcgatcccatagttctccgagccagatccccaagaaaattctctctcacatgacgcacgaggtgaccgaggacttcagccccagagatccacgcactgtggtggggaagcaggacgggagaggatgtacatcagttaccactgcattaagccttcctgagctcgagcgggaggacggcaaggaggacatctccgatcctatggatcccaacccctgctcagccacttactctaatttaggccaaagccgtgcagccatgattccaccgaagcaaccgcgtcaaccgaaaggcgcagtcgacgacgctatcgcatttgggggaaaaacagaccaggaagcccctaacgcttctcagcctacaccccctcccttacccaagaaaatgattatcagagctaataccgagccaatttcaaaagacctccagaagtcaatggaatctagtctgtgcgtgatggcgaatcccacctacgatattgacccgaattgggatgcatcaagcgcaggaagtagcatcagctacgaactcaagggactcgatatcgagtcttatgacagcctggaacggcctcttcggaaagagcgcccagtcccgtccgcagctaactccatcagctcgctgacaacactgtctataaaagaccgtttcagtaactccatggaatcgctgagctcccggagaggaccatcatgccgtcagggccgaggaattcaaaaaccgcagcgtcaagccctttatagaggtcttgagaaccgagaagaggtcgtgggtaaaattagaagtctgcacacagacgccctgaagaagttagccgtgaaatgtgaagatttatttatggctggccagaaggaccagctacgcttcggcgttgacagttggagcgacttcagacttaccagcgataagccttgctgtgaggcgggagatgcagtgtattatacagcttcatacgccaaagaccccctgaacaactatgccgtcaagatatgcaagagtaaagccaaagagagccaacaatattatcattccctcgcggtgagacagagtcttgccgtgcactttaacatccagcaggattgtggccattttctggcggaagtgcctaatcgcttgttaccctgggaagatcccgacgatcctgaaaaagatgaagatgatatggaggagactgaggaagacgccaagggcgaaaccgacgggaagaatcctaaaccctgcagcgaggccgcttcgtcccaaaaggagaatcagggcgtcatgtcaaagaaacagcgcagccacgtggtggttataacaagggaggtcccatgcctgaccgttgctgatttcgtccgtgattccctggcacaacatggcaagtccccggacttatatgagaggcaggtctgcctgctcctgctgcagctgtgctcaggcctggaacatctaaagccttaccacgtcactcactgtgacctgaggctggagaaccttttattggtccattaccagcctggcggtactgcgcagggcttcggcccagcggagccatcacccacctcaagttacccaactagattgattgtgagtaatttctctcaggccaagcagaagagccacctagtcgaccctgagatactccgggaccagtcgcgcctggctcccgagatcattacagcaacacagtacaagaagtgtgatgagtttcagactgggattctgatctatgaaatgcttcatctgcctaatccttttgacgagaatcctgagctcaaggaacgggaatacactcgcgctgatctgcccagaatcccttttagaagtccctattcccggggtcttcagcagctggcatcatgtctgctgaaccctaaccctagcgagcgcatcttgatttctgacgccaagggcatcctgcagtgtctgttatggggccctcgtgaagacctgttccagacctttacggcgtgtcccagtttagtgcagcgaaatacactcctccagaattggctggacatcaagagaacacttttgatgattaagtttgccgaaaaatccctagacagagagggaggaatttccctcgaagattggctttgtgctcagtatttggccttcgcaacgaccgatagcctatcctgcatcgtgaaaatccttcagcatagatag

SEQ ID NO: 216769 - DNA, 5240 bp, Artificial Sequence
  derived and/or modified sequence
atgagcgcttgtaacacctttaccgagcatgtgtggaagcctggcgaatgtaaaaattgcttcaagcccaagtcactacaccagctccctccagatccagagaaagccccaattacacacggaaacgttaagaccaacgctaatcatagtaataatcatcgaataagaaataccggcaacttccggcctcctgtggcaaaaaaacctaccatcgccgttaaacctacaatgatcgtagctgacgggcagagcatatgcggcgagctgtcaattcaagaacactgtgaaaataagcctgtgattatcggatggaatcggaacagagccgctctcagtcagaaaccgcttaataataataacgaggatgatgagggaatctcgcatgtgccaaaaccctacggcaacaacgattcagctaagaagatgtctgacaacaataatgggcttaccgaggtcctcaaggaaatagcgggacttgacacagctcctcaaatccgagggaatgaaacaaatagcagagaaacttttctgggacgaatcaacgactgctacaaacgctccctggaacgcaagctgcctccaagctgcatgatagggggaattaaggaaacacagggtaagcacgttatattatcaggctcaacagaagtgatctcaaacgaaggcggacgcttttgctacccggaattttcaagtggtgaagaaagtgaagaggacgtgctcttcagcaacatggaggaagaacatgagagttgggatgaaagcgatgaggagctcttggcaatggagatacggatgcggggacaacccagattcgctaactttcgggcaaacactcttagccctgtgagattcttcgttgacaagaaatggaacactatccctctgagaaacaagtccctacagcgcatttgtgctgtcgattatgacgatagctatgacgaaatccttaacggatatgaagagaactcagttgtgtcctacggccagggctccattcagtccatggtatcaagtgacagtacttctccggattcatcactgaccgaggaatctagaagtgagacagcctcctcacttagtcagaagatctgtaatggtggactgtcccccggaaatcccggtgactccaaggacatgaaagaaatcgaacctaattatgagtcacccagctccaacaaccaggacaaggatagcagccaagcttccaagagtagtatcaaggtgcctgagactcacaaggcagtcctcgccctcaggttggaggaaaaggatggtaaaattgctgttcagactgaaaaggaagagtctaaagcaagtaccgacgtggccggtcaggccgtgactattaatctggtacccaccgaggaacaagccaagccctatcgtgtggtgaacttagagcagccgctctgcaagccctataccgtggttgacgttagcgcagccatggccagtgagcatcttgaagggccagttaactccccgaaaaccaagagtagtagcagtactccgaacagcccggtgacaagctcatccctgacaccgggacagatctccgcacatttccagaagtcttcggccattagatatcaggaagtatggaccagctcaacttccccacgccagaaaatacctaaagtcgagctgataacttccgggacagggccaaacgtccctccacgaaagaactgtcataagtcggcacctacaagtcccaccgccaccaatatcagttctaagaccattccggtgaagtctcctaaccttagtgaaatcaagttcaattcctacaataacgctggcatgccgccattccctattataattcacgacgaaccaacctacgctaggagctccaagaacgccataaaagtacctattgttattaacccaaacgcctacgataacctggctatctacaagagttttttgggaacatccggagagttatccgtaaaggagaagaccacttccgtcatttctcatacgtacgaagaaatcgagaccgaaagcaaggttccagataacacaacatctaagaccacagattgcctccaaactaaagggttttctaacagcactgagcataagcggggtagcgtggctcagaaggtgcaggaatttaacaattgtctgaaccgcggacaaagcagcccacagagaagctatagtagcagccattcctctccagctaaaatccagagggccacacaggagccggtggctaaaatcgaaggaactcaagagtcacaaatggttgggtcatccagtacccgagagaaggcgagtaccgtgctatctcagattgtcgcaagtatccagcccccacagtccccacctgagacaccccaaagtggacccaaggcctgctccgtcgaagagctctatgcaatcccccctgacgccgacgtggccaagtcgacacctaagagtaccccagtcaggccaaagtcgcttttcacatctcagcctagtggtgaagcagaagcaccgcagaccaccgattcccctaccaccaaagtgcaaaaagacccttcgatcaagcctgtgacaccctcaccctcaaaactggtaacctctccacaatcagagccacccgctccgtttcctccaccaagatcaacctcatccccttatcacgctggaaacttgctccagaggcattttacgaactggacaaaacccacatcccccacaaggagcactgaagctgagtccgttctccacagtgagggcagtaggcgggcagccgacgccaagcctaaaaggtggatttctttcaagtcgttcttccggcgtaggaaaactgatgaggaagacgacaaggaaaaggagcgagagaagggcaagttggtgggactcgatgggaccgtgatccacatgctgccgccacccccagtgcaaaggcaccactggttcaccgaggccaagggagagtcctcagagaaacccgctatagtcttcatgtaccgctgtgaccctgctcaggggcagttgagcgtcgaccagagcaaggccaggacggatcaagctgctgtgatggagaaagggagggctgagaacgcactcctgcaggattccgagaagaaacgaagtcattccagcccgtcccagatccccaagaagatactgagtcacatgactcatgaggtgactgaggatttttctccgcgagatccaaggacagtcgttgggaaacaggacggcaggggctgcactagtgtcacaacggccttgtccttacccgagcttgagagggaggatggaaaggaagacatctcagaccccatggatcctaacccatgtagcgcaacctattcaaacctcggtcagagcagagcagcgatgatccctccaaaacaacctcgccaaccgaaaggggcagtggatgatgccattgcttttggcggaaaaaccgaccaggaggcccctaacgcctctcagcctactccccctcctctcccaaaaaagatgatcatccgcgctaatactgaacccatttccaaagatctacagaaaagcatggagagtagcctgtgcgtgatggccaaccccacgtatgacattgaccccaactgggacgcctcttccgccggatcaagcatcagttacgagcttaaggggctggatatagagtcatacgacagcctcgagcgtccgctcaggaaagaacgtcctgtgccctccgcggctaattccatcagctctctgacaacactcagtataaaggaccgcttcagcaactcaatggagtcactgtcatcgaggcgtgggccaagctgtcggcaggggagaggaatccagaagccacaaagacaggcattgtatcgtggtcttgaaaatagagaagaggtcgtaggaaagatccgcagcttacacactgatgctctaaagaagctcgcagtcaaatgtgaggacttgttcatggccggtcagaaagaccaactgaggtttggcgtcgatagctggtcagatttccggctgacatcggacaaaccatgctgtgaggccggagatgccgtctattacaccgcctcatatgcgaaggaccccctgaacaactatgcggttaaaatatgtaagagtaaagcgaaagaaagccagcaatactaccattcattggcagtacggcagtccttagctgtccattttaacattcaacaggactgtggtcatttcttagcggaggtcccaaacagattgttgccgtgggaggacccagacgaccccgagaaagacgaggatgatatggaagaaacagaggaggacgctaaaggagagactgatggaaagaaccccaagccttgtagtgaagccgcttcctctcagaaggaaaaccagggagtgatgtctaaaaagcagcgatcccacgttgttgttatcaccagggaagtgccttgtctgacagtcgccgacttcgtccgagattctctggcccagcacggcaaatcacccgatttgtatgaacgacaggtttgcctgctactgctgcaattgtgttctggactggaacatctgaagccctaccatgttactcactgtgaccttaggctcgagaacctactgctggttcactatcagcctgggggaaccgcccaggggtttggaccagccgaaccgtcccccacgtcttcatatcctacccggttgattgtgtccaatttctcacaggctaaacagaaatctcatcttgtggatccggaaattctgcgggatcagtcccgcttagcacccgagatcatcactgcaacacagtacaaaaaatgtgatgaatttcaaacaggcatacttatctacgagatgttgcatctgcctaatccctttgatgaaaatcctgaactgaaagaaagggaatatacacgagctgatctgcctaggatacctttcagatcaccatacagtcgcggattgcagcaacttgcatcctgtctgctgaacccaaatccttcagagcggatcctcatcagcgatgccaagggcatccttcagtgtctgctctggggtcctcgcgaggacctgtttcagacatttacagcatgcccatccctcgtacagcgcaatacactgctgcagaactggttggacattaaacgtacgctcctgatgataaagttcgcagaaaagagcctggacagagaggggggtattagcttggaggattggctttgtgcgcagtacctggcattcgctactacagattcgttatcttgcatcgtgaaaatacttcaacataggta

SEQ ID NO: 216770 - protein, 421 aa, Artificial Sequence
  derived and/or modified sequence
MASSSVPPATVSAATAGPGPGFGFASKTKKKHFVQQKVKVFRAADPLVGVFLWGVAHSINELSQVPPPVMLLPDDFKASSKIKVNNHLFHRENLPSHFKFKEYCPQVFRNLRDRFGIDDQDYLVSLTRNPPSESEGSDGRFLISYDRTLVIKEVSSEDIADMHSNLSNYHQYIVKCHGNTLLPQFLGMYRVSVDNEDSYMLVMRNMFSHRLPVHRKYDLKGSLVSREASDKEKVKELPTLKDMDFLNKNQKVYIGEEEKKIFLEKLKRDVEFLVQLKIMDYSLLLGIHDIIRGSEPEEEAPVREDESEVDGDCSLTGPPALVGSYGTSPEGIGGYIHSHRPLGPGEFESFIDVYAIRSAEGAPQKEVYFMGLIDILTQYDAKKKAAHAAKTVKHGAGAEISTVHPEQYAKRFLDFITNIFA

SEQ ID NO: 216771 - protein, 265 aa, Artificial Sequence
  derived and/or modified sequence
MASSSVPPATVSAATAGPGPGFGFASKTKKKHFVQQKVKVFRAADPLVGVFLWGVAHSINELSQVPPPVMLLPDDFKASSKIKVNNHLFHRENLPSHFKFKEYCPQVFRNLRDRFGIDDQDYLVSLTRNPPSESEGSDGRFLISYDRTLVIKEVSSEDIADMHSNLSNYHQYIVKCHGNTLLPQFLGMYRVSVDNEDSYMLVMRNMFSHRLPVHRKYDLKGSLVSREPAIRKRLKNCPPLRIWTFSTRTRKYILVKRRRKYFWRS

SEQ ID NO: 216772 - DNA, 1266 bp, Artificial Sequence
  derived and/or modified sequence
atggccagcagcagcgtgccccccgccaccgtgagcgccgccaccgccggccccggccccggcttcggcttcgccagcaagaccaagaagaagcacttcgtgcagcagaaggtgaaggtgttcagagccgccgaccccctggtgggcgtgttcctgtggggcgtggcccacagcatcaacgagctgagccaggtgcccccccccgtgatgctgctgcccgacgacttcaaggccagcagcaagatcaaggtgaacaaccacctgttccacagagagaacctgcccagccacttcaagttcaaggagtactgcccccaggtgttcagaaacctgagagacagattcggcatcgacgaccaggactacctggtgagcctgaccagaaacccccccagcgagagcgagggcagcgacggcagattcctgatcagctacgacagaaccctggtgatcaaggaggtgagcagcgaggacatcgccgacatgcacagcaacctgagcaactaccaccagtacatcgtgaagtgccacggcaacaccctgctgccccagttcctgggcatgtacagagtgagcgtggacaacgaggacagctacatgctggtgatgagaaacatgttcagccacagactgcccgtgcacagaaagtacgacctgaagggcagcctggtgagcagagaggccagcgacaaggagaaggtgaaggagctgcccaccctgaaggacatggacttcctgaacaagaaccagaaggtgtacatcggcgaggaggagaagaagatcttcctggagaagctgaagagagacgtggagttcctggtgcagctgaagatcatggactacagcctgctgctgggcatccacgacatcatcagaggcagcgagcccgaggaggaggcccccgtgagagaggacgagagcgaggtggacggcgactgcagcctgaccggcccccccgccctggtgggcagctacggcaccagccccgagggcatcggcggctacatccacagccacagacccctgggccccggcgagttcgagagcttcatcgacgtgtacgccatcagaagcgccgagggcgccccccagaaggaggtgtacttcatgggcctgatcgacatcctgacccagtacgacgccaagaagaaggccgcccacgccgccaagaccgtgaagcacggcgccggcgccgagatcagcaccgtgcaccccgagcagtacgccaagagattcctggacttcatcaccaacatcttcgcctag

SEQ ID NO: 216773 - DNA, 798 bp, Artificial Sequence
  derived and/or modified sequence
atggccagcagcagcgtgccccccgccaccgtgagcgccgccaccgccggccccggccccggcttcggcttcgccagcaagaccaagaagaagcacttcgtgcagcagaaggtgaaggtgttcagagccgccgaccccctggtgggcgtgttcctgtggggcgtggcccacagcatcaacgagctgagccaggtgcccccccccgtgatgctgctgcccgacgacttcaaggccagcagcaagatcaaggtgaacaaccacctgttccacagagagaacctgcccagccacttcaagttcaaggagtactgcccccaggtgttcagaaacctgagagacagattcggcatcgacgaccaggactacctggtgagcctgaccagaaacccccccagcgagagcgagggcagcgacggcagattcctgatcagctacgacagaaccctggtgatcaaggaggtgagcagcgaggacatcgccgacatgcacagcaacctgagcaactaccaccagtacatcgtgaagtgccacggcaacaccctgctgccccagttcctgggcatgtacagagtgagcgtggacaacgaggacagctacatgctggtgatgagaaacatgttcagccacagactgcccgtgcacagaaagtacgacctgaagggcagcctggtgagcagagagcccgccatcagaaagagactgaagaactgcccccccctgagaatctggaccttcagcaccagaaccagaaagtacatcctggtgaagagaagaagaaagtacttctggagaagctag

SEQ ID NO: 216774 - DNA, 2924 bp, Artificial Sequence
  derived and/or modified sequence
ggttgcgcgggagactatggcgtcctcctcggtcccaccagccacggtatcggcggcgacagcaggccccggcccaggtttcggcttcgcctccaagaccaagaagaagcatttcgtgcagcagaaggtgaaggtgttccgggcggccgacccgctggtgggtgtgttcctgtggggcgtagcccactcgatcaatgagctcagccaggtgcctcccccggtgatgctgctgccagatgactttaaggccagctccaagatcaaggtcaacaatcaccttttccacagggaaaatctgcccagtcatttcaagttcaaggagtattgtccccaggtcttcaggaacctccgtgatcgatttggcattgatgaccaagattacttggtgtcccttacccgaaacccccccagcgaaagtgaaggcagtgatggtcgcttccttatctcctacgatcggactctggtcatcaaagaagtatccagtgaggacattgctgacatgcatagcaacctctccaactatcaccagtacattgtgaagtgccatggcaacacgcttctgccccagttcctggggatgtaccgagtcagtgtggacaacgaagacagctacatgcttgtgatgcgcaatatgtttagccaccgtcttcctgtgcacaggaagtatgacctcaagggttccctagtgtcccgggaagccagcgataaggaaaaggttaaagaattgcccacccttaaggatatggactttctcaacaagaaccagaaagtatatattggtgaagaggagaagaaaatatttctggagaagctgaagagagatgtggagtttctagtgcagctgaagatcatggactacagccttctgctaggcatccacgacatcattcggggctctgaaccagaggaggaagcgcccgtgcgggaggatgagtcagaggtggatggggactgcagcctgactggacctcctgctcttgtgggctcctatggcacctccccagagggtatcggaggctacatccattcccatcggcccctgggcccaggagagtttgagtccttcattgatgtctatgccatccggagtgctgaaggagccccccagaaggaggtctacttcatgggcctcattgatatccttacacagtatgatgctaagaagaaagcagctcatgcagccaaaactgtcaagcatggggctggggcagagatctctactgtccatccggagcagtatgctaagcgattcctggattttattaccaacatctttgcctaagagactgcctggttctctctgatgttcaaggtggtggggttctgagacacttgggggaattgtggggatattctagccaccagttctcttcttcctttgctaaattcaggctgcaggctccttccatccagataactccatcctgtcgagtaggctctttctgaccctcagaaatacattgtcctttttcctctttgcccatttttcttccctctcttcctccccatgagaagtctgcttgtagtattagaatgttattgttgactctctcccaagtgccttgatctttgtaatatctcctgttgtttctatgatataggagctaggggaagggggttgtttgccttcttcaggacctgactggacagatggacctggctcaagcaactactctggatgcactttgctgtgtgggatgaactaaaagtgtctgaattttgctgataactttataaaactcactatggcatgcttccctcctggtgggccctaggatggatgacactcaagatactacagatgtgggtgcaggcatgcacacacacgatggaatatggccattcctacacaggtggggtagagagtgggtcagcagcctggcacctcacagaggtgggacctaagaggactcatgattatgcagagaattggattgggtctctgtcatagattgagtaatctcttcccttacctcaattccatctccacccatctctacatctgggcacagcaacccagagatggccaaaagcattcaagcctgggggaagatgtttgactattgctgctcttcaccagaacctcacacctctcctgggactggaacccttcagtgggtgtgtggccagttttggaggctggaatgatgggccagggtgtaggattcattctccatgtaaagtttcctttcatcctgcctagccatccccaaggtttatttccagaagaaaggaatatctctacttggatcaattctggtcatttcaagaggatggaggcctcaagtgtgggaacttcccctactccctggatgtgtgtacctagcacacttccttctcccacccctttttccagttggatttgtttttctgttctcttctgtcctgtcttatactgcaactgtgtctcctaggggacagatggccttctttgtcatcttcactctccacccccagagaggagtcagagccataactcaatcactcagcccctccaaagatagttgatgtgtgataatctcataatgttgagaaccctgatgagatacattgtcttcctctccctacaatgcctctggggccaaggcacccattcttcttgctatcctccatcccccttgaggcttccactttttttttttttagacataaagctgggcatcagcaactggcctgtggtgatgcaaagctgctttgctctgtatctggctggactgatctgtctcacaagaagccatgaggccatagggagaagctccctctccccttcatcttctgctccaaaggtggtagcaagaggagtacccagttaggggttggagcccccatataacatcttcctgtcagaagactgatggatctttttcattccaaccatctccctttcccccgatgaatgcaataaaactctgtgacaccagcaa

SEQ ID NO: 216775 - DNA, 1266 bp, Artificial Sequence
  derived and/or modified sequence
atggctagtagcagcgtcccacctgccactgtgtcagctgctaccgcgggccctggtcccggattcggtttcgcatcaaagactaagaagaagcatttcgttcagcagaaagtaaaagtgttcagagcggccgatccgctggtgggcgttttcttatggggagtggcccactccataaatgaattatcccaagtcccgcctcccgtaatgctgcttccggatgattttaaggcatctagcaagatcaaagtcaacaaccatttgttccaccgagagaaccttccctcacactttaaattcaaagagtattgtccacaagtgttccgcaatttgagggatcggttcggcatcgatgatcaggattacctcgtgagtctcactaggaacccaccctctgagtctgaaggctccgatggccgattcctgatatcttacgaccggaccctggtcatcaaagaggtttcaagtgaagacatcgccgacatgcattccaatctgtctaactatcatcagtatatagtgaaatgccatggcaatactctcttgcctcagtttctgggaatgtatcgcgtcagcgttgacaacgaggattcttacatgcttgttatgaggaatatgttctcccaccgactcccagtccacaggaaatatgacctgaaggggagtctggtctcgagagaggcctcggacaaggaaaaagtgaaagaactcccaaccctgaaggacatggatttcctcaacaagaaccagaaggtctacattggggaggaagagaagaaaatcttcttggaaaagcttaagcgcgatgtggaatttttggtgcagctgaaaatcatggattacagtctcctgttaggaatccatgatatcatccgaggctctgagcccgaggaggaagcccctgtgagagaagatgagagcgaagtggacggtgattgttcattaacagggccacctgcactggtcgggtcttatggcaccagccccgaaggaattgggggatatatacacagccaccggcccctgggaccaggggaatttgagagctttattgacgtctacgcaatccgatcggccgagggcgcccctcaaaaggaagtgtacttcatgggtctcatcgacattttaacacagtacgacgccaaaaaaaaagctgcacatgcagcaaaaaccgtgaagcacggcgcaggcgcagagatatctaccgttcacccggaacagtacgcaaagcgtttcctggattttattaccaacatctttgcatag

SEQ ID NO: 216776 - DNA, 798 bp, Artificial Sequence
  derived and/or modified sequence
atggcatccagctctgtcccacctgctacagtgtccgccgcaacggcagggcctggcccagggttcggattcgcgtcgaaaacaaaaaagaagcatttcgtacagcagaaggtaaaagtattccgggccgcagatcccttagtcggcgttttcctgtggggtgtagcacacagcattaacgagttaagtcaggtgcccccaccagtgatgcttctgccagacgattttaaggcaagttcaaaaatcaaggtcaataatcatttgtttcatagagaaaatttgccttcccactttaagtttaaggagtactgcccacaggtgttccgcaatctccgagacagatttgggatcgacgaccaagattatctcgtcagtctcacccgtaaccccccttccgaatcagaggggtccgacgggcgattcctgatatcctacgaccgtactcttgttataaaagaggtgtccagcgaagacatcgctgatatgcatagcaatctatccaactatcaccagtatatcgttaaatgtcacggtaatacactccttccacagttcctggggatgtatagagtttccgtagacaacgaggacagctacatgttggttatgagaaacatgtttagtcaccggctgcccgttcaccgcaaatatgacctcaaaggatctttagtttctcgtgagccagcaattcggaagagactcaaaaactgtcctccactgaggatttggacatttagtacgagaaccaggaagtatatcttagtcaagagacgcagaaaatacttctggagaagttag

SEQ ID NO: 216777 - DNA, 1266 bp, Artificial Sequence
  derived and/or modified sequence
atggcgagttcaagtgtgccgccagcaactgtctctgctgcaacagccggtcctggaccaggctttgggtttgcatccaagactaagaagaaacatttcgttcagcagaaagtgaaggtgttccgcgctgctgaccctcttgttggggtatttttatggggcgtggcacatagcatcaatgaactctcccaggtcccaccaccagtgatgttattgcccgatgacttcaaggccagttctaaaataaaagtgaataaccacctctttcatcgggagaatttaccaagccacttcaaatttaaagagtactgtccccaggtatttaggaatcttcgtgataggtttggtatagacgatcaggactacctggtgtctctgacgcgcaatcccccatcagagtccgagggcagtgacggccgcttcctcatttcctatgatcgtacattggtaattaaagaggtgagttccgaagatatcgcggacatgcactctaacctcagcaactaccatcagtacatcgtgaaatgtcacggcaacactctcctgccacagtttctcggtatgtaccgggtgagtgtggacaacgaagattcatacatgctggtcatgaggaatatgttcagtcaccgactgcccgtgcaccggaagtatgacctgaaaggatccttggtaagtcgagaggccagtgacaaggagaaggtgaaggagttgcctaccctgaaagacatggatttccttaacaaaaaccagaaggtgtatattggagaagaagaaaaaaaaatcttcctggagaagcttaaaagagacgtggagtttcttgtacagctaaagatcatggactactccctgcttctgggtattcatgacatcattcgtggatctgagccggaggaggaggcacccgtaagagaggatgaatccgaggttgacggtgattgcagcctgacgggcccccctgccctggtcggctcgtatggcacttcacccgagggaatcgggggctacatccacagtcaccggccccttggtcccggtgaattcgaatcatttattgacgtgtatgcaatccggtcagccgaaggagctccccagaaagaggtatacttcatgggccttattgacatcttgacacagtacgacgcaaagaaaaaagccgcacacgcggccaaaaccgtcaagcatggcgccggggccgagatctccacggttcacccagaacagtacgccaagcgctttctcgacttcattactaatatcttcgcctag

SEQ ID NO: 216778 - DNA, 1266 bp, Artificial Sequence
  derived and/or modified sequence
atggccagcagctctgtgcccccagccaccgtgtctgctgccacagctggccctggccctggcttcggctttgccagcaagaccaagaagaagcactttgtgcagcagaaggtgaaggtgttccgggctgctgaccccctggtgggcgtcttcctgtggggcgtggcccacagcatcaatgagctgagccaggtgcccccacctgtgatgctgctgcctgatgacttcaaggccagcagcaagatcaaggtgaacaaccacctgttccaccgggagaacctgcccagccacttcaagttcaaggagtactgcccccaggtgttcaggaacctgcgggacagatttggaattgatgaccaggactacctggtgtccctgaccaggaacccccccagcgagagcgagggcagtgatggccgcttcctgatctcctatgacaggaccctggtgatcaaggaggtgtccagtgaagatattgctgacatgcacagcaacctgagcaactaccaccagtacatcgtgaagtgccacggcaacaccctgctgccccagttcctgggcatgtacagagtgtctgtggacaatgaagacagctacatgctggtgatgaggaacatgttcagccaccggctgcctgtgcacaggaaatatgacctgaagggcagcctggtgtcccgggaggccagtgacaaggagaaggtgaaggagctgcccaccctgaaggacatggacttcctgaacaagaaccagaaggtgtacatcggggaggaggagaagaagatcttcctggagaagctgaagagagatgtggagttcctggtgcagctgaagatcatggactacagcctgctgctgggcatccatgacatcatccggggcagcgagcctgaggaggaggcccctgtgcgggaggatgaaagtgaggtggatggagactgcagcctgaccggccccccagccctggtgggcagctatggcaccagccctgagggcatcggcggctacatccacagccaccggcccctgggccctggagaatttgagagcttcattgatgtgtatgccatccgctctgctgagggcgccccccagaaggaggtgtacttcatgggcctgattgacatcctgacccagtatgatgccaagaagaaggccgcccacgccgccaagacagtgaagcacggggccggggctgagatcagcacagtgcaccctgagcagtatgccaagcgcttcctggacttcatcaccaacatctttgcctag

SEQ ID NO: 216779 - DNA, 798 bp, Artificial Sequence
  derived and/or modified sequence
atggccagcagctctgtgcccccagccaccgtgtctgctgccacagctggccctggccctggcttcggctttgccagcaagaccaagaagaagcactttgtgcagcagaaggtgaaggtgttccgggctgctgaccccctggtgggcgtcttcctgtggggcgtggcccacagcatcaatgagctgagccaggtgcccccacctgtgatgctgctgcctgatgacttcaaggccagcagcaagatcaaggtgaacaaccacctgttccaccgggagaacctgcccagccacttcaagttcaaggagtactgcccccaggtgttcaggaacctgcgggacagatttggaattgatgaccaggactacctggtgtccctgaccaggaacccccccagcgagagcgagggcagtgatggccgcttcctgatctcctatgacaggaccctggtgatcaaggaggtgtccagtgaagatattgctgacatgcacagcaacctgagcaactaccaccagtacatcgtgaagtgccacggcaacaccctgctgccccagttcctgggcatgtacagagtgtctgtggacaatgaagacagctacatgctggtgatgaggaacatgttcagccaccggctgcctgtgcacaggaaatatgacctgaagggcagcctggtgtcccgggagcccgccatcaggaagaggctgaagaactgcccccccctgcgcatctggaccttcagcaccaggaccaggaagtacatcctggtgaagagaagaaggaagtacttctggaggagctag

SEQ ID NO: 216780 - DNA, 1266 bp, Artificial Sequence
  derived and/or modified sequence
atggccagcagcagcgtgccccccgccaccgtgagcgccgccaccgcaggaccaggacctgggtttggtttcgcgtccaaaaccaaaaagaaacactttgtccagcagaaggttaaggtattcagggcggcggatccacttgtaggggtttttctttggggcgtggctcatagcatcaatgagctctctcaggtgccaccaccggtgatgctgcttcccgatgattttaaggctagttcaaagataaaggtgaataatcatttgtttcaccgggagaatttaccttcccatttcaagtttaaggagtattgccctcaggtctttcgtaatctgagggacagatttgggatcgatgatcaggattatctagtttctctgacccgaaatcctcccagcgaatccgagggatcggacggacgctttctgattagctacgacaggactctggtcatcaaggaagtgagcagtgaggatatagctgacatgcacagtaacctctccaattaccaccagtatattgttaaatgtcatggaaacacactcctcccccaattcctggggatgtaccgcgtgtcagtggacaatgaggatagttacatgctggttatgcggaacatgttctcccaccggctgccagtgcacagaaaatatgacttgaagggatcgctggtctcgcgcgaagctagcgacaaagagaaggtcaaggagctcccaaccttgaaggacatggactttcttaacaaaaaccaaaaggtctacattggcgaagaggagaaaaaaatctttctagagaagctgaagcgggatgtcgaattcctcgtgcaacttaagatcatggattactcattgcttctggggatccacgacattataaggggatccgagcctgaagaggaggcgcctgtgagagaagatgaatctgaggtggacggcgattgctccttgacaggcccccccgccctcgtgggcagttacggaacatctcctgagggtattgggggctacatccactcccataggcctctcgggcccggggagtttgagagcttcatcgacgtctatgcaataaggtctgcagaaggagctcctcagaaggaggtgtattttatgggtctcatcgacatcctgacccagtacgacgccaaaaagaaggctgcccacgcggccaagactgtgaaacacggagcgggcgccgagatttcaaccgtccaccccgaacagtacgcaaagcggttcctcgattttatcacaaacatatttgcctag

SEQ ID NO: 216781 - DNA, 798 bp, Artificial Sequence
  derived and/or modified sequence
atggccagcagcagcgtgccccccgccaccgtgagcgccgccaccgccggccctgggccgggcttcggctttgcttcaaagacaaaaaagaaacattttgtgcaacagaaggtcaaagtgtttcgcgccgccgatcctctggtcggagtctttttatggggcgtggcccactccattaatgaactgtctcaggtacctcctcctgttatgctgctaccagacgatttcaaagcaagctccaagattaaggtaaacaaccacctgttccatagggaaaatcttccctctcattttaagttcaaagagtattgcccccaagtcttcaggaacctccgagacagattcggtattgatgaccaagattatctagtgtccctgactagaaatccaccctccgagagcgaaggaagcgatgggcggtttctcatttcatacgatagaaccctggttatcaaggaagtgagctcagaggatattgccgacatgcattcaaacttgagtaattaccatcagtatatcgtgaaatgccatgggaataccctgctccctcagttcctgggaatgtatcgggtctcagtcgataatgaagatagttatatgctcgtaatgaggaatatgttttctcaccgactccctgtccatcgcaaatacgatttgaaagggtccttagtaagccgtgagcccgccatccggaagcgattaaaaaattgtccccccttgcgtatctggacattttcaacccgcactagaaagtacatcctggtgaagcggaggcgtaaatacttctggaggtcgtag

SEQ ID NO: 216782 - DNA, 1266 bp, Artificial Sequence
  derived and/or modified sequence
atggccagcagcagcgtgccccccgccaccgtgagcgccgccaccgccgggccagggcccggtttcgggttcgcatctaagacgaagaaaaagcatttcgttcaacagaaggtgaaagtgtttagagcagctgatcctctggttggtgtgtttttatggggggttgcgcactcaataaacgaactcagccaggtccctccgcccgtgatgctgctgcccgacgacttcaaagcttcttccaagattaaagtgaacaaccacctattccatcgcgaaaatcttcccagccacttcaaattcaaagaatattgcccccaagtatttcgcaatctgagggatcgcttcggaatcgacgaccaggattatctggtttccctcactagaaaccccccttccgaaagcgagggatctgatggacggtttctaatttcttacgacaggacactcgtgataaaagaggtatctagcgaggacatcgccgacatgcacagcaatctctccaactatcatcaatatatagtgaaatgtcacggcaacaccctgctcccacagttcctcggcatgtacagggtatccgttgacaatgaagactcctatatgcttgtcatgcgcaacatgttttctcatagattgcccgtccatcgcaaatatgatctgaagggcagtttagtgtctcgcgaggctagcgataaggagaaagttaaagaactccctaccctaaaggatatggattttctaaacaaaaatcagaaggtttatataggcgaggaagagaaaaaaatttttttggaaaagttaaagcgcgatgtggaattcctcgtgcagctaaaaataatggactacagtctgttattgggcatccacgacattatcaggggctctgaacctgaggaggaagccccagtccgcgaggatgaatcagaggtcgatggcgattgttctcttactgggccaccagccctggtgggttcctatgggacatccccagaaggtatcggcggttatatccactctcataggccactcggccccggagagtttgaatctttcatcgacgtctacgccatcagaagtgcagagggcgctccacaaaaagaggtttactttatgggcctaatcgacatcctgacccaatacgacgccaaaaagaaagccgcccacgctgccaagaccgtgaaacacggcgctggtgccgagatcagcaccgttcaccccgaacaatacgcaaaaagatttctggacttcattacaaacatattcgcatag

SEQ ID NO: 216783 - DNA, 1266 bp, Artificial Sequence
  derived and/or modified sequence
atggcttcatccagtgtccccccagccactgtatcggctgccacagcaggcccaggaccgggatttggcttcgccagcaagaccaagaagaaacacttcgtgcaacaaaaagttaaggtttttagagctgctgaccctctcgtgggagtcttcctgtggggtgtggcgcattcgattaacgagttaagccaggtcccccctcccgtcatgctgctcccagatgacttcaaagcaagttcaaagattaaagtcaacaatcacctttttcaccgggagaacctgcctagtcattttaagttcaaagaatactgcccccaggtgtttcggaatctccgtgaccgattcggcatcgacgaccaggactatctggtttcattgactcgcaaccccccaagcgagagcgagggatccgacggaagatttctcataagctacgatcggacacttgttattaaagaagtgtcttcagaggacattgccgacatgcactcaaatttatctaactatcatcaatatatcgtgaagtgccacggtaacacccttctgccccaattcctggggatgtacagagtctcagtggacaacgaggattcctacatgctcgtgatgaggaacatgttttctcatcggctcccggtgcaccgcaagtatgacctgaagggaagcctggtgtctcgtgaggcaagcgacaaggaaaaggtgaaggagttgcctaccctgaaagacatggacttcctgaacaagaatcagaaagtatacatcggcgaggaggaaaaaaagatatttttggagaaattaaaaagggacgtcgagtttcttgtgcagctgaagataatggactactccttgctactcggaatccatgacattatccgaggatctgaacctgaagaagaggcgcctgtgcgtgaagatgaatcagaagtcgacggcgactgttcgcttacaggcccacctgcactggtcggatcttatgggactagcccggaagggattgggggttatatccattcacatagaccactcggccctggcgagtttgagagttttatcgatgtttatgcgatccgctctgcggagggggctccacagaaagaggtctatttcatgggactgatcgatatcctgacccagtacgacgccaaaaaaaaggccgctcatgctgcgaagaccgtgaagcatggtgctggcgcagagatcagtaccgttcacccagagcagtacgcaaagagattcttagactttattactaacatttttgcgtag

SEQ ID NO: 216784 - DNA, 798 bp, Artificial Sequence
  derived and/or modified sequence
atggccagctccagcgtgccaccagcaacagtgtccgccgctaccgcaggaccaggacccggattcggcttcgcctccaaaacaaagaagaagcattttgtacaacagaaggttaaagtgtttagagcagcagatcctctggtaggggtttttctatggggcgttgcacatagcataaatgagctgtctcaggtcccccctcccgtcatgctccttccagatgactttaaggccagcagcaagatcaaagtgaacaaccatctgttccacagagaaaatctcccatcccacttcaaatttaaagagtattgccctcaggtgtttcggaatctgcgggacagattcggtattgacgaccaagattatctcgtgtctctcacccggaatccaccgagcgaaagtgaggggtcagacggacggtttctgatcagttatgaccgcaccctagtgattaaggaagtcagctctgaagacatagccgatatgcattccaatttatcgaactatcatcagtacatcgttaaatgtcacggaaacacactccttccacagtttctcggtatgtaccgcgtttctgttgacaacgaagatagttacatgttggtaatgcggaacatgttctcccacaggttgcccgtgcatcgcaagtatgacctgaaagggtctttggtgagccgcgagcctgctatcagaaaacggctgaaaaactgcccgcctctacgtatctggacattttcgacccgaaccagaaagtatattttggtgaaaaggcgaaggaaatatttttggagaagttag

SEQ ID NO: 216785 - DNA, 1266 bp, Artificial Sequence
  derived and/or modified sequence
atggcttcctcgtctgtcccccctgcgaccgtttccgccgcaacagcgggacccggtcctgggttcgggttcgcatcaaagacaaagaaaaaacacttcgtccaacagaaggtgaaagttttccgagctgctgacccactggtcggcgtgttcttgtggggcgtagcacactcgatcaatgagttgagccaggttcctcctccagtgatgttgctccccgacgacttcaaggcgtcttcaaaaatcaaggtcaacaatcatctgttccacagggaaaacctcccaagtcacttcaagttcaaggagtactgccctcaggtgtttagaaacctgcgcgatcgctttggaatagatgatcaggattatctggtgagcctgacaagaaacccaccatcagagtccgaaggcagcgacggcagattccttatcagctacgacaggactctggtaattaaggaagtctcttcagaggatatcgccgatatgcactctaacctgtcaaactatcatcagtatattgtcaagtgtcacggcaacacgctgctcccccagttccttggaatgtatcgtgtgtccgttgacaatgaagattcctatatgcttgttatgcggaacatgtttagtcataggctgcccgtacatcggaagtacgatctgaagggatctctcgtgtcaagagaggcctcagataaagagaaggtcaaggagcttcctacactcaaagacatggacttcttgaataaaaaccagaaggtatatattggagaggaggaaaagaagatcttcctcgagaagttgaagagagatgttgagtttctcgttcagctgaaaatcatggactactccctgctgctcgggatacacgatatcattagaggcagcgaaccagaggaagaggcacccgtaagagaggacgaaagtgaggtagatggcgattgctcactgacaggccctcctgcactggtggggtcatacggaacttctcccgagggcattggtggctatatccatagtcatcggccattgggcccaggggagttcgagtcatttatcgacgtctacgctatccggtccgctgaaggagctccgcaaaaggaggtttacttcatgggcctgatcgacatcctcacacaatacgacgcgaagaagaaggccgcacacgctgctaagacggttaagcatggagccggtgcggaaatctccacggtgcaccccgagcaatacgccaagcgtttcttagactttatcaccaacattttcgcttag

SEQ ID NO: 216786 - DNA, 2872 bp, Artificial Sequence
  derived and/or modified sequence
agcagcgcaggtgagcgccgcttccggggtcgggcgcctggatagctgccggctccggcttccacttggtcggttgcgcgggagactatggcgtcctcctcggtcccaccagccacggtatcggcggcgacagcaggccccggcccaggtttcggcttcgcctccaagaccaagaagaagcatttcgtgcagcagaaggtgaaggtgttccgggcggccgacccgctggtgggtgtgttcctgtggggcgtagcccactcgatcaatgagctcagccaggtgcctcccccggtgatgctgctgccagatgactttaaggccagctccaagatcaaggtcaacaatcaccttttccacagggaaaatctgcccagtcatttcaagttcaaggagtattgtccccaggtcttcaggaacctccgtgatcgatttggcattgatgaccaagattacttggtgtcccttacccgaaacccccccagcgaaagtgaaggcagtgatggtcgcttccttatctcctacgatcggactctggtcatcaaagaagtatccagtgaggacattgctgacatgcatagcaacctctccaactatcaccagtacattgtgaagtgccatggcaacacgcttctgccccagttcctggggatgtaccgagtcagtgtggacaacgaagacagctacatgcttgtgatgcgcaatatgtttagccaccgtcttcctgtgcacaggaagtatgacctcaagggttccctagtgtcccgggaaccagcgataaggaaaaggttaaagaattgcccacccttaaggatatggactttctcaacaagaaccagaaagtatatattggtgaagaggagaagaaaatatttctggagaagctgaagagagatgtggagtttctagtgcagctgaagatcatggactacagccttctgctaggcatccacgacatcattcggggctctgaaccagaggaggaagcgcccgtgcgggaggatgagtcagaggtggatggggactgcagcctgactggacctcctgctcttgtgggctcctatggcacctccccagagggtatcggaggctacatccattcccatcggcccctgggcccaggagagtttgagtccttcattgatgtctatgccatccggagtgctgaaggagccccccagaaggaggtctacttcatgggcctcattgatatccttacacagtatgatgctaagaagaaagcagctcatgcagccaaaactgtcaagcatggggctggggcagagatctctactgtccatccggagcagtatgctaagcgattcctggattttattaccaacatctttgcctaagagactgcctggttctctctgatgttcaaggagctaggggaagggggttgtttgccttcttcaggacctgactggacagatggacctggctcaagcaactactctggatgcactttgctgtgtgggatgaactaaaagtgtctgaattttgctgataactttataaaactcactatggcatgcttccctcctggtgggccctaggatggatgacactcaagatactacagatgtgggtgcaggcatgcacacacacgatggaatatggccattcctacacaggtggggtagagagtgggtcagcagcctggcacctcacagaggtgggacctaagaggactcatgattatgcagagaattggattgggtctctgtcatagattgagtaatctcttcccttacctcaattccatctccacccatctctacatctgggcacagcaacccagagatggccaaaagcattcaagcctgggggaagatgtttgactattgctgctcttcaccagaacctcacacctctcctgggactggaacccttcagtgggtgtgtggccagttttggaggctggaatgatgggccagggtgtaggattcattctccatgtaaagtttcctttcatcctgcctagccatccccaaggtttatttccagaagaaaggaatatctctacttggatcaattctggtcatttcaagaggatggaggcctcaagtgtgggaacttcccctactccctggatgtgtgtacctagcacacttccttctcccacccctttttccagttggatttgtttttctgttctcttctgtcctgtcttatactgcaactgtgtctcctaggggacagatggccttctttgtcatcttcactctccacccccagagaggagtcagagccataactcaatcactcagcccctccaaagatagttgatgtgtgataatctcataatgttgagaaccctgatgagatacattgtcttcctctccctacaatgcctctggggccaaggcacccattcttcttgctatcctccatcccccttgaggcttccactttttttttttttagacataaagctgggcatcagcaactggcctgtggtgatgcaaagctgctttgctctgtatctggctggactgatctgtctcacaagaagccatgaggccatagggagaagctccctctccccttcatcttctgctccaaaggtggtagcaagaggagtacccagttaggggttggagcccccatataacatcttcctgtcagaagactgatggatctttttcattccaaccatctccctttcccccgatgaatgcaataaaactctgtgacaccagcaaccattgctctttagaaatgggttttctgatcatatggctgatgtgttatgggcagtatggatgtcttcatttgttgcttctgtttttcatcttttttgttttattaataaaaatttatgtatttgctcctgttactataataatacagggaataaattattcaatcc

SEQ ID NO: 216787 - DNA, 2873 bp, Artificial Sequence
  derived and/or modified sequence
agcagcgcaggtgagcgccgcttccggggtcgggcgcctggatagctgccggctccggcttccacttggtcggttgcgcgggagactatggcgtcctcctcggtcccaccagccacggtatcggcggcgacagcaggccccggcccaggtttcggcttcgcctccaagaccaagaagaagcatttcgtgcagcagaaggtgaaggtgttccgggcggccgacccgctggtgggtgtgttcctgtggggcgtagcccactcgatcaatgagctcagccaggtgcctcccccggtgatgctgctgccagatgactttaaggccagctccaagatcaaggtcaacaatcaccttttccacagggaaaatctgcccagtcatttcaagttcaaggagtattgtccccaggtcttcaggaacctccgtgatcgatttggcattgatgaccaagattacttggtgtcccttacccgaaacccccccagcgaaagtgaaggcagtgatggtcgcttccttatctcctacgatcggactctggtcatcaaagaagtatccagtgaggacattgctgacatgcatagcaacctctccaactatcaccagtacattgtgaagtgccatggcaacacgcttctgccccagttcctggggatgtaccgagtcagtgtggacaacgaagacagctacatgcttgtgatgcgcaatatgtttagccaccgtcttcctgtgcacaggaagtatgacctcaagggttccctagtgtcccgggaagccagcgataaggaaaaggttaaagaattgcccacccttaaggatatggactttctcaacaagaaccagaaagtatatattggtgaagaggagaagaaaatatttctggagaagctgaagagagatgtggagtttctagtgcagctgaagatcatggactacagccttctgctaggcatccacgacatcattcggggctctgaaccagaggaggaagcgcccgtgcgggaggatgagtcagaggtggatggggactgcagcctgactggacctcctgctcttgtgggctcctatggcacctccccagagggtatcggaggctacatccattcccatcggcccctgggcccaggagagtttgagtccttcattgatgtctatgccatccggagtgctgaaggagccccccagaaggaggtctacttcatgggcctcattgatatccttacacagtatgatgctaagaagaaagcagctcatgcagccaaaactgtcaagcatggggctggggcagagatctctactgtccatccggagcagtatgctaagcgattcctggattttattaccaacatctttgcctaagagactgcctggttctctctgatgttcaaggagctaggggaagggggttgtttgccttcttcaggacctgactggacagatggacctggctcaagcaactactctggatgcactttgctgtgtgggatgaactaaaagtgtctgaattttgctgataactttataaaactcactatggcatgcttccctcctggtgggccctaggatggatgacactcaagatactacagatgtgggtgcaggcatgcacacacacgatggaatatggccattcctacacaggtggggtagagagtgggtcagcagcctggcacctcacagaggtgggacctaagaggactcatgattatgcagagaattggattgggtctctgtcatagattgagtaatctcttcccttacctcaattccatctccacccatctctacatctgggcacagcaacccagagatggccaaaagcattcaagcctgggggaagatgtttgactattgctgctcttcaccagaacctcacacctctcctgggactggaacccttcagtgggtgtgtggccagttttggaggctggaatgatgggccagggtgtaggattcattctccatgtaaagtttcctttcatcctgcctagccatccccaaggtttatttccagaagaaaggaatatctctacttggatcaattctggtcatttcaagaggatggaggcctcaagtgtgggaacttcccctactccctggatgtgtgtacctagcacacttccttctcccacccctttttccagttggatttgtttttctgttctcttctgtcctgtcttatactgcaactgtgtctcctaggggacagatggccttctttgtcatcttcactctccacccccagagaggagtcagagccataactcaatcactcagcccctccaaagatagttgatgtgtgataatctcataatgttgagaaccctgatgagatacattgtcttcctctccctacaatgcctctggggccaaggcacccattcttcttgctatcctccatcccccttgaggcttccactttttttttttttagacataaagctgggcatcagcaactggcctgtggtgatgcaaagctgctttgctctgtatctggctggactgatctgtctcacaagaagccatgaggccatagggagaagctccctctccccttcatcttctgctccaaaggtggtagcaagaggagtacccagttaggggttggagcccccatataacatcttcctgtcagaagactgatggatctttttcattccaaccatctccctttcccccgatgaatgcaataaaactctgtgacaccagcaaccattgctctttagaaatgggttttctgatcatatggctgatgtgttatgggcagtatggatgtcttcatttgttgcttctgtttttcatcttttttgttttattaataaaaatttatgtatttgctcctgttactataataatacagggaataaattattcaatcc

SEQ ID NO: 216788 - protein, 760 aa, Artificial Sequence
  derived and/or modified sequence
MLSDDHVNEIIIQVENVSSGVQSHPSSNQIFQEKVLLDSSINMVLSISDIDVIDSQTVSKRNDQKGNQVLRFSTSLNESMSQTLHSLECMGIDTPGSSHETVQGQKLIASLIPMTSRDRIKAIRNQPRTMEEKRNLRKIVDKEKSKQTHRILQLNCCIQCLNSISRAYRRSKNSLSEILNSISLWQKTLKIIGGKFGTSVLSYFNFLRWLLKFNIFSFILNFSFIIIPQFTVAKKNTLQFTGLEFFTGVGYFRDTVMYYGFYTNSTIQHGNSGASYNMQLAYIFTIGACLTTCFFSLLFSMAKYFRNNFINPHIYSGGITKLIFCWDFTVTHEKAVKLKQKNLSTEIRENLSELRQENSKLTFNQLLTRFSAYMVAWVVSTGVAIACCAAVYYLAEYNLEFLKTHSNPGAVLLLPFVVSCINLAVPCIYSMFRLVERYEMPRHEVYVLLIRNIFLKISIIGILCYYWLNTVALSGEECWETLIGQDIYRLLLMDFVFSLVNSFLGEFLRRIIGMQLITSLGLQEFDIARNVLELIYAQTLVWIGIFFCPLLPFIQMIMLFIMFYSKNISLMMNFQPPSKAWRASQMMTFFIFLLFFPSFTGVLCTLAITIWRLKPSADCGPFRGLPLFIHSIYSWIDTLSTRPGYLWVVWIYRNLIGSVHFFFILTLIVLIITYLYWQITEGRKIMIRLLHEQIINEGKDKMFLIEKLIKLQDMEKKANPSSLVLERREVEQQGFLHLGEHDGSLDLRSRRSVQEGNPRA

SEQ ID NO: 216789 - protein, 700 aa, Artificial Sequence
  derived and/or modified sequence
MLSDDHVNEIIIQKLIASLIPMTSRDRIKAIRNQPRTMEEKRNLSRGGLTITTEDEGRAKAHLTWWKIVDKEKSKQTHRILQLNCCIQCLNSISRAYRRSKNSLSEILNSISLWQKTLKIIGGKFGTSVLSYFNFLRWLLKFNIFSFILNFSFIIIPQFTVAKKNTLQFTGLEFFTGVGYFRDTVMYYGFYTNSTIQHGNSGASYNMQLAYIFTIGACLTTCFFSLLFSMAKYFRNNFINPHIYSGGITKLIFCWDFTVTHEKAVKLKQKNLSTEIRENLSELRQENSKLTFNQLLTRFSAYMVAWVVSTGVAIACCAAVYYLAEYNLEFLKTHSNPGAVLLLPFVVSCINLAVPCIYSMFRLVERYEMPRHEVYVLLIRNIFLKISIIGILCYYWLNTVALSGEECWETLIGQDIYRLLLMDFVFSLVNSFLGEFLRRIIGMQLITSLGLQEFDIARNVLELIYAQTLVWIGIFFCPLLPFIQMIMLFIMFYSKNISLMMNFQPPSKAWRASQMMTFFIFLLFFPSFTGVLCTLAITIWRLKPSADCGPFRGLPLFIHSIYSWIDTLSTRPGYLWVVWIYRNLIGSVHFFFILTLIVLIITYLYWQITEGRKIMIRLLHEQIINEGKDKMFLIEKLIKLQDMEKKANPSSLVLERREVEQQGFCIWGNMMAVLTCDLEDQFKKVIQGPDDSFGNQTPIK

SEQ ID NO: 216790 - DNA, 2103 bp, Artificial Sequence
  derived and/or modified sequence
atgctgagcgacgaccacgtgaacgagatcatcatccagaagctgatcgccagcctgatccccatgaccagcagagacagaatcaaggccatcagaaaccagcccagaaccatggaggagaagagaaacctgagcagaggcggcctgaccatcaccaccgaggacgagggcagagccaaggcccacctgacctggtggaagatcgtggacaaggagaagagcaagcagacccacagaatcctgcagctgaactgctgcatccagtgcctgaacagcatcagcagagcctacagaagaagcaagaacagcctgagcgagatcctgaacagcatcagcctgtggcagaagaccctgaagatcatcggcggcaagttcggcaccagcgtgctgagctacttcaacttcctgagatggctgctgaagttcaacatcttcagcttcatcctgaacttcagcttcatcatcatcccccagttcaccgtggccaagaagaacaccctgcagttcaccggcctggagttcttcaccggcgtgggctacttcagagacaccgtgatgtactacggcttctacaccaacagcaccatccagcacggcaacagcggcgccagctacaacatgcagctggcctacatcttcaccatcggcgcctgcctgaccacctgcttcttcagcctgctgttcagcatggccaagtacttcagaaacaacttcatcaacccccacatctacagcggcggcatcaccaagctgatcttctgctgggacttcaccgtgacccacgagaaggccgtgaagctgaagcagaagaacctgagcaccgagatcagagagaacctgagcgagctgagacaggagaacagcaagctgaccttcaaccagctgctgaccagattcagcgcctacatggtggcctgggtggtgagcaccggcgtggccatcgcctgctgcgccgccgtgtactacctggccgagtacaacctggagttcctgaagacccacagcaaccccggcgccgtgctgctgctgcccttcgtggtgagctgcatcaacctggccgtgccctgcatctacagcatgttcagactggtggagagatacgagatgcccagacacgaggtgtacgtgctgctgatcagaaacatcttcctgaagatcagcatcatcggcatcctgtgctactactggctgaacaccgtggccctgagcggcgaggagtgctgggagaccctgatcggccaggacatctacagactgctgctgatggacttcgtgttcagcctggtgaacagcttcctgggcgagttcctgagaagaatcatcggcatgcagctgatcaccagcctgggcctgcaggagttcgacatcgccagaaacgtgctggagctgatctacgcccagaccctggtgtggatcggcatcttcttctgccccctgctgcccttcatccagatgatcatgctgttcatcatgttctacagcaagaacatcagcctgatgatgaacttccagccccccagcaaggcctggagagccagccagatgatgaccttcttcatcttcctgctgttcttccccagcttcaccggcgtgctgtgcaccctggccatcaccatctggagactgaagcccagcgccgactgcggccccttcagaggcctgcccctgttcatccacagcatctacagctggatcgacaccctgagcaccagacccggctacctgtgggtggtgtggatctacagaaacctgatcggcagcgtgcacttcttcttcatcctgaccctgatcgtgctgatcatcacctacctgtactggcagatcaccgagggcagaaagatcatgatcagactgctgcacgagcagatcatcaacgagggcaaggacaagatgttcctgatcgagaagctgatcaagctgcaggacatggagaagaaggccaaccccagcagcctggtgctggagagaagagaggtggagcagcagggcttctgcatctggggcaacatgatggccgtgctgacctgcgacctggaggaccagttcaagaaggtgatccagggccccgacgacagcttcggcaaccagacccccatcaagtag

SEQ ID NO: 216791 - DNA, 2103 bp, Artificial Sequence
  derived and/or modified sequence
atgctaagtgacgatcacgttaacgagatcatcatccaaaagctaattgcctcccttattccaatgaccagccgggatcgaatcaaagcaataagaaatcagcccagaacaatggaggagaaacggaatctcagccgcggaggcctgaccatcacaaccgaagatgagggacgtgccaaagcgcaccttacttggtggaaaattgtcgacaaggaaaaatcgaaacagacccatcgtatcttgcagttaaactgctgcattcagtgcctcaacagtatctccagagcttacagaaggtcgaagaattcactgagcgaaatcctgaatagcatatctctatggcaaaagacgcttaagataatcggaggaaaattcggcacatctgtgctcagttacttcaatttcctcaggtggttgctgaaattcaacatcttctcattcattctaaactttagcttcattatcatacctcagttcaccgtcgcaaaaaaaaatactctgcagtttacaggcctggagttcttcacgggagtgggttacttccgcgacaccgtgatgtactatggattttatacaaatagcaccattcaacacggtaatagtggagcctcctataatatgcaactagcctacatttttacaatcggtgcatgtttgaccacgtgcttcttcagtctactgttcagtatggccaaatactttaggaacaattttattaacccgcatatttactctggtgggatcactaaattaatattctgctgggatttcactgtgacgcatgaaaaagccgttaaactcaagcaaaagaacttaagcacggaaatcagagagaatctctccgaactgcggcaggaaaacagcaagttgacctttaaccagctgctgacccgctttagcgcctatatggtggcctgggtcgtgtccacgggggttgccattgcatgttgtgccgcagtgtactatcttgccgagtataatttagaatttcttaaaactcactcaaacccgggtgccgttctcctcctccccttcgttgtctcttgtatcaatctggcagtcccatgtatctacagtatgttcaggctcgttgaacggtatgaaatgccccgccacgaggtgtatgtactgctaatcagaaatattttcctgaagatttctatcattgggatcctctgctattattggttaaacaccgtggctctttcgggtgaagagtgttgggagacactgatcggccaggatatttatcggctgctgctcatggactttgttttttctctggtgaactcattcttgggagagtttctgagaaggatcatcggcatgcaactcatcacgagtctgggactccaagagtttgacattgcccgcaacgtgctggagctaatctatgctcagaccctagtctggatcggaatatttttctgtccactacttcccttcatccagatgattatgttattcataatgttctactcaaagaatatctccctcatgatgaatttccagccccccagtaaggcatggagggcttcacaaatgatgacatttttcatcttcttactgttctttccttctttcaccggtgtgttatgcactctcgctattaccatttggagattaaagccaagcgctgattgtggtcctttccgtggactacccctcttcatccactccatttactcctggattgacacgctcagcacccgacccgggtatctctgggtggtgtggatataccggaatctgatcgggtctgtacactttttctttatccttacattgatcgttctgatcatcacttacttgtattggcagattacagaagggcgtaagataatgattcgtctactgcatgaacaaattataaatgaaggaaaggataagatgtttctaatcgagaaactgatcaaattgcaggatatggaaaaaaaagccaatccaagcagccttgtgctggagagaagggaagttgagcagcagggattctgcatttggggcaatatgatggcagtcctgacctgtgaccttgaggaccagtttaagaaggtgattcaaggtcctgatgactcttttgggaaccagactcccatcaaatag

SEQ ID NO: 216792 - DNA, 2103 bp, Artificial Sequence
  derived and/or modified sequence
atgctgagtgatgaccacgtgaatgagatcatcatccagaagctgattgccagcctcatccccatgaccagccgggaccgcatcaaggccatccggaaccagcccaggaccatggaggagaagaggaacctgagcagaggaggcctgaccatcaccacagaagatgagggccgggccaaggcccacctgacctggtggaagatcgtggacaaggagaagagcaagcagacccaccgcatcctgcagctgaactgctgcatccagtgcctgaacagcatcagccgggcctaccgccgcagcaagaacagcctgtctgagatcctgaacagcatcagcctgtggcagaagaccctgaagatcattggaggcaagtttggcacctctgtgctgagctacttcaacttcctgcgctggctgctgaagttcaacatcttctccttcatcctgaacttctccttcatcatcatcccccagttcaccgtggccaagaagaacaccctgcagttcaccggcctggagttcttcaccggggtgggctacttccgggacacagtgatgtactacggcttctacaccaacagcaccatccagcacggcaacagcggggccagctacaacatgcagctggcctacatcttcaccatcggggcctgcctgaccacctgcttcttcagcctgctcttctccatggccaagtacttcaggaacaacttcatcaacccccacatctacagcggcggcatcaccaagctgatcttctgctgggacttcaccgtgacccatgagaaggctgtgaagctgaagcagaagaacctgagcacagagatccgggagaacctgtctgagctgcggcaggagaacagcaagctgaccttcaaccagctgctgacccgcttcagcgcctacatggtggcctgggtggtgtccactggagtggccatcgcctgctgtgccgctgtgtactacctggccgagtacaacctggagttcctgaagacccacagcaaccctggagctgtgctgctgctgccctttgtggtgtcctgcatcaacctggccgtgccctgcatctacagcatgttccggctggtggagagatatgagatgcccaggcatgaggtgtatgtgctgctgatccggaacatcttcctgaagatcagcatcatcggcatcctgtgctactactggctgaacacagtggccctgtctggagaggagtgctgggagaccctcatcggccaggacatctaccgcctgctgctgatggactttgtgttcagcctggtgaacagcttcctgggggagttcctgcggcgcatcatcggcatgcagctgatcaccagcctgggcctgcaggagtttgacatcgccagaaatgtgctggagctgatctatgcccagaccctggtgtggattggcatcttcttctgccccctgctgcccttcatccagatgatcatgctgttcatcatgttctacagcaagaacatcagcctgatgatgaacttccagccccccagcaaggcctggagggccagccagatgatgaccttcttcatcttcctgctcttcttccccagcttcaccggggtgctgtgcaccctggccatcaccatctggaggctgaagcccagcgctgactgtggccccttccggggcctgcccctcttcatccacagcatctacagctggattgacaccctgagcacccggcccggctacctgtgggtggtgtggatctacagaaacctgattggctctgtgcacttcttcttcatcctgaccctgattgtgctgatcatcacctacctgtactggcagatcacagagggcaggaagatcatgatccggctgctgcacgagcagatcatcaatgaaggcaaggacaagatgttcctgattgagaagctgatcaagctgcaggacatggagaagaaggccaaccccagcagcctggtgctggagcggcgggaggtggagcagcagggcttctgcatctggggcaacatgatggctgtgctgacctgtgacctggaggaccagttcaagaaggtgatccagggcccagatgacagctttggaaaccagacccccatcaagtag

SEQ ID NO: 216793 - DNA, 2103 bp, Artificial Sequence
  derived and/or modified sequence
atgctgagcgacgaccacgtgaacgagatcatcatccagaagctgatcgctagcttaatcccaatgacctcccgcgatagaataaaagctatcaggaatcagccccgcacaatggaggaaaaaaggaacctgtccagggggggcctgactatcaccaccgaggacgagggtagggccaaagcacatttaacttggtggaaaatcgtggataaggagaaaagtaaacagactcacagaattctgcaactaaactgctgcatacagtgcctgaatagcatcagtagagcataccggagatcgaagaactcgctatctgagatactgaactctataagtctgtggcagaagacattgaaaattatcggcggaaaatttggcacttccgtcttgagttattttaactttctccgctggttgcttaaattcaatatctttagcttcatcctcaacttcagtttcattatcatcccacagttcacagttgccaaaaagaacacgctacagtttacgggtctagaattctttacaggcgtaggctactttagagatactgtaatgtactacggtttttacaccaatagtactatacagcatggcaactctggggcaagttataatatgcagctggcttatatatttacgatcggcgcttgtctgacaacctgcttcttttcactgctcttttcgatggcaaaatatttccgaaacaacttcataaacccacatatctatagtggcggcatcaccaagttaatattttgctgggattttaccgtcacccatgagaaggccgtgaagctcaagcagaaaaatctcagtacagagattagagaaaatttgtctgagttgcgtcaggagaacagcaaattgacatttaaccagttgcttacgcgttttagtgcgtatatggtcgcctgggtcgtgtctaccggggtggctatcgcatgttgcgccgcagtctactacctggctgaatacaatttggagttcttaaaaacacactccaatcccggtgccgtcctgctcctgccttttgtggtgtcatgcatcaatctggccgtcccttgcatctacagcatgttcaggctggtagagagatatgagatgccacgccatgaggtctacgtgctgctcatccgtaacatatttctgaagatcagtatcatcgggatcctgtgctactactggcttaatactgtggctctgtccggggaggaatgctgggaaaccctcattgggcaggacatataccgactattgctcatggattttgttttctcactcgtgaatagctttcttggggagtttctgcgccggattataggcatgcaactcataacatcactggggctgcaagaatttgatatcgctcgcaacgtcctcgaactgatttatgcccagacattggtttggatcggcatattcttctgtcctctgctgcctttcatccagatgattatgctgtttattatgttttattccaaaaacatctctctcatgatgaatttccagcctccatcgaaggcctggcgtgcttcccagatgatgacattctttatcttcctgcttttctttccctctttcaccggcgttttgtgcaccttggcgattacgatctggagactgaagccgagcgctgattgtggccctttcagagggcttcctctgttcattcactctatctacagctggatagacaccctgtccacacgtccaggctacctgtgggtggtatggatctatagaaacttgataggcagcgtccatttcttcttcatcctcacccttatcgttctgattatcacatacctgtactggcagattaccgaaggcagaaaaattatgatcagattgctgcacgagcagattataaacgagggtaaggataagatgttcctaatcgagaaactgatcaagctgcaggacatggaaaaaaaagctaatccttcgagtctcgtgctcgaacgccgcgaggtcgagcagcagggcttctgtatttgggggaacatgatggctgtattaacctgtgacctcgaagatcagtttaaaaaagtaattcaaggcccagatgactcatttggcaaccaaacgccaattaagtag

SEQ ID NO: 216794 - DNA, 2103 bp, Artificial Sequence
  derived and/or modified sequence
atgctgagcgacgatcacgtgaatgagatcataatacagaaactaatcgcttccctcattccaatgacatctagagatcggattaaggctattaggaaccagccacgaaccatggaagagaaaaggaacctctcgcgcggaggccttaccattactacagaagacgagggtagagcaaaagcgcatttgacttggtggaagattgttgacaaagaaaaatctaagcaaacacataggatcctccagctcaattgctgtatacagtgtttaaattcaatttcaagagcatatcggaggagcaagaattcgctgtcagagatcctgaatagcatctccttgtggcagaagacactcaagatcatcggcggtaagtttgggacaagcgtcctgtcctactttaatttcctgcgctggctcctcaaatttaacatcttctctttcatcttgaatttctcttttattatcatacctcaattcactgtagctaagaaaaacaccctccaatttactggactggaattcttcacgggcgtgggatacttccgcgatactgtcatgtactatggtttctacacaaattcaaccatccagcacgggaactccggcgctagttataacatgcagctcgcatatattttcacaattggtgcatgcctaacgacatgtttctttagcctgctcttttctatggctaaatacttccgcaataatttcattaatccacatatctattccggtggcatcacaaagctgatcttttgctgggattttactgttacccatgaaaaggcagtcaagctgaaacagaaaaacttgagtaccgaaatcagggagaatctgagtgaactccgccaggagaattccaaattaacatttaatcagctgctgacccgattctcggcatatatggtggcctgggtggttagcacaggtgtggcaattgcttgctgtgctgctgtctactacctcgccgagtataatctggagttcctgaaaactcactcaaaccctggggcagtgctgttgctgccattcgtggtgtcttgtataaatctcgcagtaccttgcatttattcgatgtttaggctggttgagagatacgaaatgcccaggcacgaagtgtatgtcctcctgatccggaatatttttctcaaaatctctattatcggcatcctctgctattattggctaaacactgtcgcactaagcggagaggagtgttgggaaaccctaataggacaggacatatataggctgctccttatggatttcgtcttctccctggtaaactccttccttggtgagttcctgcgccgtatcatcggcatgcaactgattacgtcgctggggttacaggaattcgacatcgccaggaacgtgctggagctaatatatgctcaaaccttggtttggattgggatctttttttgccccctgcttcccttcattcagatgatcatgctgttcatcatgttttactcgaaaaacatttcgctgatgatgaactttcaaccaccgagcaaggcctggcgtgcctcccagatgatgacgttcttcattttcctactcttctttcctagctttacaggcgtgctctgcactcttgcaattacaatttggcgactcaaaccttctgctgactgcggccctttcagggggctgccactctttatccactcaatctattcttggattgatacactgagcacaaggccagggtatctgtgggtcgtttggatctaccgcaacctgatcgggagcgtccacttctttttcattttaacgttgatcgtcctcattattacttacctgtactggcagatcaccgaggggagaaagataatgatcaggttactgcacgaacagatcatcaatgagggcaaagacaagatgttcctgatcgaaaagctcattaagctccaagatatggaaaagaaggctaatccatccagcctggtgctggaacggagggaggtggagcagcagggattttgcatttgggggaatatgatggctgtgctgacctgcgatttagaggatcagtttaaaaaagtgatacaggggccagacgatagtttcggtaaccaaacccccatcaagtag

SEQ ID NO: 216795 - DNA, 3687 bp, Artificial Sequence
  derived and/or modified sequence
acagaattctctgcaggaaaacactccttctcctgagaaaactcctcaggggttagatgcagggagttatgttgtgatttgtgtaggggtggctttggtgagctcatcctggcattttaaaaataatgtgaatggtgtatccctttgtgatcatcatcactttttccctgcgagtcccaatcaatgcgggtgtgactgctgtatgaagtctcaggaagcccaccccagtggagaagaaggcttgcaggaggcaggagatgctgtccgatgaccacgtgaatgaaatcatcatacaggttgagaatgtttcctctggggtccaaagccacccatcctcaaatcagatttttcaagaaaaggtgctgctagactcaagcatcaacatggttttgtcaatatctgacattgatgtgatagactctcagacagtcagcaaaaggaatgaccaaaagggtaaccaggtgctgcggttttcaacatctttgaatgagtcgatgtctcagacccttcatagcctagaatgcatgggcatagacactcctggttcttcacatgaaactgttcaaggacagaagttaatcgcatcccttatacccatgacatccagagacagaattaaagccatcaggaaccagccaaggaccatggaagagaaaaggaaccttaggaaaatagttgacaaagaaaaaagcaaacagacccatcgtatccttcagctcaattgctgtattcagtgtctgaactccatttcccgggcttatcggagatccaagaacagcctgtcggaaattctgaattccatcagcctgtggcagaagacgctgaagatcattggaggcaagtttggaaccagcgtcctctcctatttcaactttctgagatggcttttgaagttcaacattttctcattcatcctgaacttcagcttcatcataatccctcagtttaccgtggccaaaaagaacaccctccagttcactgggctggagtttttcactggggtgggttattttagggacacagtgatgtactatggcttttacaccaattccaccatccagcacgggaacagcggggcatcctacaacatgcagctggcctacatcttcacaatcggagcatgcttgaccacctgcttcttcagtttgctgttcagcatggccaagtatttccggaacaacttcattaatccccacatttactccggagggatcaccaagctgatcttttgctgggacttcactgtcactcatgaaaaagctgtgaagctaaaacagaagaatcttagcactgagataagggagaacctgtcagagctccgtcaggagaattccaagttgacgttcaatcagctgctgacccgcttctctgcctacatggtagcctgggttgtctctacaggagtggccatagcctgctgtgcagccgtttattacctggctgagtacaacttagagttcctgaagacacacagtaaccctggggcggtgctgttactgcctttcgttgtgtcctgcattaatctggccgtgccatgcatctactccatgttcaggcttgtggagaggtacgagatgccacggcacgaagtctacgttctcctgatccgaaacatctttttgaaaatatcaatcattggcattctttgttactattggctcaacaccgtggccctgtctggtgaagagtgttgggaaaccctcattggccaggacatctaccggctccttctgatggattttgtgttctctttagtcaattccttcctgggggagtttctgaggagaatcattgggatgcaactgatcacaagtcttggccttcaggagtttgacattgccaggaacgttctagaactgatctatgcacaaactctggtgtggattggcatcttcttctgccccctgctgccctttatccaaatgattatgcttttcatcatgttctactccaaaaatatcagcctgatgatgaatttccagcctccgagcaaagcctggcgggcctcacagatgatgactttcttcatcttcttgctctttttcccatccttcaccggggtcttgtgcaccctggccatcaccatctggagattgaagccttcagctgactgtggcccttttcgaggtctgcctctcttcattcactccatctacagctggatcgacaccctaagtacacggcctggctacctgtgggttgtttggatctatcggaacctcattggaagtgtgcacttctttttcatcctcaccctcattgtgctaatcatcacctatctttactggcagatcacagagggaaggaagattatgataaggctgctccatgagcagatcattaatgagggcaaagataaaatgttcctgatagaaaaattgatcaagctgcaggatatggagaagaaagcaaaccccagctcacttgttctggaaaggagagaggtggagcaacaaggctttttgcatttgggggaacatgatggcagtcttgacttgcgatctagaagatcagttcaagaaggtaatccaagggcctgatgactcttttggtaaccagacaccaatcaaataaggggaggagacgaaaatggaatgatttcttccatgccacctgtgcctttaggaactgcccagaagaaaatccaaggctttagccaggagcggaaactgactaccatgtaattatcaaagtaaaattgggcattccatgctatttttaatacctggattgctgatttttcaagacaaaatacttggggttttccaataaagattgttgtaatattgaaatgagcctacaaaaacctaggaagagataactagggaataatgtatattatcttcaagaagtgtgtgcaggaatgattggttcttagaaatctctcctgccagacttcccagacctggcaaaggtttagaaactgttgctaagaaaagtggtccatcctgaataaacatgtaatactccagcagggatatgaagcctctgaattgtagaacctgcatttatttgtgactttgaactaaagacatcccccatgtcccaaaggtggaatacaaccagaggtctcatctctgaactttcttgcgtactgattacatgagtctttggagtcggggatggaggaggttctgcccctgtgaggtgttatacatgaccatcaaagtcctacgtcaagctagctttgcagtggcagtaccgtagccaatgagatttatccgagacgcgattattgctaattggaaattttcccaataccccaccgtgatgacttgaaatataatcagcgctggcaatttttgacagtctctacggagactgaataagaaaaaagaaaagaaaagaaattagctgggtgcgatggcttatgcctgtaatcccggcactttgggaggctgaggcaagcggatcacttaatgtcaggagttcaagaccagcctggccaacatggtgaaaccccgtctctactaaaaataaaaaaactagctgggcgtggtggtacatgcctataatcccagctactcgggaggctgaggcaggagaattgcttgaacctgggaggcagaggttgcagtgaggcgagattgtaccactgcattccagcctgggcaacagtgagactctgcctcaaaaaaataaataaataaataaataaagtaaattaaaagtcttattcaaaccaaa

SEQ ID NO: 216796 - DNA, 2433 bp, Artificial Sequence
  derived and/or modified sequence
tatgttgtgatttgtgtaggggtggctttggtgagctcatcctggcattttaaaaataatgtgaatggtgtatccctttgtgatcatcatcactttttccctgcgagtcccaatcaatgcgggtgtgactgctgtatgaagtctcaggaagcccaccccagtggagaagaaggcttgcaggaggcaggagatgctgtccgatgaccacgtgaatgaaatcatcatacagaagttaatcgcatcccttatacccatgacatccagagacagaattaaagccatcaggaaccagccaaggaccatggaagagaaaaggaaccttagcaggggaggcctcacaatcacgacagaggacgaaggaagagcaaaggcacatcttacgtggtggaaaatagttgacaaagaaaaaagcaaacagacccatcgtatccttcagctcaattgctgtattcagtgtctgaactccatttcccgggcttatcggagatccaagaacagcctgtcggaaattctgaattccatcagcctgtggcagaagacgctgaagatcattggaggcaagtttggaaccagcgtcctctcctatttcaactttctgagatggcttttgaagttcaacattttctcattcatcctgaacttcagcttcatcataatccctcagtttaccgtggccaaaaagaacaccctccagttcactgggctggagtttttcactggggtgggttattttagggacacagtgatgtactatggcttttacaccaattccaccatccagcacgggaacagcggggcatcctacaacatgcagctggcctacatcttcacaatcggagcatgcttgaccacctgcttcttcagtttgctgttcagcatggccaagtatttccggaacaacttcattaatccccacatttactccggagggatcaccaagctgatcttttgctgggacttcactgtcactcatgaaaaagctgtgaagctaaaacagaagaatcttagcactgagataagggagaacctgtcagagctccgtcaggagaattccaagttgacgttcaatcagctgctgacccgcttctctgcctacatggtagcctgggttgtctctacaggagtggccatagcctgctgtgcagccgtttattacctggctgagtacaacttagagttcctgaagacacacagtaaccctggggcggtgctgttactgcctttcgttgtgtcctgcattaatctggccgtgccatgcatctactccatgttcaggcttgtggagaggtacgagatgccacggcacgaagtctacgttctcctgatccgaaacatctttttgaaaatatcaatcattggcattctttgttactattggctcaacaccgtggccctgtctggtgaagagtgttgggaaaccctcattggccaggacatctaccggctccttctgatggattttgtgttctctttagtcaattccttcctgggggagtttctgaggagaatcattgggatgcaactgatcacaagtcttggccttcaggagtttgacattgccaggaacgttctagaactgatctatgcacaaactctggtgtggattggcatcttcttctgccccctgctgccctttatccaaatgattatgcttttcatcatgttctactccaaaaatatcagcctgatgatgaatttccagcctccgagcaaagcctggcgggcctcacagatgatgactttcttcatcttcttgctctttttcccatccttcaccggggtcttgtgcaccctggccatcaccatctggagattgaagccttcagctgactgtggcccttttcgaggtctgcctctcttcattcactccatctacagctggatcgacaccctaagtacacggcctggctacctgtgggttgtttggatctatcggaacctcattggaagtgtgcacttctttttcatcctcaccctcattgtgctaatcatcacctatctttactggcagatcacagagggaaggaagattatgataaggctgctccatgagcagatcattaatgagggcaaagataaaatgttcctgatagaaaaattgatcaagctgcaggatatggagaagaaagcaaaccccagctcacttgttctggaaaggagagaggtggagcaacaaggcttttgcatttgggggaacatgatggcagtcttgacttgcgatctagaagatcagttcaagaaggtaatccaagggcctgatgactcttttggtaaccagacaccaatcaaataaggggaggagacgaaaatggaatgatttcttccatgccacctgtgcctttaggaactgcccagaagaaaatccaaggctttagccaggagcggaaactgactaccatgtaattatcaaagtaaaattgggcattccatgct

SEQ ID NO: 216797 - DNA, 2283 bp, Artificial Sequence
  derived and/or modified sequence
atgctgagcgacgaccacgtgaacgagatcatcatccaggtggagaacgtgagcagcggcgtgcagagccaccccagcagcaaccagatcttccaggagaaggtgctgctggacagcagcatcaacatggtgctgagcatcagcgacatcgacgtgatcgacagccagaccgtgagcaagagaaacgaccagaagggcaaccaggtgctgagattcagcaccagcctgaacgagagcatgagccagaccctgcacagcctggagtgcatgggcatcgacacccccggcagcagccacgagaccgtgcagggccagaagctgatcgccagcctgatccccatgaccagcagagacagaatcaaggccatcagaaaccagcccagaaccatggaggagaagagaaacctgagaaagatcgtggacaaggagaagagcaagcagacccacagaatcctgcagctgaactgctgcatccagtgcctgaacagcatcagcagagcctacagaagaagcaagaacagcctgagcgagatcctgaacagcatcagcctgtggcagaagaccctgaagatcatcggcggcaagttcggcaccagcgtgctgagctacttcaacttcctgagatggctgctgaagttcaacatcttcagcttcatcctgaacttcagcttcatcatcatcccccagttcaccgtggccaagaagaacaccctgcagttcaccggcctggagttcttcaccggcgtgggctacttcagagacaccgtgatgtactacggcttctacaccaacagcaccatccagcacggcaacagcggcgccagctacaacatgcagctggcctacatcttcaccatcggcgcctgcctgaccacctgcttcttcagcctgctgttcagcatggccaagtacttcagaaacaacttcatcaacccccacatctacagcggcggcatcaccaagctgatcttctgctgggacttcaccgtgacccacgagaaggccgtgaagctgaagcagaagaacctgagcaccgagatcagagagaacctgagcgagctgagacaggagaacagcaagctgaccttcaaccagctgctgaccagattcagcgcctacatggtggcctgggtggtgagcaccggcgtggccatcgcctgctgcgccgccgtgtactacctggccgagtacaacctggagttcctgaagacccacagcaaccccggcgccgtgctgctgctgcccttcgtggtgagctgcatcaacctggccgtgccctgcatctacagcatgttcagactggtggagagatacgagatgcccagacacgaggtgtacgtgctgctgatcagaaacatcttcctgaagatcagcatcatcggcatcctgtgctactactggctgaacaccgtggccctgagcggcgaggagtgctgggagaccctgatcggccaggacatctacagactgctgctgatggacttcgtgttcagcctggtgaacagcttcctgggcgagttcctgagaagaatcatcggcatgcagctgatcaccagcctgggcctgcaggagttcgacatcgccagaaacgtgctggagctgatctacgcccagaccctggtgtggatcggcatcttcttctgccccctgctgcccttcatccagatgatcatgctgttcatcatgttctacagcaagaacatcagcctgatgatgaacttccagccccccagcaaggcctggagagccagccagatgatgaccttcttcatcttcctgctgttcttccccagcttcaccggcgtgctgtgcaccctggccatcaccatctggagactgaagcccagcgccgactgcggccccttcagaggcctgcccctgttcatccacagcatctacagctggatcgacaccctgagcaccagacccggctacctgtgggtggtgtggatctacagaaacctgatcggcagcgtgcacttcttcttcatcctgaccctgatcgtgctgatcatcacctacctgtactggcagatcaccgagggcagaaagatcatgatcagactgctgcacgagcagatcatcaacgagggcaaggacaagatgttcctgatcgagaagctgatcaagctgcaggacatggagaagaaggccaaccccagcagcctggtgctggagagaagagaggtggagcagcagggcttcctgcacctgggcgagcacgacggcagcctggacctgagaagcagaagaagcgtgcaggagggcaaccccagagcctag

SEQ ID NO: 216798 - DNA, 2283 bp, Artificial Sequence
  derived and/or modified sequence
atgctcagtgacgatcacgtcaacgagatcatcattcaggtcgagaacgtgtcctccggcgtgcaatcccatccgtcttcaaaccagatttttcaagagaaggtcctgctggactcaagcattaacatggttctaagcatctctgatattgacgtaatcgacagtcagaccgtgtcgaaacggaacgaccagaagggaaaccaggtgcttagattcagtacttctctgaatgagagcatgtcgcagactctgcactcactggagtgcatggggatcgatactcctggatcctctcacgagacagtgcagggccagaaactgattgctagtcttataccaatgacctcacgggataggatcaaggccattcgaaaccagcccaggactatggaagaaaagcgaaaccttcggaagattgtagacaaagaaaaatcgaaacagacccaccgcatattgcaactcaattgctgcatccaatgcttgaacagtataagccgtgcatatcggagatccaagaacagcctcagcgagattctcaactcgattagcctgtggcagaaaacgctcaaaatcattggcggaaagttcgggacctcagttctttcttactttaatttcctacgatggctccttaagtttaatatctttagcttcatactaaatttttcattcatcattatcccacagttcactgtagcgaaaaagaatacactccagttcaccggcctggagttttttactggtgtgggctattttcgagataccgtgatgtattacggcttctacactaattcgaccatacagcacggcaattcgggagccagttataacatgcagctggcatacatttttactatcggagcatgtctgaccacttgtttctttagtcttctgttttctatggccaagtactttcgcaataactttattaacccgcatatctattctggtgggatcacaaagctgattttttgctgggatttcactgtcacacacgaaaaagctgtgaaactgaaacagaaaaacttaagcacagagatccgagaaaatctgtcagagctcagacaggaaaatagcaagctgacatttaatcagctgctaacaagattcagcgcttacatggtggcctgggtggtcagtaccggagttgcgattgcctgttgcgccgccgtctactatctggccgagtataacttggaattcctgaagacccactccaatcccggcgccgtgctgctactccctttcgtcgtatcctgtattaatctggcagtcccctgcatttacagcatgttcaggctcgtagagaggtatgagatgccccggcacgaggtatatgtattgctcatccgaaatattttcctgaagatcagcattattggcatcctctgttactattggctgaacacggtggccttaagcggcgaggagtgttgggagacgttaattggacaggacatctatcggctgctgttaatggacttcgtgttttcactggttaactccttccttggagagtttctccgacggatcatagggatgcaattaattacgtctttagggctgcaggagtttgacatcgcccgaaacgttctggagctgatttacgctcaaaccctggtgtggattggaatctttttctgcccactcctgccctttattcaaatgatcatgctgttcatcatgttctatagcaagaatatatcactaatgatgaatttccagcctccttccaaagcctggcgggccagtcagatgatgactttcttcatcttcctgctttttttccccagcttcaccggcgtgctttgtactctggccattaccatctggcgccttaagcccagcgcagactgcggaccattccggggacttcctctgtttatccacagcatctacagctggatcgatactctgagcacacgacccggctatctgtgggtagtgtggatctataggaatctcattgggtcagttcatttttttttcatcctgactctcatcgtgctgatcatcacgtatctgtattggcagatcaccgaaggcaggaaaattatgattcgcctgctgcacgagcaaatcataaatgaagggaaagacaagatgtttttgattgagaaactgatcaagctgcaagatatggagaagaaagctaacccaagtagcctggtcctggagcggagagaagtcgagcaacagggattcctgcatcttggggaacacgatgggtcactggacctacgaagtagaaggtctgtccaggagggtaatcctagggcctag

SEQ ID NO: 216799 - DNA, 2283 bp, Artificial Sequence
  derived and/or modified sequence
atgctgagtgatgaccacgtgaatgagatcatcatccaggtggagaatgtgtcctctggagtgcagagccaccccagcagcaaccagatcttccaggagaaggtgctgctggacagcagcatcaacatggtgctgagcatcagtgacattgatgtgattgacagccagacagtgtccaagagaaatgaccagaagggcaaccaggtgctgcgcttcagcaccagcctgaatgaatccatgagccagaccctgcacagcctggagtgcatgggcatcgacaccccaggcagcagccatgaaacagtgcagggccagaagctgattgccagcctcatccccatgaccagccgggaccgcatcaaggccatccggaaccagcccaggaccatggaggagaagaggaacctgaggaagatcgtggacaaggagaagagcaagcagacccaccgcatcctgcagctgaactgctgcatccagtgcctgaacagcatcagccgggcctacagaagaagcaagaacagcctgtctgagatcctgaacagcatcagcctgtggcagaagaccctgaagatcatcggcggcaagtttggcacctctgtgctgagctacttcaacttcctgcgctggctgctgaagttcaacatcttctccttcatcctgaacttctccttcatcatcatcccccagttcaccgtggccaagaagaacaccctgcagttcaccggcctggagttcttcaccggggtgggctacttccgggacacagtgatgtactacggcttctacaccaacagcaccatccagcacggcaacagcggggccagctacaacatgcagctggcctacatcttcaccatcggggcctgcctgaccacctgcttcttcagcctgctcttctccatggccaagtacttcaggaacaacttcatcaacccccacatctacagcggcggcatcaccaagctgatcttctgctgggacttcaccgtgacccatgagaaggctgtgaagctgaagcagaagaacctgagcacagagatccgggagaacctgtctgagctgcggcaggagaacagcaagctgaccttcaaccagctgctgacccgcttcagcgcctacatggtggcctgggtggtgtccactggagtggccatcgcctgctgtgccgctgtgtactacctggccgagtacaacctggagttcctgaagacccacagcaaccctggagctgtgctgctgctgccctttgtggtgtcctgcatcaacctggccgtgccctgcatctacagcatgttccggctggtggagagatatgagatgcccaggcatgaggtgtatgtgctgctgatccggaacatcttcctgaagatcagcatcatcggcatcctgtgctactactggctgaacacagtggccctgagcggggaggagtgctgggagaccctgattggccaggacatctaccgcctgctgctgatggactttgtgttcagcctggtgaacagcttcctgggggagttcctgcggcgcatcatcggcatgcagctgatcaccagcctgggcctgcaggagtttgatattgccagaaatgtgctggagctgatctatgcccagaccctggtgtggattggcatcttcttctgccccctgctgcccttcatccagatgatcatgctgttcatcatgttctacagcaagaacatcagcctgatgatgaacttccagccccccagcaaggcctggagggccagccagatgatgaccttcttcatcttcctgctcttcttccccagcttcaccggggtgctgtgcaccctggccatcaccatctggaggctgaagcccagcgctgactgtggccccttccggggcctgcccctcttcatccacagcatctacagctggattgacaccctgagcaccaggcctggctacctgtgggtggtgtggatctacagaaacctgattggctctgtgcacttcttcttcatcctgaccctcatcgtgctgatcatcacctacctgtactggcagatcacagagggcaggaagatcatgatccggctgctgcacgagcagatcatcaatgaaggcaaggacaagatgttcctgattgagaagctgatcaagctgcaggacatggagaagaaggccaaccccagcagcctggtgctggagcggcgggaggtggagcagcagggcttcctgcacctgggggagcatgatggcagcctggacctgcggagccgccgctctgtgcaggagggcaacccccgggcctag

SEQ ID NO: 216800 - DNA, 2283 bp, Artificial Sequence
  derived and/or modified sequence
atgctgagcgacgaccacgtgaacgagatcatcatccaggtggagaatgtgtcgtctggtgtccaaagccatccatccagcaaccagatctttcaggaaaaagtgctgctagactcctctattaacatggttttgagcatctccgatatcgatgtgattgatagtcagacagtatcgaagcggaacgaccagaaaggtaaccaggtcctgaggtttagcaccagcctcaacgaaagtatgtcccagaccctgcacagcctcgaatgcatgggaattgatacaccagggtctagccatgaaactgtgcaggggcagaaactaatcgcttcgctcataccaatgacgtccagggatcgaattaaggcaattcggaaccagcctagaaccatggaagaaaaaagaaatttgcgtaagattgtggataaagaaaagtccaaacagacccatagaattctgcagttgaattgttgtattcagtgcctgaactctatcagtagagcttataggcgctctaaaaactcactgtccgagattctcaactctatatctctctggcagaaaaccctcaaaataattggtggcaaatttggcacgtctgtcctgtcctacttcaacttccttaggtggctcctgaaattcaacatatttagctttatcctgaatttcagtttcattattattccccagtttactgtcgcgaagaaaaatacacttcaatttacaggcctggagtttttcaccggggtcggttacttccgtgataccgtaatgtactacggcttttatacaaactcgactatccagcacggcaattcaggtgcctcatataatatgcagctcgcttatatcttcactattggggcatgccttactacttgtttcttttccctgctgttctctatggccaaatatttccgaaacaattttattaatcctcatatttactcaggtgggatcactaaattgatcttttgctgggatttcactgtaacccatgaaaaagcagtcaagctgaaacagaagaaccttagcactgaaattcgggaaaacctctccgagctgcggcaggagaactctaaactgacttttaaccaactgcttacaagattctcggcctacatggtcgcatgggttgtctccactggagttgccattgcttgttgtgcggccgtctattacctagccgagtataaccttgaattcttaaagacacattccaatcctggtgccgtgctccttctcccctttgtcgttagctgtatcaacctggccgtcccctgcatctattcaatgttccgtttggtggagaggtacgagatgccccgtcatgaggtttatgtcctgctgattcgtaacatcttccttaagatttccatcatcggcatcctgtgctattactggctgaatactgttgctctctctggagaggaatgctgggagacattgattgggcaggacatctaccggcttctattgatggattttgtgttcagccttgtgaacagtttccttggggagtttctccgacggatcataggcatgcagctcatcacatccctgggcttgcaggagtttgatattgccaggaatgttctggagctgatttacgctcaaacactggtatggatagggatcttcttctgtccattgctcccattcatacagatgattatgcttttcatcatgttctactctaagaacatttcactgatgatgaactttcaaccgcctagcaaggcctggcgtgccagccagatgatgacgttttttatattcctgctgttctttccttcatttacgggcgtcctttgtacactggctatcacgatttggaggcttaagccgtcggccgattgcggtccttttcgcggcctccctctctttatacattcaatttactcctggatagacaccttatcgactagacccggctatctgtgggtggtctggatctatcgtaacctgatcggtagtgtacattttttcttcatcctgacgctgatcgtcctcataattacttacctctactggcagatcacagagggcaggaaaattatgatacgtctgctgcatgagcagataattaatgaaggcaaggacaaaatgttcttgatagaaaagctcattaagctgcaggacatggagaagaaggcaaaccctagtagtcttgttctagaaagacgggaggtcgagcaacaggggttcctccacttgggagaacatgacggcagcctcgacctgcgttccagacgctccgtccaagaggggaacccccgagcctag

SEQ ID NO: 216801 - DNA, 2283 bp, Artificial Sequence
  derived and/or modified sequence
atgctgagtgatgaccacgtcaacgagattatcatacaggtggaaaatgtgtcaagtggggtgcagtctcaccctagctctaaccagatttttcaggaaaaagtgctgttagactcaagtatcaacatggtcctgtccatctccgatattgatgtaatcgatagccagacagtttccaaaaggaacgaccagaaggggaaccaagttctgcgcttttccactagtctcaatgagtctatgtctcaaaccctgcactccctcgaatgcatgggtatcgacactcctgggtcttctcacgagactgtgcaggggcagaaactaattgctagtttgatccctatgacttcaagggacagaattaaggctattaggaatcagcctcgaacaatggaggagaagagaaatctgagaaaaatcgtggataaggagaaatcaaaacaaacccaccggatactgcagctgaactgttgcattcagtgtctgaactcgatctcaagggcataccgccgttctaaaaattcgctctccgagattcttaatagcatttccttatggcagaagacgttgaagattattggcggaaaattcggtacctccgtgctcagttatttcaacttccttcgctggctgcttaagtttaatatattttccttcattcttaacttctcctttattatcatcccccagttcacagtcgccaaaaagaacaccctgcagtttacaggcctggagttcttcacaggtgttggttacttccgcgacactgtgatgtattatggtttctataccaattctactattcagcacggcaactccggcgcttcctataacatgcagctggcatatatttttacaattggcgcatgcctcactacctgtttcttctccctgttgttcagtatggccaagtactttcgcaataacttcataaaccctcacatctactcaggcggaataacgaaactcatcttttgctgggattttactgtcacacacgagaaggcagtaaagctcaaacagaaaaacttatccactgagatcagagagaacctgtccgaactccggcaagaaaactcaaaactgacctttaatcagctgctcactagattttcggcctacatggtggcttgggtcgtgtctacgggggtagctatcgcctgctgtgcggctgtgtattacctggcagagtataatttggaattcctcaagacgcattccaaccctggtgctgtcctgctcctcccattcgtggtctcttgtatcaatctggcagttccttgcatctattcaatgttcaggttggtggagcgatatgaaatgccgagacacgaggtgtatgtgctactcattcgcaatattttcctgaaaattagcataatcggcatcctgtgttactactggctgaacaccgtagcactgtcaggggaagagtgttgggagaccctcataggccaggatatctatcgtctgctccttatggatttcgtatttagtctggtaaacagctttttgggagaatttcttcgtcgcataatcgggatgcagttgatcacctccctgggccttcaggaattcgacatcgcaaggaatgtgttggagctgatatatgcccagactctcgtatggatagggatcttcttctgtcctctcctgccattcatccagatgatcatgcttttcattatgttctacagtaagaacatcagcctcatgatgaatttccagcccccttctaaggcatggcgtgcgtcccagatgatgactttttttatcttcctgctcttttttccctcttttaccggggtgctctgcaccctagctataactatttggaggctcaagccaagtgcagactgcggtccattcagagggttgccactgttcatccactcaatctactcgtggatcgacaccttaagcactcggccaggatacctctgggtggtttggatttaccggaacctgattgggagtgttcactttttcttcattttgaccctgattgttctcatcatcacatacctatactggcagattacagaagggcgtaaaattatgattcgcctcttgcacgaacagatcataaacgaagggaaggacaaaatgtttctgatagaaaaactaatcaaattacaagacatggagaagaaggccaacccatccagcctagttctcgagcgcagagaggtggagcagcaaggttttctccacctcggggagcacgacggaagcctcgatctccgctcacggagaagcgttcaagagggaaacccaagggcttag

SEQ ID NO: 216802 - protein, 299 aa, Artificial Sequence
  derived and/or modified sequence
MEELEQGLLMQPWAWLQLAENSLLAKVFITKQGYALLVSDLQQVWHEQVDTSVVSQRAKELNKRLTAPPAAFLCHLDNLLRPLLKDAAHPSEATFSCDCVADALILRVRSELSGLPFYWNFHCMLASPSLVSQHLIRPLMGMSLALQCQVRELATLLHMKDLEIQDYQESGATLIRDRLKTEPFEENSFLEQFMIEKLPEACSIGDGKPFVMNLQDLYMAVTTQEVQVGQKHQGAGDPHTSNSASLQGIDSQCVNQPEQLVSSAPTLSAPEKESTGTSGPLQRPQLSKVKRKKPRGLFS

SEQ ID NO: 216803 - protein, 316 aa, Artificial Sequence
  derived and/or modified sequence
MEELEQGLLMQPWAWLQLAENSLLAKVFITKQGYALLVSDLQQVWHEQVDTSVVSQRAKELNKRLTAPPAAFLCHLDNLLRPLLKDAAHPSEATFSCDCVADALILRVRSELSGLPFYWNFHCMLASPSLVSQHLIRPLMGMSLALQCQVRELATLLHMKDLEIQDYQESGATLIRDRLKTEPFEENSFLEQFMIEKLPEACSIGDGKPFVMNLQDLYMAVTTQEVQVGQKHQGAGDPHTSNSASLQGIDSQCVNQPEQLVSSAPTLSAPEKESTALCRDLSCQRSRGRSQGVSSVNLLWPQLLRMDLENSFQASP

SEQ ID NO: 216804 - protein, 229 aa, Artificial Sequence
  derived and/or modified sequence
MEELEQGLLMQPWAWLQLAENSLLAKVFITKQGYALLVSDLQQVWHEQVDTSVVSQRAKELNKRLTAPPAAFLCHLDNLLRPLLKDAAHPSEATFSCDCVADALILRVRSELSGLPFYWNFHCMLASPSLVSQHLIRPLMGMSLALQCQVRELATLLHMKDLEIQDYQESGATLIRDRLKTEPFEENSFLEQFMIEKLPEACSIGDGKPFVMNLQDLYMAVTTQEVQVG

SEQ ID NO: 216805 - DNA, 900 bp, Artificial Sequence
  derived and/or modified sequence
atggaagagctggaacagggactgttaatgcagccctgggcatggcttcaactggctgagaacagtctcctcgcaaaggtattcattacaaagcaaggctacgcactcctggtatcagacctgcaacaggtttggcacgaacaggtggacaccagcgtggtgtcgcagcgcgccaaagagctgaataaaagactgaccgccccacctgccgccttcctgtgtcaccttgataacttgctcaggcctctcttgaaagacgccgctcacccttcagaggcaacgttttcgtgtgattgtgtcgccgacgcattgattctgcgggtccgatccgagttatccgggctcccattttactggaacttccactgtatgctggcaagcccgtctctggtctcccagcatctgataaggcccttgatgggaatgtctctggccctgcaatgccaggtaagagagctagccacgctccttcatatgaaagacctagaaatacaggattatcaggagtcgggtgccacattaatccgggaccgcctgaaaacagagccttttgaagaaaacagttttcttgagcaattcatgattgagaagcttccagaagcttgctctatcggtgatggaaagccgttcgttatgaatctgcaggatttatatatggctgtgactacccaggaggttcaagttggtcagaaacaccaaggcgcaggcgatccacatactagcaattccgctagcctgcagggcatcgactcacagtgcgttaaccagcccgagcaactggtgtcatcggctcctactctcagcgccccagagaaggagtccacgggaacatcgggaccccttcagcggcctcaactgtcaaaagtgaaaaggaagaaaccaagagggcttttttcttag

SEQ ID NO: 216806 - DNA, 951 bp, Artificial Sequence
  derived and/or modified sequence
atggaggagctggaacaggggcttcttatgcagccatgggcatggctacagcttgccgagaatagtcttctcgcgaaagtgttcatcacaaaacaggggtacgcactactggtgtcggatctacagcaagtctggcacgaacaagttgacacaagcgtggtgtcacagagagccaaggagctgaataaaagactgaccgccccacctgcggccttcttatgtcacctcgataatctcctccgaccacttttaaaagacgcagcacatcccagcgaggctacttttagctgtgactgtgtggctgacgccttgattctacgagtgcgttcagagctgtccggcttacctttctattggaacttccattgcatgctggcaagtccgtctttggtgtcccagcatttgatacggccactgatgggcatgtcactagccttacaatgccaagtgcgtgagttagccacactgctgcacatgaaggacctggagatccaggattaccaggagagcggggccacccttattagagatagactgaaaactgaaccgttcgaggagaactctttcctcgagcagtttatgatagaaaagctgcccgaagcctgttccatcggagatggcaaaccatttgtgatgaacttacaggacctgtatatggcagtcacaacccaagaggtccaggttggccagaagcatcagggggctggggacccgcatacctctaatagcgccagcctgcaaggcatcgattctcaatgcgtgaaccaacctgaacagctagtctcctcagcccctacactcagtgcaccagagaaggaatccactgccctgtgcagggacctaagctgtcagcgctcccgcgggcggagtcagggagtctcaagcgtcaatcttctctggcctcagcttctgagaatggatttggagaattctttccaggctagtccctag

SEQ ID NO: 216807 - DNA, 690 bp, Artificial Sequence
  derived and/or modified sequence
atggaagaactggaacaggggctccttatgcagccctgggcatggttgcagctggccgaaaacagtttgctcgctaaggttttcattactaagcagggatacgccctactggtgagtgaccttcagcaggtgtggcatgagcaggttgacacttctgtggtgagtcagcgcgccaaagaattaaacaagagactcacagctcccccagctgcctttttatgtcatctggataacctcttaagacctctgcttaaagacgccgcccacccgtccgaagcaacattcagttgcgattgcgtggctgatgccctcattctcagagtgcgctcagagctcagtggcttgcccttctattggaatttccattgcatgctggcatccccctcgctcgtaagccaacatctgatacgccccctgatggggatgtcactggcgctacagtgtcaagtcagagagctggccaccttgctccacatgaaagatctggaaatccaggattatcaggaatccggcgcgaccctgattcgggacagactcaaaaccgagccgtttgaggagaactcatttctggaacagtttatgatcgagaagttgccagaagcctgctcaatcggggacggaaagccttttgtgatgaatctgcaagacctgtacatggccgtaaccactcaggaggtgcaggtcggttag

SEQ ID NO: 216808 - DNA, 900 bp, Artificial Sequence
  derived and/or modified sequence
atggaggagctggagcagggcctgctgatgcagccctgggcctggctgcagctggccgagaacagcctgctggccaaggtgttcatcaccaagcagggctacgccctgctggtgtctgacctgcagcaggtgtggcatgagcaggtggacacctctgtggtgtcccagagggccaaggagctgaacaagaggctgacagcccccccagctgccttcctgtgccacctggacaacctgctgcggcccctgctgaaggatgctgcccaccccagcgaggccaccttcagctgtgactgtgtggctgatgccctgatcctgcgggtgcgctctgagctgagcggcctgcccttctactggaacttccactgcatgctggccagccccagcctggtgtcccagcacctgatccggcccctgatgggcatgagcctggccctgcagtgccaggtgcgggagctggccaccctgctgcacatgaaggacctggagatccaggactaccaggagagcggggccaccctcatccgggaccggctgaagacagagccctttgaggagaacagcttcctggagcagttcatgattgagaagctgcctgaggcctgcagcattggagatggcaagccctttgtgatgaacctgcaggacctgtacatggctgtgaccacccaggaggtgcaggtgggccagaagcaccagggcgctggggacccccacaccagcaacagcgccagcctgcagggcatcgacagccagtgtgtgaaccagcctgagcagctggtgtcctctgcccccaccctgagcgcccctgagaaggagagcacaggcaccagcggccccctgcagaggccccagctgagcaaggtgaagaggaagaagccccggggcctcttctcctag

SEQ ID NO: 216809 - DNA, 951 bp, Artificial Sequence
  derived and/or modified sequence
atggaggagctggagcagggcctgctgatgcagccctgggcctggctgcagctggccgagaacagcctgctggccaaggtgttcatcaccaagcagggctacgccctgctggtgtctgacctgcagcaggtgtggcatgagcaggtggacacctctgtggtgtcccagagggccaaggagctgaacaagaggctgacagcccccccagctgccttcctgtgccacctggacaacctgctgcggcccctgctgaaggatgctgcccaccccagcgaggccaccttcagctgtgactgtgtggctgatgccctgatcctgcgggtgcgctctgagctgagcggcctgcccttctactggaacttccactgcatgctggccagccccagcctggtgtcccagcacctgatccggcccctgatgggcatgagcctggccctgcagtgccaggtgcgggagctggccaccctgctgcacatgaaggacctggagatccaggactaccaggagagcggggccaccctcatccgggaccggctgaagacagagccctttgaggagaacagcttcctggagcagttcatgattgagaagctgcctgaggcctgcagcattggagatggcaagccctttgtgatgaacctgcaggacctgtacatggctgtgaccacccaggaggtgcaggtgggccagaagcaccagggcgctggggacccccacaccagcaacagcgccagcctgcagggcatcgacagccagtgtgtgaaccagcctgagcagctggtgtcctctgcccccaccctgagcgcccctgagaaggagagcacagccctgtgccgggacctgagctgccagaggagccggggccgcagccagggcgtgtcctctgtgaacctgctgtggccccagctgctgaggatggacctggagaacagcttccaggccagcccctag

SEQ ID NO: 216810 - DNA, 690 bp, Artificial Sequence
  derived and/or modified sequence
atggaggagctggagcagggcctgctgatgcagccctgggcctggctgcagctggccgagaacagcctgctggccaaggtgttcatcaccaagcagggctacgccctgctggtgtctgacctgcagcaggtgtggcatgagcaggtggacacctctgtggtgtcccagagggccaaggagctgaacaagaggctgacagcccccccagctgccttcctgtgccacctggacaacctgctgcggcccctgctgaaggatgctgcccaccccagcgaggccaccttcagctgtgactgtgtggctgatgccctgatcctgcgggtgcgctctgagctgagcggcctgcccttctactggaacttccactgcatgctggccagccccagcctggtgtcccagcacctgatccggcccctgatgggcatgagcctggccctgcagtgccaggtgcgggagctggccaccctgctgcacatgaaggacctggagatccaggactaccaggagagcggggccaccctcatccgggaccggctgaagacagagccctttgaggagaacagcttcctggagcagttcatgattgagaagctgcctgaggcctgcagcattggagatggcaagccctttgtgatgaacctgcaggacctgtacatggctgtgaccacccaggaggtgcaggtgggctag

SEQ ID NO: 216811 - DNA, 900 bp, Artificial Sequence
  derived and/or modified sequence
atggaggagctggagcagggcctgctgatgcagccctgggcctggctacagctggcagagaacagcttactcgccaaagtgttcattacgaaacaggggtatgctctgcttgtgtccgatttacaacaggtgtggcatgagcaagtcgataccagcgttgtgagccaacgtgccaaagaattgaataagagactgacggccccacccgcagccttcctttgtcacctagacaatttattacgacctttactgaaggatgctgcccatccctctgaggccaccttcagctgtgactgtgtggccgacgccctgatactgagggtgcgatcagaactgtctggactccctttctattggaacttccattgtatgctggcttctccctctttagtgagtcagcaccttattcgcccactgatggggatgagtctggcactgcagtgtcaggtgagagagctggcaaccctgctacatatgaaagatttagagatccaggactaccaggaatctggtgcgaccctgattagagatcgcctcaagacggaaccgtttgaagagaatagctttctggagcagtttatgattgaaaaactgcccgaggcatgctcgattggcgacggcaagccctttgtcatgaacctccaagatctgtacatggccgtgactacgcaagaggttcaggttgggcagaaacatcagggtgctggggatccccatacttctaacagcgccagtctacaggggatcgactcccagtgtgtgaaccagcccgagcagctagtgtcctccgcacccacactctccgcgcccgagaaggagtccaccggaacaagtggtcctctccaacgcccacagctgagcaaggttaaaaggaagaagccccgtggtcttttttcatag

SEQ ID NO: 216812 - DNA, 951 bp, Artificial Sequence
  derived and/or modified sequence
atggaggagctggagcagggcctgctgatgcagccctgggcctggctgcaattggctgaaaatagtttactggctaaagtttttattacaaagcaagggtacgctctgctggtaagcgacctgcagcaggtgtggcatgagcaggttgatacctctgtggtgtcccaacgtgccaaggaactcaataagcgcttgaccgcacctccagccgcatttttatgtcatttagataaccttctgcggcctttgctgaaagacgctgcacacccatctgaggccacattctcctgcgactgtgtggccgacgctttgattctccgggtgaggtccgaactctccggacttccattttactggaacttccattgcatgctcgcttcgccaagcttagtttcccaacacctgatcagacccctaatgggcatgtcccttgcattacaatgccaggtgagggagctcgccacactgttgcacatgaaagatctcgaaatacaggactaccaggaaagcggcgcaaccctgataagagacaggttgaaaaccgagccatttgaggaaaattcctttctggagcagttcatgatcgagaaattgcctgaggcctgttctattggggacggcaagccctttgttatgaaccttcaggacctgtacatggcagtgacaacacaggaagtccaagtcgggcagaagcatcagggtgccggtgatccacacacatctaatagcgccagcctgcaagggatcgatagtcagtgcgttaatcagcctgagcaactcgtgagctctgcccctacactgagcgcacccgagaaagagtcaaccgcactgtgtagggatttatcgtgccagagatcacggggaaggtcccagggtgtcagttccgtcaatttgctctggccacagctgttacgaatggatcttgaaaactcctttcaggccagtccatag

SEQ ID NO: 216813 - DNA, 690 bp, Artificial Sequence
  derived and/or modified sequence
atggaggagctggagcagggcctgctgatgcagccctgggcctggctccagctggccgagaacagcctgttagctaaggtttttattaccaaacagggctacgcattattggtgtcagacttgcagcaggtctggcacgagcaggttgacacttcagtggttagtcagagggccaaagagttgaataagcgcctgaccgctcctcccgctgcctttctgtgccatctggataacttgctgaggcctcttttaaaggacgctgcacacccctctgaggccacctttagctgtgactgcgtagcagacgctctgattctacgggtccgtagtgagcttagtggcctgccattttactggaacttccactgtatgcttgcctctccgtcactggtgtctcagcatctcatccggcccctaatgggcatgagtcttgcactccagtgccaggtcagggagttggccacactcctgcacatgaaggaccttgaaatccaagattatcaagaaagcggagcaactctcatccgggacagactcaagaccgaaccctttgaggaaaatagctttctggagcagtttatgattgaaaagctcccggaggcctgcagtattggggacgggaagccttttgttatgaacctgcaggatctgtatatggctgtgactacccaggaagtccaagtgggctag

SEQ ID NO: 216814 - DNA, 2094 bp, Artificial Sequence
  derived and/or modified sequence
cctgtatcccaagaccctgcctcctcttgcggtggggggaaagcggcctcttactctaggcctttcggtttgcgcgagcgggcaggaaagcgtgcgtgcggctaagagagtgggcgctctcgcggccgctgacgatggaagaactggagcaaggcctgttgatgcagccatgggcgtggctacagcttgcagagaactccctcttggccaaggtttttatcaccaagcagggctatgccttgttggtttcagatcttcaacaggtgtggcatgaacaggtggacactagtgtggtcagccagcgagccaaggagctgaacaagcggctcactgctcctcctgcagctttcctctgtcatttggataatctccttcgcccattgttgaaggacgctgctcaccctagcgaagctaccttctcctgtgattgtgtggcagatgcactgattctacgggtgcgaagtgagctctctggcctccccttctattggaatttccactgcatgctagctagtccttccctggtctcccaacatttgattcgtcctctgatgggcatgagtctggcattacagtgccaagtgagggagctagcaacgttacttcatatgaaagacctagagatccaagactaccaggagagtggggctacgctgattcgagatcgattgaagacagaaccatttgaagaaaattccttcttggaacaatttatgatagagaaactgccagaggcatgcagcattggtgatggaaagccctttgtcatgaatctgcaggatctgtatatggcagtcaccacacaagaggtccaagtgggacagaagcatcaaggcgctggagatcctcatacctcaaacagtgcttccctgcaaggaatcgatagccaatgtgtaaaccagccagaacaactggtctcctcagccccaaccctctcagcacctgagaaagagtccacgggtacttcaggccctctgcagagacctcagctgtcaaaggtcaagaggaagaagccaaggggtctcttcagttaatctgttgtggcctcagctgctgaggatggacttggagaacagcttccaagcttcaccttgaaagaagcttacatggcagcaatatttctaaaatagtgatacagtcagaggcctcctgtaagggcgagagaactgaagttgatgttgacaggcccacagggaattggccttccctgttcaagtggaagccagtctctgagaatcccgtgctctcctctcttttggtggaggttctgtaggttcaggtttctaccatggactttaggtatatagggcaagtcagcaagaaagcaccacacactcaggaagccttgtctacctttccctagcgtctctagccagccagccccagatactcctcagagacccacttctctcttttgcatggaataaaaagcactcacagtccctgcttttgggattacttatgctgtggaactcataacccaattcacttccttcactgggtcccaccccattgttgtctctggatgaagtctagccatcagtctggtccttcagattcttcgtaaacttttctgcagttgccagagctaagtctccatttggaaactttgatctcaagaactctcttgatggtgggcacaagacagataggtgattgctgctttcctttgccaaacttggatgcatttttctctttgtttccaaagtataggcaacaggttaaactaccacgtggggtagtttatcaatcctcccgcctcatccttctgcataactgggactaaaggcacacaccaccacacctagctaatttttgtatttttttgtgtgtggagacaaggctttgccatgttgcccaggctggtcttgaactcctggactctagtgatctgcccacctcaacctcccaaagtgctgggattacaggcatgagctaccacgcctatccaatttctggtttatttactttcgatggttaaatgcctccttattcaaatatcctgtatatatactggcgtttctgtcctgatgtcaagtctcgagagaagatgatcaaacaataataaaataattataataagaacaacaataa

SEQ ID NO: 216815 - DNA, 1954 bp, Artificial Sequence
  derived and/or modified sequence
atggaagaactggagcaaggcctgttgatgcagccatgggcgtggctacagcttgcagagaactccctcttggccaaggtttttatcaccaagcagggctatgccttgttggtttcagatcttcaacaggtgtggcatgaacaggtggacactagtgtggtcagccagcgagccaaggagctgaacaagcggctcactgctcctcctgcagctttcctctgtcatttggataatctccttcgcccattgttgaaggacgctgctcaccctagcgaagctaccttctcctgtgattgtgtggcagatgcactgattctacgggtgcgaagtgagctctctggcctccccttctattggaatttccactgcatgctagctagtccttccctggtctcccaacatttgattcgtcctctgatgggcatgagtctggcattacagtgccaagtgagggagctagcaacgttacttcatatgaaagacctagagatccaagactaccaggagagtggggctacgctgattcgagatcgattgaagacagaaccatttgaagaaaattccttcttggaacaatttatgatagagaaactgccagaggcatgcagcattggtgatggaaagccctttgtcatgaatctgcaggatctgtatatggcagtcaccacacaagaggtccaagtgggacagaagcatcaaggcgctggagatcctcatacctcaaacagtgcttccctgcaaggaatcgatagccaatgtgtaaaccagccagaacaactggtctcctcagccccaaccctctcagcacctgagaaagagtccacggccctctgcagagacctcagctgtcaaaggtcaagaggaagaagccaaggggtctcttcagttaatctgttgtggcctcagctgctgaggatggacttggagaacagcttccaagcttcaccttgaaagaagcttacatggcagcaatatttctaaaatagtgatacagtcagaggcctcctgtaagggcgagagaactgaagttgatgttgacaggcccacagggaattggccttccctgttcaagtggaagccagtctctgagaatcccgtgctctcctctcttttggtggaggttctgtaggttcaggtttctaccatggactttaggtatatagggcaagtcagcaagaaagcaccacacactcaggaagccttgtctacctttccctagcgtctctagccagccagccccagatactcctcagagacccacttctctcttttgcatggaataaaaagcactcacagtccctgcttttgggattacttatgctgtggaactcataacccaattcacttccttcactgggtcccaccccattgttgtctctggatgaagtctagccatcagtctggtccttcagattcttcgtaaacttttctgcagttgccagagctaagtctccatttggaaactttgatctcaagaactctcttgatggtgggcacaagacagataggtgattgctgctttcctttgccaaacttggatgcatttttctctttgtttccaaagtataggcaacaggttaaactaccacgtggggtagtttatcaatcctcccgcctcatccttctgcataactgggactaaaggcacacaccaccacacctagctaatttttgtatttttttgtgtgtggagacaaggctttgccatgttgcccaggctggtcttgaactcctggactctagtgatctgcccacctcaacctcccaaagtgctgggattacaggcatgagctaccacgcctatccaatttctggtttatttactttcgatggttaaatgcctccttattcaaatatcctgtatatatactggcgtttctgtcctgatgtcaagtctcgagagaagatgatcaaacaataataaaataattataataagaacaacaataataaa

SEQ ID NO: 216816 - DNA, 734 bp, Artificial Sequence
  derived and/or modified sequence
agtccgctggctgctgcccggcgtggatggtagggctcgagtgaagatggaagaactggagcaaggcctgttgatgcagccatgggcgtggctacagcttgcagagaactccctcttggccaaggtttttatcaccaagcagggctatgccttgttggtttcagatcttcaacaggtgtggcatgaacaggtggacactagtgtggtcagccagcgagccaaggagctgaacaagcggctcactgctcctcctgcagctttcctctgtcatttggataatctccttcgcccattgttgaaggacgctgctcaccctagcgaagctaccttctcctgtgattgtgtggcagatgcactgattctacgggtgcgaagtgagctctctggcctccccttctattggaatttccactgcatgctagctagtccttccctggtctcccaacatttgattcgtcctctgatgggcatgagtctggcattacagtgccaagtgagggagctagcaacgttacttcatatgaaagacctagagatccaagactaccaggagagtggggctacgctgattcgagatcgattgaagacagaaccatttgaagaaaattccttcttggaacaatttatgatagagaaactgccagaggcatgcagcattggtgatggaaagccctttgtcatgaatctgcaggatctgtatatggcagtcaccacacaagaggtccaagtgggac

SEQ ID NO: 216817 - DNA, 900 bp, Artificial Sequence
  derived and/or modified sequence
atggaagagttggaacagggactgctgatgcagccatgggcatggcttcagttagcagaaaattcgctgctggccaaggtctttatcaccaagcaggggtacgctctgctcgtgtctgaccttcagcaagtatggcatgagcaggtagatacttcagtagtttcccagcgggctaaagagctcaataagcgcctgacggcccctcctgctgctttcttgtgccacctggacaatctgttgagacccctgttaaaagacgctgctcacccctctgaagccaccttttcctgtgattgtgtggctgatgctctgatactgcgtgtgcgaagcgaactcagtggcctgcccttttactggaacttccattgcatgcttgcaagcccgtctctggtctcccaacatcttatccgcccacttatggggatgtcactcgccttacagtgtcaggtgcgagagctcgccacattgcttcatatgaaagacctggagattcaggactatcaagagtctggcgctaccctcattcgggaccgcctgaagaccgaaccatttgaggagaatagttttctggagcagttcatgatcgaaaagttgccagaagcatgcagcattggcgatgggaaacctttcgtcatgaacttgcaggacctgtacatggctgtgactacgcaagaagttcaagtcgggcagaagcatcaaggtgccggagaccctcatacgtcgaatagcgcaagtctacagggtatcgacagccagtgcgtcaatcaacccgagcagctggtgtcatctgctcccaccctctctgctccagaaaaagagtccacaggtaccagcgggcctctgcagcgaccccagctttctaaggttaagagaaagaagcctagaggtctcttttcttag

SEQ ID NO: 216818 - DNA, 951 bp, Artificial Sequence
  derived and/or modified sequence
atggaagaacttgagcaggggctactgatgcagccttgggcctggctgcagttagccgaaaactccctgctagctaaagtgttcatcaccaaacagggatatgccctgctggtgagcgatctgcaacaggtgtggcatgagcaagtggatacatccgtcgtctcccaacgggctaaagagttgaacaaaaggctgacagctccgcctgccgctttcctctgtcacctagacaatctcctgaggcctctgctgaaagatgctgcccacccctccgaggccaccttttcttgtgattgcgtcgccgatgccctgattctgagagtgaggagcgagctctctggtctccccttctactggaacttccactgcatgctggcaagcccttctctggtatcccagcacctgatccgacccttgatggggatgtctctggcactgcagtgtcaggtgagggaactggcgactctgctgcacatgaaagacttggagatccaggactaccaagagagtggagctaccctcataagagaccgcctcaagactgagccctttgaagaaaactccttccttgagcaattcatgattgagaagctgccagaggcttgtagtataggggatggaaaaccctttgtcatgaatttgcaggatctctacatggcggtcaccactcaggaagttcaggtgggccagaagcatcagggcgctggagatccccacacatcaaactctgcgtctctgcagggaatcgatagtcagtgtgtgaaccaaccagagcaactggtgagtagcgctccaacactctccgctccggagaaggaaagcacagccctctgcagggacctgagctgccaacgttcccggggaaggagccagggggtgtcttctgtgaacctgttatggcctcagctgctgagaatggacctggagaattccttccaggcctctccgtag

SEQ ID NO: 216819 - DNA, 690 bp, Artificial Sequence
  derived and/or modified sequence
atggaggagctggaacagggcttactcatgcagccttgggcctggctccagttggctgaaaacagccttctggcaaaggtgttcattacgaaacaggggtacgcgctgctcgtgagcgatcttcagcaggtgtggcacgagcaggtcgacacctccgtggtgagccagagagccaaagaactaaacaaacgtcttactgctccacccgcagctttcttatgccacctggataacctgctgagaccacttctcaaagatgccgctcatccatctgaggcaaccttctcttgtgactgtgttgcagacgcacttatcctgcgggttcggagtgagctgagcggcctgcctttctattggaattttcattgcatgctggcctcccccagcctggtttcccaacacttgatcagaccgcttatgggtatgtcactggctcttcaatgtcaggtaagggaactggctactctgcttcacatgaaggacctagagatccaagattaccaggaaagcggagctacccttataagagaccgactgaaaaccgagcccttcgaggaaaattcctttctcgagcagttcatgatcgagaagctgcccgaggcttgcagtattggcgatggtaaaccatttgttatgaacctgcaggacctctatatggctgtgaccacacaggaggtgcaggtcggatag

SEQ ID NO: 216820 - DNA, 900 bp, Artificial Sequence
  derived and/or modified sequence
atggaggagctggagcagggcctgctgatgcagccctgggcctggctgcagctggccgagaacagcctgctggccaaggtgttcatcaccaagcagggctacgccctgctggtgagcgacctgcagcaggtgtggcacgagcaggtggacaccagcgtggtgagccagagagccaaggagctgaacaagagactgaccgccccccccgccgccttcctgtgccacctggacaacctgctgagacccctgctgaaggacgccgcccaccccagcgaggccaccttcagctgcgactgcgtggccgacgccctgatcctgagagtgagaagcgagctgagcggcctgcccttctactggaacttccactgcatgctggccagccccagcctggtgagccagcacctgatcagacccctgatgggcatgagcctggccctgcagtgccaggtgagagagctggccaccctgctgcacatgaaggacctggagatccaggactaccaggagagcggcgccaccctgatcagagacagactgaagaccgagcccttcgaggagaacagcttcctggagcagttcatgatcgagaagctgcccgaggcctgcagcatcggcgacggcaagcccttcgtgatgaacctgcaggacctgtacatggccgtgaccacccaggaggtgcaggtgggccagaagcaccagggcgccggcgacccccacaccagcaacagcgccagcctgcagggcatcgacagccagtgcgtgaaccagcccgagcagctggtgagcagcgcccccaccctgagcgcccccgagaaggagagcaccggcaccagcggccccctgcagagaccccagctgagcaaggtgaagagaaagaagcccagaggcctgttcagctag

SEQ ID NO: 216821 - DNA, 951 bp, Artificial Sequence
  derived and/or modified sequence
atggaggagctggagcagggcctgctgatgcagccctgggcctggctgcagctggccgagaacagcctgctggccaaggtgttcatcaccaagcagggctacgccctgctggtgagcgacctgcagcaggtgtggcacgagcaggtggacaccagcgtggtgagccagagagccaaggagctgaacaagagactgaccgccccccccgccgccttcctgtgccacctggacaacctgctgagacccctgctgaaggacgccgcccaccccagcgaggccaccttcagctgcgactgcgtggccgacgccctgatcctgagagtgagaagcgagctgagcggcctgcccttctactggaacttccactgcatgctggccagccccagcctggtgagccagcacctgatcagacccctgatgggcatgagcctggccctgcagtgccaggtgagagagctggccaccctgctgcacatgaaggacctggagatccaggactaccaggagagcggcgccaccctgatcagagacagactgaagaccgagcccttcgaggagaacagcttcctggagcagttcatgatcgagaagctgcccgaggcctgcagcatcggcgacggcaagcccttcgtgatgaacctgcaggacctgtacatggccgtgaccacccaggaggtgcaggtgggccagaagcaccagggcgccggcgacccccacaccagcaacagcgccagcctgcagggcatcgacagccagtgcgtgaaccagcccgagcagctggtgagcagcgcccccaccctgagcgcccccgagaaggagagcaccgccctgtgcagagacctgagctgccagagaagcagaggcagaagccagggcgtgagcagcgtgaacctgctgtggccccagctgctgagaatggacctggagaacagcttccaggccagcccctag

SEQ ID NO: 216822 - DNA, 690 bp, Artificial Sequence
  derived and/or modified sequence
atggaggagctggagcagggcctgctgatgcagccctgggcctggctgcagctggccgagaacagcctgctggccaaggtgttcatcaccaagcagggctacgccctgctggtgagcgacctgcagcaggtgtggcacgagcaggtggacaccagcgtggtgagccagagagccaaggagctgaacaagagactgaccgccccccccgccgccttcctgtgccacctggacaacctgctgagacccctgctgaaggacgccgcccaccccagcgaggccaccttcagctgcgactgcgtggccgacgccctgatcctgagagtgagaagcgagctgagcggcctgcccttctactggaacttccactgcatgctggccagccccagcctggtgagccagcacctgatcagacccctgatgggcatgagcctggccctgcagtgccaggtgagagagctggccaccctgctgcacatgaaggacctggagatccaggactaccaggagagcggcgccaccctgatcagagacagactgaagaccgagcccttcgaggagaacagcttcctggagcagttcatgatcgagaagctgcccgaggcctgcagcatcggcgacggcaagcccttcgtgatgaacctgcaggacctgtacatggccgtgaccacccaggaggtgcaggtgggctag

SEQ ID NO: 216823 - protein, 902 aa, Artificial Sequence
  derived and/or modified sequence
MFPALETHLKQTIPDPYEDFMYRHLQYYGYFKAQRGSLPNSATHQHVRKNNPQCLLNGSLGEKDDLIPDTLQKEKLLWPISLSSAVHRQIEAINRDFHSCLGWMQWRGLSSLQPPPPRFKDSPASAFRVAGITDSHMLSLPHLRSRQLLYDELDEVNPRLREPQELFSILSTKRPLQAPRWPIECEVIKENIHHIEWAPPQPEYFYQPKGNEKVPEIVGEKKGTVVYQLDSVPIEGSYFTSSRVGGKRGIVKELAVTLQGPEDNTLLFESRFESGNLQKAVRVDTYEYELTLRTDLYTNKHTQWFYFRVQNTRKDATYRFTIVNLLKPKSLYTVGMKPLLYSQLDANTRNIGWRREGNEIKYYKNNTDDGQQPFYCLTWTIQFPYDQDTCFFAHFYPYTYTDLQCYLLSVANNPIQSQFCKLQTLCRSLAGNTVYLLTITNPSQTPQEAAAKKAVVLSARVHPGESNGSWVMKGFLDFILSNSPDAQLLRDIFVFKVLPMLNPDGVIVGNYRCSLAGRDLNRHYKTILKESFPCIWYTRNMIKRLLEEREVLLYCDFHGHSRKNNIFLYGCNNNNRKYWLHERVFPLMLCKNAPDKFSFHSCNFKVQKCKEGTGRVVMWRMGILNSYTMESTFGGSTLGNKRDTHFTIEDLKSLGYHVCDTLLDFCDPDQMKFTQCLAELKELLRQEIHKKFHELGQDVDLEGSWSDISLSDIESSTSGSDSSLSDGLPVHLANIADELTQKKKMFKKKKKKSLQTRKQRNEQYQKKNLMQKLKLTEDTSEKAGFASTLQKQPTFFKNSENSSFLPMKNENPRLNETNLNRRDKDTPLDPSMATLILPKNKGRMQNKKPGFTVSCSPKRTINSSQEPAPGMKPNWPRSRYPATKRGCAAMAAYPSLHIYTYP

SEQ ID NO: 216824 - protein, 904 aa, Artificial Sequence
  derived and/or modified sequence
MFPALETHLKQTIPDPYEDFMYRHLQYYGYFKAQRGSLPNSATHQHVRKNNPQCLLNGSLGEKDDLIPDTLQKEKLLWPISLSSAVHRQIEAINRDFHSCLGWMQWRGLSSLQPPPPRFKDSPASAFRVAGITDSHMLSLPHLRSRQLLYDELDEVNPRLREPQELFSILSTKRPLQAPRWPIECEVIKENIHHIEWAPPQPEYFYQPKGNEKVPEIVGEKKGTVVYQLDSVPIEGSYFTSSRVGGKRGIVKELAVTLQGPEDNTLLFESRFESGNLQKAVRVDTYEYELTLRTDLYTNKHTQWFYFRVQNTRKDATYRFTIVNLLKPKSLYTVGMKPLLYSQLDANTRNIGWRREGNEIKYYKNNTDDGQQPFYCLTWTIQFPYDQDTCFFAHFYPYTYTDLQCYLLSVANNPIQSQFCKLQTLCRSLAGNTVYLLTITNPSQTPQEAAAKKAVVLSARVHPGESNGSWVMKGFLDFILSNSPDAQLLRDIFVFKVLPMLNPDGVIVGNYRCSLAGRDLNRHYKTILKESFPCIWYTRNMIKRLLEEREVLLYCDFHGHSRKNNIFLYGCNNNNRKYWLHERVFPLMLCKNAPDKFSFHSCNFKVQKCKEGTGRVVMWRMGILNSYTMESTFGGSTLGNKRDTHFTIEDLKSLGYHVCDTLLDFCDPDQMKFTQCLAELKELLRQEIHKKFHELGQDVDLEGSWSDISLSDIESRNSTSGSDSSLSDGLPVHLANIADELTQKKKMFKKKKKKSLQTRKQRNEQYQKKNLMQKLKLTEDTSEKAGFASTLQKQPTFFKNSENSSFLPMKNENPRLNETNLNRRDKDTPLDPSMATLILPKNKGRMQNKKPGFTVSCSPKRTINSSQEPAPGMKPNWPRSRYPATKRGCAAMAAYPSLHIYTYP

SEQ ID NO: 216825 - DNA, 2715 bp, Artificial Sequence
  derived and/or modified sequence
atgttccccgccctggagacccacctgaagcagaccatccccgacccctacgaggacttcatgtacagacacctgcagtactacggctacttcaaggcccagagaggcagcctgcccaacagcgccacccaccagcacgtgagaaagaacaacccccagtgcctgctgaacggcagcctgggcgagaaggacgacctgatccccgacaccctgcagaaggagaagctgctgtggcccatcagcctgagcagcgccgtgcacagacagatcgaggccatcaacagagacttccacagctgcctgggctggatgcagtggagaggcctgagcagcctgcagccccccccccccagattcaaggacagccccgccagcgccttcagagtggccggcatcaccgacagccacatgctgagcctgccccacctgagaagcagacagctgctgtacgacgagctggacgaggtgaaccccagactgagagagccccaggagctgttcagcatcctgagcaccaagagacccctgcaggcccccagatggcccatcgagtgcgaggtgatcaaggagaacatccaccacatcgagtgggcccccccccagcccgagtacttctaccagcccaagggcaacgagaaggtgcccgagatcgtgggcgagaagaagggcaccgtggtgtaccagctggacagcgtgcccatcgagggcagctacttcaccagcagcagagtgggcggcaagagaggcatcgtgaaggagctggccgtgaccctgcagggccccgaggacaacaccctgctgttcgagagcagattcgagagcggcaacctgcagaaggccgtgagagtggacacctacgagtacgagctgaccctgagaaccgacctgtacaccaacaagcacacccagtggttctacttcagagtgcagaacaccagaaaggacgccacctacagattcaccatcgtgaacctgctgaagcccaagagcctgtacaccgtgggcatgaagcccctgctgtacagccagctggacgccaacaccagaaacatcggctggagaagagagggcaacgagatcaagtactacaagaacaacaccgacgacggccagcagcccttctactgcctgacctggaccatccagttcccctacgaccaggacacctgcttcttcgcccacttctacccctacacctacaccgacctgcagtgctacctgctgagcgtggccaacaaccccatccagagccagttctgcaagctgcagaccctgtgcagaagcctggccggcaacaccgtgtacctgctgaccatcaccaaccccagccagaccccccaggaggccgccgccaagaaggccgtggtgctgagcgccagagtgcaccccggcgagagcaacggcagctgggtgatgaagggcttcctggacttcatcctgagcaacagccccgacgcccagctgctgagagacatcttcgtgttcaaggtgctgcccatgctgaaccccgacggcgtgatcgtgggcaactacagatgcagcctggccggcagagacctgaacagacactacaagaccatcctgaaggagagcttcccctgcatctggtacaccagaaacatgatcaagagactgctggaggagagagaggtgctgctgtactgcgacttccacggccacagcagaaagaacaacatcttcctgtacggctgcaacaacaacaacagaaagtactggctgcacgagagagtgttccccctgatgctgtgcaagaacgcccccgacaagttcagcttccacagctgcaacttcaaggtgcagaagtgcaaggagggcaccggcagagtggtgatgtggagaatgggcatcctgaacagctacaccatggagagcaccttcggcggcagcaccctgggcaacaagagagacacccacttcaccatcgaggacctgaagagcctgggctaccacgtgtgcgacaccctgctggacttctgcgaccccgaccagatgaagttcacccagtgcctggccgagctgaaggagctgctgagacaggagatccacaagaagttccacgagctgggccaggacgtggacctggagggcagctggagcgacatcagcctgagcgacatcgagagcagaaacagcaccagcggcagcgacagcagcctgagcgacggcctgcccgtgcacctggccaacatcgccgacgagctgacccagaagaagaagatgttcaagaagaagaagaagaagagcctgcagaccagaaagcagagaaacgagcagtaccagaagaagaacctgatgcagaagctgaagctgaccgaggacaccagcgagaaggccggcttcgccagcaccctgcagaagcagcccaccttcttcaagaacagcgagaacagcagcttcctgcccatgaagaacgagaaccccagactgaacgagaccaacctgaacagaagagacaaggacacccccctggaccccagcatggccaccctgatcctgcccaagaacaagggcagaatgcagaacaagaagcccggcttcaccgtgagctgcagccccaagagaaccatcaacagcagccaggagcccgcccccggcatgaagcccaactggcccagaagcagataccccgccaccaagagaggctgcgccgccatggccgcctaccccagcctgcacatctacacctacccctag

SEQ ID NO: 216826 - DNA, 2709 bp, Artificial Sequence
  derived and/or modified sequence
atgtttcctgccctggagacccacttgaagcagactatcccagatccctatgaagatttcatgtatcgccacctccagtattacgggtattttaaggctcagaggggcagcttaccgaactccgccacccaccagcacgtgcggaagaataacccacagtgccttttaaacggctcactcggggagaaagacgacctgatccctgacaccctgcagaaggagaaactcctgtggcccatttccctctcctcagcagtccatcgccaaatcgaggccatcaatcgcgacttccatagctgcttagggtggatgcagtggcgcgggctttctagcctccagccaccccccccacgatttaaagactccccggcttcagctttccgtgtggctgggattacagactcacacatgctctcgcttccacacctgcgatctagacaattactgtatgacgaacttgatgaggtcaacccccgcctaagagagccacaggaattgttctccattttaagtacaaagcgcccattgcaggcaccgagatggcccatagaatgtgaggtgatcaaggaaaatattcaccatattgagtgggctccccctcagccggagtatttttaccaacctaaaggcaatgagaaggttcccgagatcgtgggcgagaagaaaggaaccgtcgtgtaccagctagactcagtgcctattgaggggtcatacttcacctcctccagagtggggggtaagcgagggattgtcaaagagcttgcggtgacattgcaaggccctgaggataataccctgctatttgaatctagatttgagtccgggaacctgcaaaaagcagtgcgcgtcgacacctatgagtatgagctgacattgcgtaccgatctgtatacaaacaagcatacgcagtggttttactttagggtgcagaatacgcgcaaggacgctacttaccggttcacaattgtaaatttgctgaagcctaagagcctctacaccgtcgggatgaaaccattgttgtactcccagctggatgcaaacaccagaaacattggctggcgtcgggagggaaatgagatcaagtactacaagaataataccgacgatggtcagcagcccttctactgtctgacatggactattcaattcccatacgatcaggacacctgcttctttgcccacttctatccctacacgtataccgacctgcagtgttacctgctgtcagtcgctaataacccaattcagtctcagttctgcaagttacaaacactgtgcaggtccctggccggcaatacggtgtacctcttgactatcactaaccctagccagacacctcaggaggcggccgctaagaaagccgtggtcttgagcgcaagggtccatcccggagagagtaatggtagctgggtgatgaaaggtttccttgattttattttgagcaattcaccagatgcccagctgttaagggatatcttcgttttcaaagttctgccaatgctcaatccagatggagttatcgtggggaattatcgctgctccctggctggccgcgacctgaacaggcactacaaaacaatactcaaagagagttttccttgcatatggtacacaagaaatatgattaaaagactattagaggaaagggaggtgcttctgtactgtgattttcacggtcatagccggaagaacaatatcttcttatacggctgtaacaataataatcggaaatactggttgcacgaacgcgtttttccgttaatgctctgcaaaaacgcccccgataaattttcattccacagttgtaatttcaaggttcagaagtgtaaggaagggacgggccgggttgtcatgtggcgcatgggcatcctgaattcatatacaatggagagcacctttggcggctccacactcgggaacaagcgcgacacccatttcaccatcgaggatctaaagtctctcggctatcacgtgtgcgatactttactggatttctgcgaccctgaccagatgaagtttacgcagtgtctggcagaacttaaggaactgcttcgacaggagatccataagaaattccatgagctcgggcaggacgtggacctggaggggtcgtggagtgacatttccctctcagacatagagagttcaacgtctggcagtgatagttcattgagtgacggactgcccgttcacttggcaaatatagccgacgaacttacccagaagaaaaagatgttcaagaaaaagaaaaagaaatctttacagacacgaaaacagcgcaacgaacagtatcaaaagaagaacctcatgcagaaactaaagctgaccgaagacacttccgaaaaagcgggatttgcatctaccttgcaaaagcagcccacattctttaagaattcagagaacagcagcttcctcccaatgaaaaatgagaaccccaggctcaacgaaactaacctgaacaggcgcgataaagatacccctctggacccatcaatggctacacttattcttcctaagaataagggacggatgcaaaacaaaaaacctggcttcaccgtctcatgctcacctaaacggaccattaacagcagccaggagcccgcgccaggcatgaaaccgaattggccacggagccgatatcccgccactaagagaggatgcgcagcaatggcagcttacccttctctgcatatctacacttacccatag

SEQ ID NO: 216827 - DNA, 3395 bp, Artificial Sequence
  derived and/or modified sequence
cttctcttgtgtaatcagctgcctatttggaaattgggcagggtttgcgactggatgctaatgtcactgactagttttcagcctaccatccagaagtaacatgttcccagctttggaaacgcacctaaagcagactattcctgatccttatgaagactttatgtaccgtcacctccaatattatggctactttaaagctcagagaggcagtttaccaaactctgctacgcatcagcatgttcggaagaataaccctcaatgcctgttgaatggctctcttggggaaaaagatgatttgataccagacaccctgcaaaaggagaagcttctatggcctatcagtttatcttcagctgtgcacagacagatagaagccatcaacagagactttcactcttgcctgggctggatgcagtggcgcggcctcagctcactgcaacctccacctcccagattcaaggattctcctgcctcagctttccgagtagctgggattacagattcacatatgctgagtttaccacatcttaggagcagacagcttctttatgatgagttggatgaagtaaacccacgtcttcgagaaccccaagagctcttttccattttgtctaccaagaggccactgcaggctccaagatggccaattgaatgtgaggtcatcaaggaaaacatccatcatattgagtgggctccacctcaaccagaatatttctatcagcctaaaggaaatgaaaaggtaccagagattgtaggagagaaaaaaggaacagttgtctatcaattagattcagtgcctatagaaggttcctattttaccagttccagagtgggaggcaaacgaggaattgtcaaggaacttgctgtcacgttgcaaggaccagaagataatactctactgtttgaatcaaggtttgagagtgggaatctgcaaaaagctgtcagagtagacacctatgagtatgaactcaccttgcgaactgacctctacactaacaaacacactcagtggttttattttcgtgttcagaacaccagaaaagatgctacctatcgcttcaccattgtcaacttgctaaaacccaagagtctttatactgtagggatgaagccactcttgtactcccaattggatgccaacacccgcaatattggctggaggagagaaggaaatgaaatcaagtactacaagaacaacacggatgatgggcagcagcccttctactgtctcacgtggaccattcagtttccatatgaccaggacacttgcttctttgcacacttctacccatatacatacactgatttgcaatgctacctcctgtcagtggcaaacaaccctatccagtctcagttctgcaagctccaaactttatgcaggagcctagcaggaaataccgtttacttgctcaccatcaccaacccatcccagacccctcaagaggcagctgcaaagaaagctgtggtcttgagtgccagagttcaccctggagaaagtaatggctcctgggttatgaaaggctttttggacttcatccttagcaactccccagatgcccagctcctcagagatatttttgtcttcaaggtgcttcccatgttaaatccagatggtgtgattgtggggaattatcggtgttccttggccggaagggatttgaacaggcattataaaaccattctgaaggagtctttcccttgtatttggtacaccaggaacatgatcaaaagacttcttgaagaaagagaggttctgttgtattgtgatttccatggccacagtcgtaagaataatatcttcctgtatggctgtaataacaacaatcgcaaatactggcttcatgaacgagtctttcctttaatgttatgcaaaaatgcaccagataagttctcttttcacagttgtaattttaaggtccaaaaatgcaaagaaggaacaggacgagttgttatgtggcggatgggaatcctaaacagctacaccatggagtctacctttggcgggtccaccctgggtaataaaagagacacccactttaccatcgaagatctgaagtccttaggttatcatgtctgtgacacccttctggacttttgtgatcctgaccaaatgaagttcactcagtgtctagcagagcttaaggagcttttacgacaggaaatccacaagaaattccatgaacttggacaagatgtagatttagaaggaagttggagtgacatctctttgtctgacattgaatccagaaacagcaccagtggctctgacagttctctctcagatggtcttcctgttcacctagcaaacatagcagatgagctgactcagaaaaagaagatgtttaagaagaaaaaaaagaagtcacttcagactaggaaacagcgaaatgagcagtatcagaaaaaaaatttgatgcagaagttaaagttaacagaagatacctcagaaaaggcaggatttgcttctactctgcaaaagcagccaacctttttcaaaaactcagagaattccagttttttaccaatgaaaaatgaaaacccaaggttaaatgagacaaatttaaatagaagagacaaagacacccccctggacccatcaatggccaccctgattctgcctaagaataaagggagaatgcagaataagaagccaggctttacagtatcatgctctccaaagagaaccataaactccagccaagagccagctccaggtatgaagccaaactggcctaggagcagatatcctgccacaaagagaggctgtgctgccatggcggcatacccatccttgcacatatacacatacccgtaggtgagcctgggctgtgccacacaagcacttcatcgggggttttgagattagacacattttataatgggggagatgtatgactgggaactgcatttacttgtggtatactgtgttgtgcactcatgcactgaccttacactttgtacttacactgtgggcatgtggtcaagatgcatacctcatgaattcaactattttttcataaaatgaaattttattatgatgtgtaaaaatgctttatcagaaactgaagtgtgttctcatggcacacttcatggcagcacagatatacctcattttaaccaatagatattctctctaaaattatgtgcaaatcaatttttaaaaatcaaaatctatgttaaacacattttggcagtgtgctataataaaaaaaagtgttgtgtcaaagctttctagtgacggtcagtcctactgctgtatgtcaggtttgctcacaatgaggtattcccacatagaaataacaatgcatgtattacccagaatttaatgttgcgtaccttatgttcaatgaggttttgtaatttttttaggctgatgattaaaattctttctctct

SEQ ID NO: 216828 - DNA, 2715 bp, Artificial Sequence
  derived and/or modified sequence
atgttccctgcactagaaactcacctgaaacagaccatccccgacccttatgaagattttatgtatcgacacctccagtactatggctatttcaaagctcagagaggctctttacctaactctgctacgcaccaacatgtgaggaaaaataatccccaatgcctgctcaatggttcccttggcgaaaaagatgacctgatacccgacacactgcagaaggaaaaactgttgtggcctatttcattatcctccgccgtccatcgccagatagaagctattaatcgtgacttccatagctgcctgggttggatgcaatggagaggattaagtagcctgcaacctcctccgcccaggttcaaggacagccccgcgagtgcttttcgggtcgccggcataaccgattctcacatgctgagccttccacacttgagaagcagacagcttttatacgatgaattggatgaagtaaatccacgtctccgggagccccaggagctcttcagtatactgagcaccaaaaggccactgcaagcaccccgttggcctatcgagtgcgaagttattaaggagaatattcatcacatcgagtgggcgccccctcagcccgaatacttctaccaacccaagggcaatgaaaaagtcccggaaatcgtgggcgagaaaaaaggcaccgtagtgtaccagctggactctgtgccgatagagggttcctattttacatcttccagggtaggcgggaaacgggggatagtcaaggaactggctgttacccttcaaggtccagaagacaacacgctcctgttcgaatcccggtttgagagcgggaacctgcagaaggcggtgagggtggacacatacgaatacgagctcaccctgcgaactgacctttatacaaataaacacacacagtggttctactttagggtgcagaacacaaggaaagacgctacatatcgtttcactatcgtgaatttgttgaagcctaagtccttgtacaccgtcggcatgaagcctttgctatactcacagctggatgctaacactagaaatatcgggtggcgccgagaaggtaatgagatcaagtactataagaataataccgatgacggccagcagccattttattgtctgacgtggaccatccaattcccatatgatcaggacacgtgcttctttgctcatttctatccctatacttacacagatctccagtgctacttactgagtgtcgctaacaacccgatccagtcccagttttgcaagcttcagacactgtgtcgtagcctggccggcaacaccgtttatttgctcaccattacaaatcccagccagaccccccaggaggctgctgcaaagaaagccgtggtgttaagtgctagagtgcatcctggcgagtctaacgggagctgggtaatgaaaggctttctagatttcatcttgtctaattcccctgacgcacagttgctgcgggatatctttgtgtttaaggtcttaccaatgcttaatcctgacggggttattgtcggaaactaccgatgctcactggctggacgagacctgaacaggcactacaaaaccatattaaaggaaagtttcccttgtatttggtatacacgcaatatgatcaaacggctgctggaggagagagaggttttgctgtattgcgactttcatggacactcccgtaagaacaacatctttctgtatggctgcaataataacaacagaaaatattggttgcacgagagagtcttcccactgatgctatgtaagaacgctccggacaagttctcattccattcctgcaacttcaaggtgcaaaaatgcaaggaggggacagggagagtggtaatgtggaggatgggcatcctcaattcgtataccatggagtccacctttggcggatccacacttgggaacaagagagatacacatttcactattgaagacctgaagtctcttggttaccacgtgtgcgatacactacttgatttctgcgatcctgatcagatgaagtttacacaatgcctggctgaactgaaggaactcctgcgacaggaaattcacaaaaaattccacgaactggggcaagacgtggacctggaaggcagttggagcgacatcagcctttcagatattgagagcaggaattctacgtctggttccgacagcagtttgtcagacggcctccctgttcacctcgccaacattgcggatgagctcacacagaaaaagaagatgttcaaaaagaagaaaaagaagtcccttcagacccgaaaacagagaaacgagcagtaccaaaagaaaaatctcatgcagaaacttaaacttaccgaggatacctcggaaaaagccggctttgccagcacactgcagaagcaaccgactttttttaagaactccgaaaatagttccttcctgcccatgaagaacgagaatccgcggcttaacgagacaaatctgaatcgccgtgacaaggacacacctctggatcctagcatggccacgctgatcctgcctaagaataagggccggatgcaaaacaagaaacccggcttcacagtatcgtgcagcccaaaacgcacaatcaattccagtcaggaaccagctccagggatgaaacccaattggccccgctcccgatacccagcgaccaaaagagggtgtgctgcgatggcggcctatcccagccttcacatctatacatatccgtag

SEQ ID NO: 216829 - DNA, 2709 bp, Artificial Sequence
  derived and/or modified sequence
atgtttccagctctcgaaacacacctgaagcagacaattccggatccttatgaggactttatgtatcgccacctgcagtactacggctactttaaggctcagaggggctccctcccaaactctgccacacatcagcatgtgaggaagaataacccgcagtgccttttgaatgggtctctcggggagaaggatgacttaatacccgatacactgcagaaagagaaattactgtggcctatctcacttagtagcgccgtgcatcggcaaatcgaagctatcaatagggacttccactcgtgtctcggttggatgcagtggcgtggattgagttcactccagcctcccccgccccggtttaaagatagcccagctagcgcatttagagtggccggaattacagattcccatatgctgagcctgccacacctgaggagtcgacagttgctgtatgacgaactcgacgaagtgaacccccgactgcgggagccccaagaactattttctatcctatccacgaagcgaccattacaagcaccccgctggccaatcgaatgcgaagttatcaaagagaatattcaccacattgaatgggcccccccccaaccggagtatttctaccaaccaaaggggaacgagaaggtacctgagatcgttggcgagaagaaagggaccgtagtataccagctcgactctgtccctatagagggttcctacttcacttctagccgggtaggtggcaagcgcgggatcgttaaagaactggccgtcactcttcaaggccctgaggacaacacgttgttgttcgagtccagatttgagtcgggtaatcttcagaaagcagtccgtgttgacacatatgagtacgagctgactctgcggaccgatctgtatactaataagcacacccagtggttttactttagagttcagaataccaggaaggatgccacctatcggttcacaatcgtaaatctcctgaaacctaaatccttatacaccgtaggcatgaagccactcctgtatagccagcttgacgccaacacacgaaacatcggctggaggcgagagggcaacgagatcaagtattacaaaaataatactgacgatggacagcagcccttttattgcctcacctggacaattcaattcccctacgatcaggacacatgtttttttgcccatttctacccatatacttacaccgatctgcagtgctatttgctgtctgtcgcaaataacccaatccagagccagttctgcaaactgcagaccctctgcaggtcccttgccggcaatacagtgtacctgctgacaattacgaaccccagccagacccctcaggaggcagctgctaaaaaagctgtagtgctgagcgcaagggttcatccgggtgaatccaacggctcatgggttatgaagggatttctggacttcatactatctaattctccagacgcacaactcctccgagacattttcgtgttcaaggttctacccatgctaaatcctgacggcgttatcgtgggcaactaccgctgcagcctcgccgggcgcgacctgaaccgccattacaagaccatactcaaagagtcattcccatgcatttggtacactcgaaacatgattaagcgcctgctggaggaaagggaggttcttctgtactgcgactttcacggtcactcccgcaagaataatatcttcctgtatggatgcaacaacaacaaccgaaaatactggctgcatgagcgcgtgtttccccttatgctctgtaaaaacgcacccgacaagttttctttccattcttgtaactttaaggtgcagaaatgtaaagaaggtactggtcgcgtcgttatgtggcggatgggaattctgaatagttacactatggaaagtacatttggcggctcaactctcgggaataagagagacacccatttcactatcgaagatctaaagtcgctcggatatcatgtttgcgacactctgttggacttttgtgacccagatcagatgaagtttactcagtgcttagctgagctcaaagagctgctgaggcaagagatacacaaaaaatttcacgagctcggtcaagatgtggacctggagggttcctggagtgacatttctctctctgacattgagagtagcacaagtggctctgattcaagtctgagcgacggtctgcccgttcaccttgctaacatagccgacgaactcacacagaagaagaagatgttcaagaaaaagaaaaagaaaagccttcaaacaagaaaacagaggaacgaacagtaccagaaaaaaaacctgatgcagaaactgaagctgacagaggacacatcagaaaaggccggcttcgcctctactcttcagaagcaacccacatttttcaaaaactccgagaatagctcctttctgcccatgaaaaacgagaatccccgccttaacgaaaccaacctgaacagacgcgacaaggacacccctctggaccccagcatggccacactcatccttcctaaaaataaaggccgcatgcagaataagaaaccaggctttactgtgagctgctcacccaagcgaacaattaattctagccaggagccagctcctgggatgaagcccaactggccaagaagtaggtacccagcaacaaaacgggggtgcgctgcgatggccgcctatccttctttacacatctacacctacccttag

SEQ ID NO: 216830 - DNA, 2709 bp, Artificial Sequence
  derived and/or modified sequence
atgtttcctgccctggagacccacctgaagcagaccatcccagacccctatgaggacttcatgtaccgccacctgcagtactacggctacttcaaggcccagaggggcagcctgcccaacagcgccacccaccagcacgtgaggaagaacaacccccagtgcctgctgaatggcagcctgggggagaaggatgacctgatcccagacaccctgcagaaggagaagctgctgtggcccatcagcctgagcagcgctgtgcaccggcagatcgaggccatcaacagagacttccacagctgcctgggctggatgcagtggaggggcctgagcagcctgcagcccccaccaccccgcttcaaggacagccctgccagcgccttccgggtggccggcatcacagacagccacatgctgagcctgccccacctgcggagccggcagctgctgtatgatgagctggatgaggtgaacccccggctgcgggagccccaggagctgttcagcatcctgagcaccaagaggcccctgcaggccccccgctggcccattgaatgtgaggtgatcaaggagaacatccaccacatcgagtgggccccaccccagcctgagtacttctaccagcccaagggaaatgagaaggtgcctgagatcgtgggggagaagaagggcaccgtggtgtaccagctggacagcgtgcccatcgagggcagctacttcaccagcagccgggtgggcggcaagaggggcatcgtgaaggagctggccgtgaccctgcagggccctgaggacaacaccctgctgtttgagagcagatttgagagcggcaacctgcagaaggctgtgcgggtggacacctatgaatatgagctgaccctgaggacagacctgtacaccaacaagcacacccagtggttctacttccgggtgcagaacaccaggaaggatgccacctaccgcttcaccatcgtgaacctgctgaagcccaagagcctgtacacagtgggcatgaagcccctgctgtacagccagctggatgccaacaccagaaatattggctggaggcgggagggcaatgagatcaagtactacaagaacaacacagatgatggccagcagcccttctactgcctgacctggaccatccagttcccctatgaccaggacacctgcttctttgcccacttctacccctacacctacacagacctgcagtgctacctgctgtctgtggccaacaaccccatccagagccagttctgcaagctgcagaccctgtgccgcagcctggccggcaacacagtgtacctgctgaccatcaccaaccccagccagaccccccaggaggccgccgccaagaaggctgtggtgctgagcgcccgggtgcaccctggagagagcaatggctcctgggtgatgaagggcttcctggacttcatcctgagcaacagcccagatgcccagctgctgcgggacatctttgtgttcaaggtgctgcccatgctgaacccagatggagtgattgtgggcaactaccgctgcagcctggccggccgggacctgaacagacactacaagaccatcctgaaggagagcttcccctgcatctggtacaccaggaacatgatcaagaggctgctggaggagcgggaggtgctgctgtactgtgacttccacggccacagcaggaagaacaacatcttcctgtatggctgcaacaacaacaacaggaagtactggctgcacgagagggtcttccccctgatgctgtgcaagaatgccccagacaagttctccttccacagctgcaacttcaaggtgcagaagtgcaaggagggcaccggccgggtggtgatgtggaggatgggcatcctgaacagctacaccatggagagcacctttggaggcagcaccctgggcaacaagagggacacccacttcaccatcgaggacctgaagagcctgggctaccacgtgtgtgacaccctgctggacttctgtgaccctgaccagatgaagttcacccagtgcctggccgagctgaaggagctgctgcggcaggagatccacaagaagttccacgagctgggccaggatgtggacctggagggctcctggagcgacatcagcctgagtgacatcgagagcagcaccagcggcagtgacagcagcctgagtgatggcctgcctgtgcacctggccaacattgctgatgagctgacccagaagaagaagatgttcaagaagaagaagaagaagagcctgcagaccaggaagcagagaaatgagcagtaccagaagaagaacctgatgcagaagctgaagctgacagaggacaccagcgagaaggccggctttgccagcaccctgcagaagcagcccaccttcttcaagaacagcgagaacagcagcttcctgcccatgaagaatgaaaacccccggctgaatgagaccaacctgaacagaagagacaaggacacccccctggaccccagcatggccaccctcatcctgcccaagaacaagggccgcatgcagaacaagaagccaggcttcaccgtgtcctgcagccccaagaggaccatcaacagcagccaggagcccgcccctggcatgaagcccaactggcccaggagccgctacccagccaccaagaggggctgtgccgccatggccgcctaccccagcctgcacatctacacctacccctag

SEQ ID NO: 216831 - DNA, 2715 bp, Artificial Sequence
  derived and/or modified sequence
atgtttcctgccctggagacccacctgaagcagaccatcccagacccctatgaggacttcatgtaccgccacctgcagtactacggctacttcaaggcccagaggggcagcctgcccaacagcgccacccaccagcacgtgaggaagaacaacccccagtgcctgctgaatggcagcctgggggagaaggatgacctgatcccagacaccctgcagaaggagaagctgctgtggcccatcagcctgagcagcgctgtgcaccggcagatcgaggccatcaacagagacttccacagctgcctgggctggatgcagtggaggggcctgagcagcctgcagcccccaccaccccgcttcaaggacagccctgccagcgccttccgggtggccggcatcacagacagccacatgctgagcctgccccacctgcggagccggcagctgctgtatgatgagctggatgaggtgaacccccggctgcgggagccccaggagctgttcagcatcctgagcaccaagaggcccctgcaggccccccgctggcccattgaatgtgaggtgatcaaggagaacatccaccacatcgagtgggccccaccccagcctgagtacttctaccagcccaagggaaatgagaaggtgcctgagatcgtgggggagaagaagggcaccgtggtgtaccagctggacagcgtgcccatcgagggcagctacttcaccagcagccgggtgggcggcaagaggggcatcgtgaaggagctggccgtgaccctgcagggccctgaggacaacaccctgctgtttgagagcagatttgagagcggcaacctgcagaaggctgtgcgggtggacacctatgaatatgagctgaccctgaggacagacctgtacaccaacaagcacacccagtggttctacttccgggtgcagaacaccaggaaggatgccacctaccgcttcaccatcgtgaacctgctgaagcccaagagcctgtacacagtgggcatgaagcccctgctgtacagccagctggatgccaacaccagaaatattggctggaggcgggagggcaatgagatcaagtactacaagaacaacacagatgatggccagcagcccttctactgcctgacctggaccatccagttcccctatgaccaggacacctgcttctttgcccacttctacccctacacctacacagacctgcagtgctacctgctgtctgtggccaacaaccccatccagagccagttctgcaagctgcagaccctgtgccgcagcctggccggcaacacagtgtacctgctgaccatcaccaaccccagccagaccccccaggaggccgccgccaagaaggctgtggtgctgagcgcccgggtgcaccctggagagagcaatggctcctgggtgatgaagggcttcctggacttcatcctgagcaacagcccagatgcccagctgctgcgggacatctttgtgttcaaggtgctgcccatgctgaacccagatggagtgattgtgggcaactaccgctgcagcctggccggccgggacctgaacagacactacaagaccatcctgaaggagagcttcccctgcatctggtacaccaggaacatgatcaagaggctgctggaggagcgggaggtgctgctgtactgtgacttccacggccacagcaggaagaacaacatcttcctgtatggctgcaacaacaacaacaggaagtactggctgcacgagagggtcttccccctgatgctgtgcaagaatgccccagacaagttctccttccacagctgcaacttcaaggtgcagaagtgcaaggagggcaccggccgggtggtgatgtggaggatgggcatcctgaacagctacaccatggagagcacctttggaggcagcaccctgggcaacaagagggacacccacttcaccatcgaggacctgaagagcctgggctaccacgtgtgtgacaccctgctggacttctgtgaccctgaccagatgaagttcacccagtgcctggccgagctgaaggagctgctgcggcaggagatccacaagaagttccacgagctgggccaggatgtggacctggagggctcctggagcgacatcagcctgagtgacatcgagagcaggaacagcaccagcggcagtgacagcagcctgagtgatggcctgcctgtgcacctggccaacattgctgatgagctgacccagaagaagaagatgttcaagaagaagaagaagaagagcctgcagaccaggaagcagagaaatgagcagtaccagaagaagaacctgatgcagaagctgaagctgacagaggacaccagcgagaaggccggctttgccagcaccctgcagaagcagcccaccttcttcaagaacagcgagaacagcagcttcctgcccatgaagaatgaaaacccccggctgaatgagaccaacctgaacagaagagacaaggacacccccctggaccccagcatggccaccctcatcctgcccaagaacaagggccgcatgcagaacaagaagccaggcttcaccgtgtcctgcagccccaagaggaccatcaacagcagccaggagcccgcccctggcatgaagcccaactggcccaggagccgctacccagccaccaagaggggctgtgccgccatggccgcctaccccagcctgcacatctacacctacccctag

SEQ ID NO: 216832 - DNA, 2709 bp, Artificial Sequence
  derived and/or modified sequence
atgttccccgccctggagacccacctgaagcagaccatccccgacccctacgaagattttatgtatagacacctccagtactacggatacttcaaagcccagcgcggctctctacccaacagcgccactcatcagcatgtgagaaagaataatcctcagtgtctacttaacgggagtcttggtgaaaaagatgatcttattccggacactcttcagaaggaaaagcttctgtggccgatctcactcagttctgccgtccaccgacagatcgaggccattaacagggatttccactcctgtttgggatggatgcagtggagaggactgagtagcttgcagcctccaccgcccaggttcaaggatagtccggcatcagcgtttcgggtcgctggtatcacggactcgcatatgctgtcactgcctcacctgcgatcgaggcaactcctgtacgacgagttggatgaagtaaatcccagacttcgggaacctcaggaactttttagcattttaagcacaaagaggcccctgcaggctcccaggtggccgattgagtgcgaagtcatcaaagaaaacatccaccatatcgagtgggcacccccccagcccgagtacttttaccaaccaaaaggcaacgagaaagtaccagaaatcgtcggcgagaaaaagggaacagtagtgtaccagctcgattctgtgcccatcgagggaagctattttaccagctctcgagtcggcggaaagcgcggaatcgttaaggaactggctgtcaccctccaggggcctgaagacaatacactgctcttcgagtctcgcttcgaaagcggcaaccttcagaaggctgtccgcgtggatacttacgagtacgagttgacacttaggactgacctatatacgaacaagcatacccagtggttctacttcagagtacaaaatactcgaaaggacgctacgtatcgattcaccatcgttaatcttctaaagcccaagtccctgtacacagtgggcatgaagcccctgttgtatagtcagttagacgcaaatacaagaaatatcgggtggagacgcgagggcaatgaaatcaaatattataaaaacaatactgacgacggacagcaaccattctactgtctcacttggacgatccaattcccctatgaccaggacacatgcttcttcgctcatttttacccctacacatacacagacctccagtgttatttactgagcgtggctaataatccgattcagtcccagttttgcaagctgcagactctctgtcgttccctggccggtaatactgtctacctgttgaccataactaatccctctcagaccccccaggaagcggccgctaaaaaggcagtggtcctgtccgcacgggttcaccccggagagagcaacggctcatgggtgatgaaggggtttctcgactttattctatccaatagtcctgatgcacagctactcagagacatttttgtgtttaaggttctccctatgctaaatcctgatggggtgatagttggtaattaccgatgctcccttgctggtcgtgacctgaaccgacactataaaacaatcctgaaagaaagctttccttgtatctggtacacccggaacatgataaaaaggctcctcgaagagagggaggtcctcttatactgcgactttcatgggcatagccgcaaaaataatatattcctttatggctgcaacaataacaatcgcaaatactggctccatgagcgtgtttttcctcttatgctatgcaaaaatgccccggacaagttctcctttcatagttgtaatttcaaagtacaaaaatgtaaagaagggactggccgtgtcgtaatgtggaggatgggaatcctgaactcctacactatggagagtactttcgggggttcaactctgggtaacaaacgggatactcatttcactattgaagacttaaaatccctcgggtaccacgtttgtgacacgctactagatttctgtgaccccgatcagatgaaatttacccaatgcttggccgagctgaaggaactgctgagacaggaaatacataaaaaatttcacgaacttgggcaggacgtcgatttagagggctcctggtctgacatcagcctgtctgacatcgagtcttccacgagcggcagtgactcctcgcttagtgacggactgcccgttcacttggctaatatcgcggacgaactgacacagaaaaagaagatgttcaagaaaaaaaaaaaaaagtccctgcagacaaggaagcagagaaacgagcagtaccagaagaaaaacttgatgcagaagctcaagctaaccgaagatacttcagagaaggccggctttgcctccacactgcaaaagcagcccactttctttaaaaactccgagaactccagctttctgcctatgaagaacgaaaatccccgcctgaacgagacaaacttaaataggcgtgacaaggacactcctctggacccatccatggcaactctcattctgccaaagaataaaggccgcatgcagaacaagaagcctggctttacagtgtcttgcagtccaaagaggaccattaattcctcccaggagccagcccccggaatgaagcctaactggccaaggtcacgatatcccgctacaaaacgcggatgcgctgcaatggccgcatatccatcactgcacatctacacatacccttag

SEQ ID NO: 216833 - DNA, 2715 bp, Artificial Sequence
  derived and/or modified sequence
atgttccccgccctggagacccacctgaagcagaccatccccgacccctatgaggactttatgtacaggcacctccaatactatggctattttaaggcccagcgaggttccttgcctaactcagcgacccaccagcatgttcgaaaaaacaatccccagtgtctcctcaacggctcattgggggaaaaagatgacctaattcctgatacactacaaaaggagaagctgctgtggcccatttctctgagtagcgcggtacatcggcagatcgaggccatcaatcgcgacttccactcctgccttggctggatgcaatggcggggactatccagtctgcaaccaccgccgccacggtttaaagattccccggcctcagcgttcagggtggccggtatcacggattctcacatgctatcacttccacacctcaggagccgtcagcttctgtatgatgagttagacgaggtgaatcctcggctgcgggagccacaggagctgtttagcatcctctcaactaagcgtcccctccaggccccacgttggcctattgagtgtgaagttatcaaagagaacatccatcatattgagtgggcaccccctcagcctgagtatttctaccaaccaaaaggaaatgaaaaagtgcccgaaatcgtaggggagaaaaaagggaccgtggtttatcagctcgactcagtacccatcgaagggagctatttcacatcttctagagtggggggaaaacggggaatcgtcaaggagctggctgttacacttcaaggacctgaggacaacacactcctctttgaatcccgctttgaatctggcaatctccagaaggccgtgagggtggatacctatgaatacgaattgaccctcaggactgatttatacactaacaagcacacccagtggttctactttcgcgttcagaatacgcggaaggatgcgacgtacaggttcacaattgttaatcttttaaagcccaagagcctgtacaccgtaggcatgaaacctctcctttattctcagcttgacgccaacacaaggaacattggctggcgtagggaaggtaacgagatcaaatactacaagaataacaccgacgacggccagcagccattttactgcctcacctggacaatccagtttccatatgatcaggacacttgctttttcgcacacttttatccctatacttatactgatctacagtgctacctgcttagcgtggccaacaatcccatacagtctcagttttgcaagctgcagacgctgtgccggagcctggccgggaacaccgtttatctgctgaccataacgaacccatcacagacaccacaggaggccgccgcaaagaaggccgtggtgctttccgctcgagtgcaccctggggagagtaacggaagttgggtcatgaagggcttcctggactttatcctgagcaatagtcccgatgcacagctgttaagagacatatttgtctttaaggtcctgccaatgctaaatcccgatggcgtcattgtgggaaactatcggtgtagcctggctggcagggacctgaacagacactataaaacgattttgaaggaatcattcccttgcatctggtacactaggaatatgatcaagcgcttgttggaggaaagggaagtgctcctctattgtgatttccacgggcattccagaaagaataatattttcttgtatggttgcaacaacaacaatagaaagtactggcttcatgagagagtgtttcccctcatgctgtgcaagaacgctcctgacaagttttccttccactcttgcaactttaaagtacagaaatgcaaggagggtactgggagagtcgtcatgtggcgcatggggattcttaactcatacaccatggaatctactttcggcggctctacattagggaataaacgggacacgcattttaccattgaggacctgaaatcactgggttaccatgtgtgcgacacactacttgatttctgtgacccggaccagatgaaatttacgcaatgtctggctgagctgaaggagcttctgcggcaggaaatccataaaaagtttcatgaattgggccaagacgttgatctggagggtagctggagtgacatttctctgtcggacatcgagagcagaaattcgacctctggttccgactctagcttatccgacggactcccagtgcatttggcaaatatagcagacgagctgacacagaaaaagaagatgttcaaaaaaaagaagaagaagagtctgcagacacggaagcagcgcaatgagcagtatcaaaagaagaaccttatgcaaaaattgaaattgaccgaagatacctccgagaaagccggattcgcctccaccctgcagaaacagcccacgtttttcaaaaactcagaaaattctagcttcctcccaatgaaaaatgaaaatcctcgactgaacgagactaatctgaaccgacgcgacaaagatacaccccttgaccccagcatggccacgctgattctgcctaaaaataaaggtaggatgcagaataaaaaacccggtttcaccgtgtcctgttctcccaaacggaccatcaacagttcacaggagcccgcaccggggatgaagcccaattggccccgctccagatatcctgcgaccaagcggggatgcgccgcaatggcagcttacccctctctccacatctacacgtacccttag

SEQ ID NO: 216834 - DNA, 2709 bp, Artificial Sequence
  derived and/or modified sequence
atgttccccgccctggagacccacctgaagcagaccatccccgacccctacgaagatttcatgtacaggcacctgcagtattacggctatttcaaggcccagagaggttctctgccaaactccgcaacgcatcagcatgtccgaaagaataacccgcaatgtttattaaacgggagcctcggcgagaaggatgatctgatccccgacacgctgcagaaggaaaagctactctggccaatcagcctgagctccgctgtgcacagacaaattgaagctatcaatcgtgactttcactcatgtctgggttggatgcaatggcggggactatccagtctgcagcctccaccccctcggttcaaagactccccagcctctgccttcagagtggccgggatcaccgactctcacatgttaagccttccacatttacgaagccggcagcttctgtatgatgagctcgatgaggtcaatccaaggctcagagagcctcaggaacttttttctattctctccacaaagcgcccgctccaagctcctcggtggcccatcgagtgcgaagttatcaaggaaaacattcatcacatcgaatgggcccccccccagcctgaatacttctatcaacctaagggcaacgagaaggtgcctgagatcgtcggtgagaagaaagggacggtagtttatcagctggatagcgtgcccatcgagggcagctactttacgtcgagtcgcgtcggaggtaagcgaggaatagtgaaagaactggctgtaacgctacagggtccagaggacaacacactgctctttgaatcgcgttttgaatccggcaatctgcaaaaggccgtaagggtcgacacttacgaatatgaactgacactgcgcactgacctgtatacaaacaagcacacacagtggttctactttagggtgcagaatacccgcaaagacgctacttataggttcactatagtcaacctcctgaaaccaaagtcactttacaccgttggtatgaagcctctgctgtacagccagctggacgcgaatacccgaaatatcggttggcgccgagaagggaacgaaattaagtattataaaaataacacagatgatggtcagcaaccattttactgcctgacctggaccattcagttcccatatgatcaggacacatgtttttttgcccacttctacccatatacatacacggacctgcaatgttacctgctgtcggtagctaacaaccccatacagtcccaattttgcaaattgcaaaccctgtgtcgctctctggccggaaacaccgtctacttgctcacaattaccaacccatcgcaaaccccccaggaagcagccgccaaaaaagccgtcgtcttgagcgcacgcgtacaccccggcgaaagcaatggctcatgggtcatgaagggcttcctggacttcatactctcaaatagcccggacgcccagttgttgcgagatatcttcgtcttcaaagttctacctatgctaaacccagatggcgtgatagtcggcaattatcggtgctcattggccgggagagacctgaacagacattataagacgatcctcaaagagtcctttccgtgcatttggtacacccgcaatatgattaaacgtctgctggaggagcgcgaagttctgctgtactgtgattttcacggtcatagtcgcaagaacaatatcttcctctacgggtgcaacaacaacaaccgtaagtactggcttcacgagagggtctttcccctcatgctctgtaaaaacgccccggacaagttctcctttcattcctgcaacttcaaggtgcagaagtgcaaggaaggcacggggcgtgtggtaatgtggcgtatgggaatcctgaacagttacactatggaaagcacttttggggggagcacactcggaaataagcgcgacacccactttactatcgaagacctgaagtccctgggataccacgtctgtgatacattgcttgacttctgtgatcctgatcagatgaaattcacacagtgcctggccgaactgaaggaactgctcagacaggaaattcacaaaaagttccacgaactcggccaggacgtggacctggaggggagctggtccgacatttcactgagtgacatcgaatccagcacatctgggagtgattccagcctgtccgatggtctgcccgtccatctagcaaatattgctgacgagctaacccaaaagaaaaagatgttcaaaaaaaaaaagaagaaatccctgcagacgcggaagcagcggaacgaacagtaccagaaaaagaatctgatgcaaaagttgaaacttacagaagacacatctgagaaggccgggtttgcctcaacccttcagaagcagcctacgtttttcaagaattctgaaaactctagctttttacccatgaagaatgagaatcccagacttaatgaaacaaacttgaaccgccgagataaggataccccgctggacccctcaatggccactttaattctccctaagaataagggacggatgcaaaataaaaagcctggctttacagtgtcgtgctccccaaagagaaccatcaacagttcccaggaacccgcacccggaatgaagcctaattggcctcgaagccgttaccccgccaccaaacgagggtgcgccgcaatggctgcctacccgagcctgcacatctatacatatccgtag

SEQ ID NO: 216835 - DNA, 2709 bp, Artificial Sequence
  derived and/or modified sequence
atgtttcccgctctcgaaactcatttgaaacagaccataccggatccctatgaggatttcatgtacaggcacctgcagtactatgggtatttcaaagcacaaagaggctctctccctaattccgctactcaccaacatgttaggaagaacaatccccagtgtctgttgaacggtagcctaggagagaaggacgatcttatcccagacacactgcagaaggagaagttgctttggcccatctctctgtctagtgctgtgcaccgacagattgaagcaattaaccgcgatttccacagctgtcttggctggatgcagtggaggggtttgtccagtcttcagccccctccacccagattcaaggactcaccagcctcagcatttcgggtggcagggataactgatagccacatgctatccctgccgcacctgcggtctagacagctgctgtacgatgagcttgacgaagtgaacccacgactgagggaaccccaagagctgttttctatcctgtctacaaagagaccgttgcaggctccacgctggcccattgaatgtgaggtgatcaaagaaaacattcatcatatcgagtgggcccctccacagccagagtatttttatcaaccaaagggaaacgaaaaggtccctgagattgttggagagaagaagggtacagtggtatatcagttagattcagttccgattgaaggcagttacttcaccagctccagagttggcggtaagcgcggaatcgtcaaagagctcgcagtgacactccagggccctgaggataacacacttctgtttgagtccaggttcgaatctgggaacctgcagaaagcggtccgggtggatacctatgagtatgagttgactttacgaacggatctatacaccaacaaacacacgcagtggttttattttagggtgcagaatacacggaaggacgctacttaccgttttacaatcgtgaatctgcttaaacccaagagtctctacaccgtgggcatgaaaccccttttatacagccaactggatgccaatacaagaaatatcggatggcggagagaaggaaacgaaatcaagtactacaagaacaatacagatgacggccagcagcctttttattgcctgacttggacaattcagttcccctacgaccaggatacttgcttttttgcccatttttacccgtatacttacacagacctgcagtgttatctcctgtccgttgcaaacaatccaatccagagtcagttctgcaagctccagactttgtgccgatcactggctggcaacactgtgtatctgctcacgattaccaatccttctcagaccccacaggaggcagctgcaaagaaagctgtggtcctcagcgctagggtccatccaggagaaagcaacggaagctgggttatgaaaggattcctggactttatcctgtctaatagtcccgatgctcagctgctccgagacatattcgtttttaaagtgcttccaatgcttaaccctgatggggtgatcgtgggtaattacagatgcagcctggcgggacgcgatctgaatagacactataagacgatcctgaaggaaagcttcccatgtatatggtacacaaggaatatgattaagaggctgcttgaggaacgggaggtactgctgtactgtgactttcatggacactcccgtaaaaataatatattcctgtatggctgcaacaacaacaatcgcaaatactggctgcatgagagggtgttccccttaatgctgtgcaaaaatgccccagataagttctcttttcactcttgcaacttcaaggtacagaagtgcaaggagggaacaggccgtgtcgtgatgtggagaatgggtattctcaactcgtatactatggagtctaccttcggcggttctactctgggcaataagcgggatacccacttcaccattgaggacctaaagagcctgggctatcatgtttgcgataccctccttgatttttgtgatcccgaccagatgaagttcactcaatgtttggccgaactgaaggagctgctcagacaggaaatccacaagaaatttcatgagctgggccaggatgtggacttagaaggaagctggtccgatataagcctgtccgacatcgagtcctccacgtctggaagcgactcctctctttccgacggcctccccgtccatcttgcgaatatcgccgatgaactgacccagaagaagaaaatgtttaagaaaaagaagaagaaatccctgcaaactcggaaacaaagaaacgaacagtaccaaaaaaaaaacctgatgcaaaagctgaagttgacagaggacacctcagagaaggccggtttcgcatcaactcttcaaaagcaacccacgtttttcaaaaactcagagaattcaagttttcttcccatgaaaaacgagaatcccaggctgaatgagactaatttgaaccgaagagacaaagataccccactggatccatctatggccaccttgatcttacctaagaacaagggcagaatgcagaacaagaaaccaggattcacggtgtcttgtagtccaaaaagaactatcaattcctctcaagaacccgcaccgggtatgaaacctaactggccacgctcgcgataccccgctacaaagcggggttgtgccgctatggcagcctatccatcgctacacatctacacctacccatag

SEQ ID NO: 216836 - DNA, 2715 bp, Artificial Sequence
  derived and/or modified sequence
atgttccctgcccttgagactcatttaaaacagaccatacctgacccttatgaggacttcatgtaccgacacctgcagtactatggctatttcaaggcgcagcggggatctctgcctaactcagcgacacatcagcacgttagaaaaaataatccccaatgccttctcaatggctcgctcggagaaaaggacgatctgatccctgatacattgcagaaggaaaagcttctgtggcccatttccctcagttccgccgttcatcgacaaatcgaggcaattaaccgcgacttccacagttgtctgggctggatgcaatggcgaggcctgagcagtctccagccgccaccacctaggttcaaggactctcccgcatcggccttcagggtggccggtattaccgatagccacatgctgtcgctccctcacctgcggtctcgccaattgctgtacgacgagctggacgaagtgaatcctcgccttcgggaacctcaggaactcttttctatcttgagcacaaaaaggccactgcaggcccctcgctggcccatagaatgcgaagttataaaagaaaatatccaccatatcgagtgggcccctccccagcccgagtacttctaccagcccaagggtaacgaaaaagtgcccgagatcgtcggcgaaaagaaaggcaccgtagtgtaccagctcgactcggttccaattgaaggttcctactttacatccagcagagttggtgggaaaagaggcatcgtgaaagagctagccgtaactctccagggtcctgaagataataccttgctgttcgagtcacgcttcgaaagtggaaatctccaaaaggccgtgcgcgttgacacatacgaatacgagctgactctaagaacagacctatatactaacaagcacactcaatggttctatttcagagttcaaaacacacgaaaggacgctacttacaggttcaccatagtgaacctcctcaaaccaaaaagcttatatactgtgggcatgaaacctttactctactctcagctcgacgcaaatacaaggaatattggatggcgtcgggagggcaacgaaataaaatactacaaaaataatactgatgacggccagcagcccttttactgtctgacttggaccatccagttcccttacgaccaggatacctgcttttttgcccatttctacccttacacgtacaccgacctgcagtgctaccttctcagcgtcgcaaacaatccaatacagtcacaattctgtaagttacagaccctgtgcagaagtctggctgggaacaccgtgtatctactgaccatcaccaacccatcacagacgccgcaggaggcagccgcaaaaaaggccgtcgtgctgagcgcacgggtgcatccaggtgaaagtaacggcagctgggttatgaaaggattccttgactttatcctctcaaattcgccagatgctcagctgcttcgcgacattttcgtcttcaaagtgctcccaatgttaaaccccgatggcgtcatcgtggggaattatcgatgttcccttgctgggcgtgaccttaatagacactataaaacaatcctgaaggagagctttccgtgcatctggtacacccggaacatgattaagcgcctcttggaagagcgagaggtcctgctgtactgtgattttcacggccatagcaggaagaataacatatttttgtacggctgtaacaacaacaatcgcaagtactggcttcatgagagagtctttccgctgatgctgtgcaaaaacgcacctgataagttcagttttcatagctgtaactttaaggtacagaaatgcaaagaaggaaccggcagggttgttatgtggcgtatgggaatccttaactcgtatacaatggagtccaccttcggtggctctactctggggaacaagagggatacccactttactattgaagacttgaagtcattggggtatcacgtctgcgacactttgttggacttctgtgaccctgatcagatgaaattcacgcagtgcttagccgaattgaaggagcttctgcgacaggaaattcataagaagtttcacgagctcggtcaggacgttgacctggaggggtcctggtcagatatttcccttagtgatatcgagtcaagaaactctacctcaggcagtgactcttcactgtccgatgggctgcctgtccatctcgccaacatagccgatgaactgacgcaaaagaagaaaatgtttaaaaagaagaaaaagaagagcctgcagacacgaaagcaaagaaatgaacagtaccagaagaagaacctgatgcagaaattgaagcttaccgaggacacctccgaaaaagctggctttgcatcgaccctacagaaacaacccacattttttaagaatagcgaaaacagcagtttccttccaatgaaaaatgaaaatcctagattaaatgagacgaatctgaacagacgagacaaggatacgccgctcgacccgtcaatggccactctcattcttcccaagaataaaggcagaatgcagaacaaaaaacccggttttacagtatcgtgctcaccgaaacgcacaatcaacagcagccaggagcccgctcccggtatgaaacccaactggccacggagcagatacccagccactaaacgaggctgcgctgcaatggcagcctatcctagtctgcacatttacacctatccatag

SEQ ID NO: 216837 - DNA, 2709 bp, Artificial Sequence
  derived and/or modified sequence
atgtttcccgcacttgagacccatctcaagcagaccataccagacccttatgaagactttatgtatagacatcttcaatattacggctactttaaggctcagagaggatctctgcccaacagcgccacccaccaacatgtccggaagaataaccctcagtgtttacttaacgggagcctgggcgaaaaggacgaccttattcccgacaccctgcagaaggaaaagctcctgtggccaatcagcctctcatccgctgtacaccggcagatcgaggcaattaaccgagactttcactcttgtctcggatggatgcagtggcggggtctttctagtcttcagccgccacccccacgcttcaaagattcaccagccagtgcattccgggtggccggaatcacagattcacatatgttgagcttgcctcaccttcgatcccggcagctgctgtacgacgagctagacgaggttaatccacgccttagggagccacaggagctattctcaatcctgagtactaaacggccactgcaggccccacgatggcccatagaatgcgaggtgatcaaggaaaatatccaccatatcgaatgggcccctcctcagcccgagtacttctatcagcccaagggcaatgagaaagtccctgagatcgtcggagaaaagaaagggacagttgtgtaccagctcgacagcgtcccgattgaagggtcttacttcacgtcctcacgcgtgggcggtaaacggggtattgtgaaggagctagctgttacgcttcagggccctgaggacaatactctgctgttcgagagtcggtttgaatcaggaaacctgcagaaggctgttcgagtggacacatatgagtacgaacttacccttcggacagatctttatacaaataagcacacccagtggttttatttccgggtgcaaaatacccgaaaagatgcaacatatcgtttcaccattgtgaatttgctcaaaccgaaatccttgtataccgtgggcatgaaaccactcctctattcccagctggatgccaacacacggaacatcggctggcggagggagggtaacgaaataaagtactataagaacaataccgacgatggccagcagcctttttattgtttaacatggacaatccagttcccctatgatcaggacacatgtttcttcgcacacttttacccttacacatataccgatctccagtgttacctgctcagcgttgcgaataatcccatccagtcccagttctgtaagcttcagactttgtgtagatctttagcgggtaataccgtgtatctgttgacaatcacaaacccttctcagactccccaggaagctgctgcgaagaaggccgtcgtccttagcgcccgagtgcacccaggagagagcaacggatcttgggtcatgaaagggtttttggacttcatcctctccaattcacctgatgcccagctgcttcgagatatattcgtgtttaaggtgcttcctatgctcaatcccgacggagtgattgtagggaactacaggtgctcgctggccggtcgcgatctgaatagacattataaaacgattcttaaggaatcatttccctgcatttggtacaccagaaatatgataaagaggctcttggaagaacgcgaagtgctgttgtactgcgacttccatggccacagtaggaagaataacatatttctgtacggctgcaacaataataatcgcaagtattggctgcatgaaagggttttccctctgatgctgtgcaaaaatgcaccggacaaattcagttttcacagctgcaacttcaaggtgcagaagtgcaaggaggggacaggcagagtcgtgatgtggcggatgggaatcctgaacagctacaccatggaatccactttcggaggctccaccctgggaaacaaacgggatactcacttcaccatcgaggatctgaagagcctcggctaccatgtgtgcgacacgctgctcgacttctgtgaccccgaccaaatgaaattcacacagtgtctggccgagttgaaggaactgcttcgacaggaaatacacaaaaaatttcacgagctcggccaggatgtcgatcttgaaggctcatggtcagacatctcccttagtgatatcgaaagctcaaccagtgggagcgactcaagcctctcagatggattacccgtgcacctggccaatatcgccgatgaactcacgcaaaaaaagaaaatgtttaagaaaaagaaaaagaaaagtctccagactcggaagcaaagaaacgagcagtaccaaaagaagaatctgatgcagaagctcaaattaactgaggacaccagcgagaaagcagggtttgcgtcaacactgcagaagcaaccaactttttttaagaattctgagaattcatctttcctgcctatgaaaaacgaaaaccccaggctgaacgagacgaacctgaaccgtagggacaaggacacacctctggacccctcaatggctacactgattctgcccaaaaacaaaggcagaatgcaaaacaagaagccaggtttcacagtgtcctgctcccctaagaggacgattaacagcagtcaggaacctgcccctggaatgaagccaaactggcccagatctagataccctgctactaagagaggttgcgctgccatggctgcatatccatctttgcatatctacacctatccctag

SEQ ID NO: 216838 - DNA, 3577 bp, Artificial Sequence
  derived and/or modified sequence
gggccctcacagaaggcggtggcgggcgggtgcagcgagtttgtccccttgcccgcacactgcttggcctctgtacttaagtgcggtggccgcctgcctcgctggagcttctctgccgcagccatccgtgctgcttgggacgggccggggcgcgaaggcggtcgcatccatcgctctgccctcctgcttctcttgtgtaatcagctgcctatttggaaattgggcagggtttgcgactggatgctaatgtcactgactagttttcagcctaccatccagaagtaacatgttcccagctttggaaacgcacctaaagcagactattcctgatccttatgaagactttatgtaccgtcacctccaatattatggctactttaaagctcagagaggcagtttaccaaactctgctacgcatcagcatgttcggaagaataaccctcaatgcctgttgaatggctctcttggggaaaaagatgatttgataccagacaccctgcaaaaggagaagcttctatggcctatcagtttatcttcagctgtgcacagacagatagaagccatcaacagagactttcactcttgcctgggctggatgcagtggcgcggcctcagctcactgcaacctccacctcccagattcaaggattctcctgcctcagctttccgagtagctgggattacagattcacatatgctgagtttaccacatcttaggagcagacagcttctttatgatgagttggatgaagtaaacccacgtcttcgagaaccccaagagctcttttccattttgtctaccaagaggccactgcaggctccaagatggccaattgaatgtgaggtcatcaaggaaaacatccatcatattgagtgggctccacctcaaccagaatatttctatcagcctaaaggaaatgaaaaggtaccagagattgtaggagagaaaaaaggaacagttgtctatcaattagattcagtgcctatagaaggttcctattttaccagttccagagtgggaggcaaacgaggaattgtcaaggaacttgctgtcacgttgcaaggaccagaagataatactctactgtttgaatcaaggtttgagagtgggaatctgcaaaaagctgtcagagtagacacctatgagtatgaactcaccttgcgaactgacctctacactaacaaacacactcagtggttttattttcgtgttcagaacaccagaaaagatgctacctatcgcttcaccattgtcaacttgctaaaacccaagagtctttatactgtagggatgaagccactcttgtactcccaattggatgccaacacccgcaatattggctggaggagagaaggaaatgaaatcaagtactacaagaacaacacggatgatgggcagcagcccttctactgtctcacgtggaccattcagtttccatatgaccaggacacttgcttctttgcacacttctacccatatacatacactgatttgcaatgctacctcctgtcagtggcaaacaaccctatccagtctcagttctgcaagctccaaactttatgcaggagcctagcaggaaataccgtttacttgctcaccatcaccaacccatcccagacccctcaagaggcagctgcaaagaaagctgtggtcttgagtgccagagttcaccctggagaaagtaatggctcctgggttatgaaaggctttttggacttcatccttagcaactccccagatgcccagctcctcagagatatttttgtcttcaaggtgcttcccatgttaaatccagatggtgtgattgtggggaattatcggtgttccttggccggaagggatttgaacaggcattataaaaccattctgaaggagtctttcccttgtatttggtacaccaggaacatgatcaaaagacttcttgaagaaagagaggttctgttgtattgtgatttccatggccacagtcgtaagaataatatcttcctgtatggctgtaataacaacaatcgcaaatactggcttcatgaacgagtctttcctttaatgttatgcaaaaatgcaccagataagttctcttttcacagttgtaattttaaggtccaaaaatgcaaagaaggaacaggacgagttgttatgtggcggatgggaatcctaaacagctacaccatggagtctacctttggcgggtccaccctgggtaataaaagagacacccactttaccatcgaagatctgaagtccttaggttatcatgtctgtgacacccttctggacttttgtgatcctgaccaaatgaagttcactcagtgtctagcagagcttaaggagcttttacgacaggaaatccacaagaaattccatgaacttggacaagatgtagatttagaaggaagttggagtgacatctctttgtctgacattgaatccagcaccagtggctctgacagttctctctcagatggtcttcctgttcacctagcaaacatagcagatgagctgactcagaaaaagaagatgtttaagaagaaaaaaaagaagtcacttcagactaggaaacagcgaaatgagcagtatcagaaaaaaaatttgatgcagaagttaaagttaacagaagatacctcagaaaaggcaggatttgcttctactctgcaaaagcagccaacctttttcaaaaactcagagaattccagttttttaccaatgaaaaatgaaaacccaaggttaaatgagacaaatttaaatagaagagacaaagacacccccctggacccatcaatggccaccctgattctgcctaagaataaagggagaatgcagaataagaagccaggctttacagtatcatgctctccaaagagaaccataaactccagccaagagccagctccaggtatgaagccaaactggcctaggagcagatatcctgccacaaagagaggctgtgctgccatggcggcatacccatccttgcacatatacacatacccgtaggtgagcctgggctgtgccacacaagcacttcatcgggggttttgagattagacacattttataatgggggagatgtatgactgggaactgcatttacttgtggtatactgtgttgtgcactcatgcactgaccttacactttgtacttacactgtgggcatgtggtcaagatgcatacctcatgaattcaactattttttcataaaatgaaattttattatgatgtgtaaaaatgctttatcagaaactgaagtgtgttctcatggcacacttcatggcagcacagatatacctcattttaaccaatagatattctctctaaaattatgtgcaaatcaatttttaaaaatcaaaatctatgttaaacacattttggcagtgtgctataataaaaaaaagtgttgtgtcaaagctttctagtgacggtcagtcctactgctgtatgtcaggtttgctcacaatgaggtattcccacatagaaataacaatgcatgtattacccagaatttaatgttgcgtaccttatgttcaatgaggttttgtaatttttttaggctgatgattaaaattctttctctctaa

SEQ ID NO: 216839 - DNA, 3389 bp, Artificial Sequence
  derived and/or modified sequence
cttctcttgtgtaatcagctgcctatttggaaattgggcagggtttgcgactggatgctaatgtcactgactagttttcagcctaccatccagaagtaacatgttcccagctttggaaacgcacctaaagcagactattcctgatccttatgaagactttatgtaccgtcacctccaatattatggctactttaaagctcagagaggcagtttaccaaactctgctacgcatcagcatgttcggaagaataaccctcaatgcctgttgaatggctctcttggggaaaaagatgatttgataccagacaccctgcaaaaggagaagcttctatggcctatcagtttatcttcagctgtgcacagacagatagaagccatcaacagagactttcactcttgcctgggctggatgcagtggcgcggcctcagctcactgcaacctccacctcccagattcaaggattctcctgcctcagctttccgagtagctgggattacagattcacatatgctgagtttaccacatcttaggagcagacagcttctttatgatgagttggatgaagtaaacccacgtcttcgagaaccccaagagctcttttccattttgtctaccaagaggccactgcaggctccaagatggccaattgaatgtgaggtcatcaaggaaaacatccatcatattgagtgggctccacctcaaccagaatatttctatcagcctaaaggaaatgaaaaggtaccagagattgtaggagagaaaaaaggaacagttgtctatcaattagattcagtgcctatagaaggttcctattttaccagttccagagtgggaggcaaacgaggaattgtcaaggaacttgctgtcacgttgcaaggaccagaagataatactctactgtttgaatcaaggtttgagagtgggaatctgcaaaaagctgtcagagtagacacctatgagtatgaactcaccttgcgaactgacctctacactaacaaacacactcagtggttttattttcgtgttcagaacaccagaaaagatgctacctatcgcttcaccattgtcaacttgctaaaacccaagagtctttatactgtagggatgaagccactcttgtactcccaattggatgccaacacccgcaatattggctggaggagagaaggaaatgaaatcaagtactacaagaacaacacggatgatgggcagcagcccttctactgtctcacgtggaccattcagtttccatatgaccaggacacttgcttctttgcacacttctacccatatacatacactgatttgcaatgctacctcctgtcagtggcaaacaaccctatccagtctcagttctgcaagctccaaactttatgcaggagcctagcaggaaataccgtttacttgctcaccatcaccaacccatcccagacccctcaagaggcagctgcaaagaaagctgtggtcttgagtgccagagttcaccctggagaaagtaatggctcctgggttatgaaaggctttttggacttcatccttagcaactccccagatgcccagctcctcagagatatttttgtcttcaaggtgcttcccatgttaaatccagatggtgtgattgtggggaattatcggtgttccttggccggaagggatttgaacaggcattataaaaccattctgaaggagtctttcccttgtatttggtacaccaggaacatgatcaaaagacttcttgaagaaagagaggttctgttgtattgtgatttccatggccacagtcgtaagaataatatcttcctgtatggctgtaataacaacaatcgcaaatactggcttcatgaacgagtctttcctttaatgttatgcaaaaatgcaccagataagttctcttttcacagttgtaattttaaggtccaaaaatgcaaagaaggaacaggacgagttgttatgtggcggatgggaatcctaaacagctacaccatggagtctacctttggcgggtccaccctgggtaataaaagagacacccactttaccatcgaagatctgaagtccttaggttatcatgtctgtgacacccttctggacttttgtgatcctgaccaaatgaagttcactcagtgtctagcagagcttaaggagcttttacgacaggaaatccacaagaaattccatgaacttggacaagatgtagatttagaaggaagttggagtgacatctctttgtctgacattgaatccagcaccagtggctctgacagttctctctcagatggtcttcctgttcacctagcaaacatagcagatgagctgactcagaaaaagaagatgtttaagaagaaaaaaaagaagtcacttcagactaggaaacagcgaaatgagcagtatcagaaaaaaaatttgatgcagaagttaaagttaacagaagatacctcagaaaaggcaggatttgcttctactctgcaaaagcagccaacctttttcaaaaactcagagaattccagttttttaccaatgaaaaatgaaaacccaaggttaaatgagacaaatttaaatagaagagacaaagacacccccctggacccatcaatggccaccctgattctgcctaagaataaagggagaatgcagaataagaagccaggctttacagtatcatgctctccaaagagaaccataaactccagccaagagccagctccaggtatgaagccaaactggcctaggagcagatatcctgccacaaagagaggctgtgctgccatggcggcatacccatccttgcacatatacacatacccgtaggtgagcctgggctgtgccacacaagcacttcatcgggggttttgagattagacacattttataatgggggagatgtatgactgggaactgcatttacttgtggtatactgtgttgtgcactcatgcactgaccttacactttgtacttacactgtgggcatgtggtcaagatgcatacctcatgaattcaactattttttcataaaatgaaattttattatgatgtgtaaaaatgctttatcagaaactgaagtgtgttctcatggcacacttcatggcagcacagatatacctcattttaaccaatagatattctctctaaaattatgtgcaaatcaatttttaaaaatcaaaatctatgttaaacacattttggcagtgtgctataataaaaaaaagtgttgtgtcaaagctttctagtgacggtcagtcctactgctgtatgtcaggtttgctcacaatgaggtattcccacatagaaataacaatgcatgtattacccagaatttaatgttgcgtaccttatgttcaatgaggttttgtaatttttttaggctgatgattaaaattctttctctct

SEQ ID NO: 216840 - DNA, 2709 bp, Artificial Sequence
  derived and/or modified sequence
atgttccccgccctggagacccacctgaagcagaccatccccgacccctacgaggacttcatgtacagacacctgcagtactacggctacttcaaggcccagagaggcagcctgcccaacagcgccacccaccagcacgtgagaaagaacaacccccagtgcctgctgaacggcagcctgggcgagaaggacgacctgatccccgacaccctgcagaaggagaagctgctgtggcccatcagcctgagcagcgccgtgcacagacagatcgaggccatcaacagagacttccacagctgcctgggctggatgcagtggagaggcctgagcagcctgcagccccccccccccagattcaaggacagccccgccagcgccttcagagtggccggcatcaccgacagccacatgctgagcctgccccacctgagaagcagacagctgctgtacgacgagctggacgaggtgaaccccagactgagagagccccaggagctgttcagcatcctgagcaccaagagacccctgcaggcccccagatggcccatcgagtgcgaggtgatcaaggagaacatccaccacatcgagtgggcccccccccagcccgagtacttctaccagcccaagggcaacgagaaggtgcccgagatcgtgggcgagaagaagggcaccgtggtgtaccagctggacagcgtgcccatcgagggcagctacttcaccagcagcagagtgggcggcaagagaggcatcgtgaaggagctggccgtgaccctgcagggccccgaggacaacaccctgctgttcgagagcagattcgagagcggcaacctgcagaaggccgtgagagtggacacctacgagtacgagctgaccctgagaaccgacctgtacaccaacaagcacacccagtggttctacttcagagtgcagaacaccagaaaggacgccacctacagattcaccatcgtgaacctgctgaagcccaagagcctgtacaccgtgggcatgaagcccctgctgtacagccagctggacgccaacaccagaaacatcggctggagaagagagggcaacgagatcaagtactacaagaacaacaccgacgacggccagcagcccttctactgcctgacctggaccatccagttcccctacgaccaggacacctgcttcttcgcccacttctacccctacacctacaccgacctgcagtgctacctgctgagcgtggccaacaaccccatccagagccagttctgcaagctgcagaccctgtgcagaagcctggccggcaacaccgtgtacctgctgaccatcaccaaccccagccagaccccccaggaggccgccgccaagaaggccgtggtgctgagcgccagagtgcaccccggcgagagcaacggcagctgggtgatgaagggcttcctggacttcatcctgagcaacagccccgacgcccagctgctgagagacatcttcgtgttcaaggtgctgcccatgctgaaccccgacggcgtgatcgtgggcaactacagatgcagcctggccggcagagacctgaacagacactacaagaccatcctgaaggagagcttcccctgcatctggtacaccagaaacatgatcaagagactgctggaggagagagaggtgctgctgtactgcgacttccacggccacagcagaaagaacaacatcttcctgtacggctgcaacaacaacaacagaaagtactggctgcacgagagagtgttccccctgatgctgtgcaagaacgcccccgacaagttcagcttccacagctgcaacttcaaggtgcagaagtgcaaggagggcaccggcagagtggtgatgtggagaatgggcatcctgaacagctacaccatggagagcaccttcggcggcagcaccctgggcaacaagagagacacccacttcaccatcgaggacctgaagagcctgggctaccacgtgtgcgacaccctgctggacttctgcgaccccgaccagatgaagttcacccagtgcctggccgagctgaaggagctgctgagacaggagatccacaagaagttccacgagctgggccaggacgtggacctggagggcagctggagcgacatcagcctgagcgacatcgagagcagcaccagcggcagcgacagcagcctgagcgacggcctgcccgtgcacctggccaacatcgccgacgagctgacccagaagaagaagatgttcaagaagaagaagaagaagagcctgcagaccagaaagcagagaaacgagcagtaccagaagaagaacctgatgcagaagctgaagctgaccgaggacaccagcgagaaggccggcttcgccagcaccctgcagaagcagcccaccttcttcaagaacagcgagaacagcagcttcctgcccatgaagaacgagaaccccagactgaacgagaccaacctgaacagaagagacaaggacacccccctggaccccagcatggccaccctgatcctgcccaagaacaagggcagaatgcagaacaagaagcccggcttcaccgtgagctgcagccccaagagaaccatcaacagcagccaggagcccgcccccggcatgaagcccaactggcccagaagcagataccccgccaccaagagaggctgcgccgccatggccgcctaccccagcctgcacatctacacctacccctag

SEQ ID NO: 216841 - protein, 272 aa, Artificial Sequence
  derived and/or modified sequence
MDETQGPLAMTVHLLANSGHGSLLQRTLDQLLDCICPEVRLFQVSERASPVKYCEKSHSKRSRFPGMSVLLFLHESPGEDRLFRVLDSLQHSPWQCYPTQDTRGRLCPYFFANQEFYSLDSQLPIWGVRQVHCGSEILRVTLYCSFDNYEDAIRLYEMILQREATLQKSNFCFFVLYASKSFALQLSLKQLPPGMSVDPKESSVLQFKVQEIGQLVPLLPNPCMPISSTRWQTQDYDGNKILLQRWESSSVAQTRVRWCHHSSLRSSPSGFK

SEQ ID NO: 216842 - DNA, 819 bp, Artificial Sequence
  derived and/or modified sequence
atggacgagacccagggccccctggccatgaccgtgcacctgctggccaacagcggccacggcagcctgctgcagagaaccctggaccagctgctggactgcatctgccccgaggtgagactgttccaggtgagcgagagagccagccccgtgaagtactgcgagaagagccacagcaagagaagcagattccccggcatgagcgtgctgctgttcctgcacgagagccccggcgaggacagactgttcagagtgctggacagcctgcagcacagcccctggcagtgctaccccacccaggacaccagaggcagactgtgcccctacttcttcgccaaccaggagttctacagcctggacagccagctgcccatctggggcgtgagacaggtgcactgcggcagcgagatcctgagagtgaccctgtactgcagcttcgacaactacgaggacgccatcagactgtacgagatgatcctgcagagagaggccaccctgcagaagagcaacttctgcttcttcgtgctgtacgccagcaagagcttcgccctgcagctgagcctgaagcagctgccccccggcatgagcgtggaccccaaggagagcagcgtgctgcagttcaaggtgcaggagatcggccagctggtgcccctgctgcccaacccctgcatgcccatcagcagcaccagatggcagacccaggactacgacggcaacaagatcctgctgcagagatgggagagcagcagcgtggcccagaccagagtgagatggtgccaccacagcagcctgagaagcagccccagcggcttcaagtag

SEQ ID NO: 216843 - DNA, 819 bp, Artificial Sequence
  derived and/or modified sequence
atggacgagactcagggccccctggccatgaccgtacacttgcttgcaaacagcggacatggttccctcttgcagaggacgctcgaccagctgctagactgtatatgtccggaggtcagactgtttcaggtgagcgagagagccagtcctgtgaaatattgtgagaagagccattccaaaagatcacgtttccccggcatgtcagttctgttgtttctccacgagtccccaggagaggaccggctgttccgagtgctggactcactccagcatagcccctggcagtgctacccaactcaggacactaggggcaggctgtgtccatattttttcgctaatcaggagttctacagtctggacagccagcttcccatatggggagtgcggcaggtccactgcggctctgaaatcctccgcgtcacactgtactgctcgtttgataattatgaagatgctatcagattatacgagatgatcctacagcgcgaagcaacccttcagaagagcaacttctgcttctttgttctgtacgcttccaaatcttttgcactgcagctatctctgaagcagctgccacctggtatgtctgtggaccccaaggagagctcagtgctacaattcaaagtgcaggagatcgggcagctggtgcccctgctgccaaacccctgtatgcctatcagttcgacgcggtggcagactcaggactatgatggcaacaagatacttctgcagcgctgggaatcaagctctgtcgcacagacgcgggtgcgctggtgtcaccacagtagcctgcgttcctccccttccggctttaagtag

SEQ ID NO: 216844 - DNA, 819 bp, Artificial Sequence
  derived and/or modified sequence
atggacgagactcagggcccacttgctatgaccgtacatctcctcgcgaacagcgggcacgggtctttactccagaggacactggaccagctgctggactgtatctgtcccgaagtccgcctgtttcaggtgagcgagagggcttcccctgtcaaatactgcgaaaaatctcattccaaaagatcgagatttcctggtatgagcgtgctgctgtttctgcatgagtccccaggtgaagatagactgttccgggtcctggattctctccagcatagtccatggcaatgttacccaacgcaggacaccagaggaagactctgcccttatttcttcgcaaaccaggagttctactctcttgattctcagttgccaatctggggagtgcggcaagtacattgtggttctgagatcttgcgcgtgaccttatattgtagctttgataattacgaagacgccattcggctttacgagatgattctgcagagggaagccacactgcaaaagtccaacttttgtttttttgttctttatgccagcaagtctttcgccctgcagctttcattgaaacaattgcctccggggatgtcagtggaccccaaagaatccagtgtgctgcagtttaaagtccaggagattggccagttagtgccactactgccgaacccatgcatgccaatttccagtacacgatggcaaacacaggattacgacggaaataaaatcttgttacaacggtgggaatccagctccgtagcacagactcgagtccgctggtgccaccactctagcctcaggagttcccccagcgggttcaaatag

SEQ ID NO: 216845 - DNA, 2030 bp, Artificial Sequence
  derived and/or modified sequence
cgcagaaaccctggggaacgcctgaaaaggctaaacacaagcagttacattatgcacaagctggatgacgtgaccccgctgctgctgtgtggagagggaggctgctgaacccgagctggtgtgagcttctcttgccgtaagtccacgggtggccaggagcacgtgttagtctggttaagagctctgctcagaagtagccgctgcagctgaaggttttcaggcgggctgaaggctgggccgcttcttcattcatttcagaaacttgaacagtgggccttctacacacgctgtctttgtcagcctcaggcagttcctccatggatgagacacaggggcctctggccatgactgtccatcttcttgccaactctgggcacggctcccttctgcagaggactctggaccagctcctggattgcatttgcccagaggtccggctctttcaggtgtctgaacgggccagtcctgtgaaatactgtgaaaagtcccattccaagcggtcccggtttccagggatgtccgtgttgctcttcctgcacgaaagcccgggagaggataggctatttcgcgtcctggactctctccagcattcgccatggcagtgctaccccacccaggacactcggggaaggctgtgtccctacttttttgccaatcaggagttctacagcctggacagtcagctgcccatctggggggtgaggcaggtgcactgtggctccgagatcctgagggtgacgctgtactgcagttttgataactatgaagacgccatcagactctacgagatgatcctgcagagagaagcgaccttgcaaaagagcaatttttgtttcttcgtgctctatgcctccaagagctttgctctgcagctctccctgaagcagctgcccccgggaatgtcagtggaccccaaagagtcttcggtgctgcagtttaaggttcaagagatcggccagttagtgcctctgctacccaatccatgcatgcctatcagcagcaccaggtggcagactcaggactacgatggcaacaagattctgcttcagagatgggagtcttcctctgttgcccagactcgagtgcggtggtgccatcatagctccctgaggtcttcaccttctgggttcaagtgatcctcctgccttagcctcctgattagctgggactacaggcacgtgccgccatgtctggctattttattttatttctagagacggggtctcactatgttggccgagcttgtttagggatgttaagtttgcagtactattgacttaatttttattctttattattatactttaagttctggggtacatgtgcacaaagtgcaggtttgttacacaggtatacatgtgccatattggtttgttgcacccatcaactcgtattgacttaatttttaagcatcttgcatcactgtcaaattttaccacataccaagttagatagaatgctttcttaaaaaaacttgaaattaaagccttcctttgtaaccatcctcgaaaacctaacatagcatgtgtgtatttagtcatgatagctgccgtgcattgcctttccatggtatgtgagcctgggcacttagtagctgtatgactgtgggcctcagtttcttcattagcacaataaaggcacccgagaattagcatcttcctctctcatacttacttacaggaaatgacctgacacttataaagtacataattaagatagtgccaagaactcaattttagctattattgttcatattatgccctatactaaggattctcttaaattgataattttatttaatacttataacaacctatgaagttactatttttcccattttggagataagaaaactgagctttccagggggtcagttatttgcccaagataggaagtatctatctaccctcaaagttcatgtggtcagccgctgcagtccagtgtatgtgtgtaaatgtgcaagcagggggatgaatgtcatgttcacagcaaaatatcctgtggcttctgtccttaagaaatggtcagaa

SEQ ID NO: 216846 - DNA, 2594 bp, Artificial Sequence
  derived and/or modified sequence
gagagggaggctgctgaacccgagctggtgtgagcttctcttgccgtaagtccacgggtggccaggagcacgtgttagtctggttaagagctctgctcagaagtagccgctgcagctgaaggttttcaggcgggctgaaggctgggccgcttcttcattcatttcagaaacttgaacagtgggccttctacacacgctgtctttgtcagcctcaggcagttcctccatggatgagacacaggggcctctggccatgactgtccatcttcttgccaactctgggcacggctcccttctgcagaggactctggaccagctcctggattgcatttgcccagaggtccggctctttcaggtgtctgaacgggccagtcctgtgaaatactgtgaaaagtcccattccaagcggtcccggtttccagggatgtccgtgttgctcttcctgcacgaaagcccgggagaggataggctatttcgcgtcctggactctctccagcattcgccatggcagtgctaccccacccaggacactcggggaaggctgtgtccctacttttttgccaatcaggagttctacagcctggacagtcagctgcccatctggggggtgaggcaggtgcactgtggctccgagatcctgagggtgacgctgtactgcagttttgataactatgaagacgccatcagactctacgagatgatcctgcagagagaagcgaccttgcaaaagagcaatttttgtttcttcgtgctctatgcctccaagagctttgctctgcagctctccctgaagcagctgcccccgggaatgtcagtggaccccaaagagtcttcggtgctgcagtttaaggttcaagagatcggccagttagtgcctctgctacccaatccatgcatgcctatcagcagcaccaggtggcagactcaggactacgatggcaacaagattctgcttcagagatgggagtcttcctctgttgcccagactcgagtgcggtggtgccatcatagctccctgaggtcttcaccttctgggttcaagtgatcctcctgccttagcctcctgattagctgggactacaggttcagctgaatccagaacttggtgttaagaatggcatcttgggagctggcatgcttcccctgggctccaggctgacttctgtctctgcaaagaggacctcagaacccaggagccagaggaaccagggcaagaggtcccaggggcattctctggagcttcctgagcccagtgggagccccacatcagacaggtgtgctggcacttcgtggaaaagccctggccggtcattccaggtcagcagcccagctatgggtgcccacctgcacctgtcttctcatcaccttgaatccggggccagaatgaaggtcctcaaccgggaaaacagctttcagaagcttgaggccgagacgaatgttgacaccggcttgaccatcataaattctgaacccaggcagacttattttggcggatttccaagggatttacagaccagccagccaccattctgcttgccagcctcttccttgggggtggctacctccaaaaacaacagtgtccttaaggaaagagtctctcctttgccacttgctggccaaagggaccttggtaccaggaagacaatttcagaatgtctccttcatctgcaagttcagggtgaagaaaaagaagaagatgaagaagaattctttatatagcataaaataaatgtggttttctaaaacacaagatcagataaaatgttctagaaatggagtactgacccagaatcagcctgttagttgttcatctgaggggggctgaatgctccccatgcacaatctgtattgattttatttcaaatgttcaaagtctaaaggtgctgggaatgattgtttatttgccgtcacagtcataagagaacacagccaacacacagggaaaaaaaccgaatgcttttgttccgtggagatgcactaacccagctggatgtgttgaatccagcacctatcaggataattgcattgtatgcaaatgaatcggtatgttatacaacactaattagtgtctgtaatttggttttaatttttacttaggttgcatagctcatccccctggacaatatggactgctatttactcttgaatgctttttaattttcatgtgacctcttttggtaactaggccttgttcacataccctccttgtgattttgtctttaaagttgtttgtatctggaatgagtgaaaatgcaaagtgttttgaaaattataaacagttaattttgttttcctgtttaatgagccaaaatactggaagccagaaaatcaggttgaacatgaatgctaggctctagggctttcctgctcatctgcttctcatttgtttctgcactatgtcaaagaggacagtggttcttgttacaaaccaaagaggaacattgagcacagtgggaaaattggactggttgatctggtcactggagcaggacttgggttcttctggccagattttgactcccagattcctttacaaaacgcactcattcattcatttatatatgttcattcaataaacattttttgaataccta

SEQ ID NO: 216847 - DNA, 819 bp, Artificial Sequence
  derived and/or modified sequence
atggatgagacccagggccccctggccatgacagtgcacctgctggccaacagcggccacggcagcctgctgcagaggaccctggaccagctgctggactgcatctgcccagaggtgcggctcttccaggtgtctgagcgggccagccctgtgaagtactgtgagaagagccacagcaagaggagccgcttccctggcatgtctgtgctgctcttcctgcacgagagccctggagaagatagactcttccgggtgctggacagcctgcagcacagcccctggcagtgctaccccacccaggacacccggggccgcctgtgcccctacttctttgccaaccaggagttctacagcctggacagccagctgcccatctggggcgtgcggcaggtgcactgcggcagcgagatcctgcgggtgaccctgtactgcagctttgacaactatgaagatgccatccggctgtatgagatgatcctgcagcgggaggccaccctgcagaagagcaacttctgcttctttgtgctgtatgccagcaagagctttgccctgcagctgagcctgaagcagctgcccccaggcatgtctgtggaccccaaggagagctctgtgctgcagttcaaggtgcaggagatcggccagctggtgcccctgctgcccaacccctgcatgcccatcagcagcacccgctggcagacccaggactatgatggcaacaagatcctgctgcagcgctgggagagcagctctgtggcccagaccagggtgcgctggtgccaccacagcagcctgcggagcagccccagcggcttcaagtag

SEQ ID NO: 216848 - DNA, 819 bp, Artificial Sequence
  derived and/or modified sequence
atggacgagacccagggccccctggccatgaccgtgcacctgctggccaattcaggtcacgggtctttgctgcagcggacactggatcaattgttggattgtatttgtcccgaagtgcggctgtttcaggtatcagaaagggcatctcctgtgaaatactgcgaaaaaagccacagcaagcggtcacggttccccggtatgtcagtgctgttatttctccatgaatctcccggtgaagaccgactgttcagagttttggactccctgcaacatagcccttggcagtgctatccaacccaggataccagagggagactgtgcccctacttttttgccaaccaagaattctatagtctggattcccagctaccaatctggggcgtgaggcaggtacattgtgggtccgagattttgagagtgacactgtattgctccttcgataactacgaggacgcaattcgcctttacgagatgatcctgcagcgagaagccactttacagaagtcaaacttttgcttttttgtgctatacgctagtaaatctttcgcccttcagctgtccctgaagcaactgccccccgggatgagcgtggacccgaaggaatcaagcgttctacaatttaaggtgcaggaaatcggacagctggtcccccttctcccgaacccatgcatgccaatctcttctacacgctggcaaacccaggattacgatggaaacaagattctgttacagcgctgggaaagctcttcagtggcacagactcgggtccgatggtgtcatcatagctcactccgctctagcccatctgggttcaaatag

SEQ ID NO: 216849 - DNA, 819 bp, Artificial Sequence
  derived and/or modified sequence
atggacgagacccagggccccctggccatgaccgtgcacctgctggctaattccggacacggttcccttttgcaacgcactctagaccagctacttgattgtatatgtcctgaggtccgtctgtttcaagtctcagagcgggccagcccagtcaagtactgcgaaaagtcccactcaaaaagatcaaggttccccggaatgagcgtgctactgttccttcacgagagccctggagaggacaggctttttcgggtactagatagcctgcagcattccccgtggcagtgctatccgacacaggacacgagggggagactgtgcccatactttttcgcaaaccaggagttttattcacttgattctcagcttcccatttggggggtacggcaggtacattgcggctccgagatcttgcgcgttaccctgtactgcagtttcgacaattacgaggacgcaatcaggttgtacgagatgatattgcaaagggaagccacccttcagaagtccaatttttgcttcttcgtgttgtatgcgtctaaatcttttgcgcttcagctatccctgaagcagctaccccccggcatgtctgtggaccctaaagagtcatccgttctgcaatttaaagtgcaagaaattggccaactcgtgcctttgctccctaacccttgcatgcccatctctagtacgagatggcagacacaggactacgatggtaataaaatcttgctgcagcgctgggaatccagtagcgtcgctcaaacaagagtaagatggtgtcatcacagttctctgcgatcttccccatcgggctttaaatag

SEQ ID NO: 216850 - DNA, 819 bp, Artificial Sequence
  derived and/or modified sequence
atggatgagactcaggggcctctggcaatgacagtgcacctcctggccaactcaggtcatggctccctgttacaaaggaccctggaccaactgttagactgtatttgtcctgaggtgcgactgttccaggtatccgaaagggcgtctcccgttaagtactgtgagaaatcgcattccaaacggtcacgcttcccgggaatgtctgtgttactgtttttgcacgagtcaccaggcgaagatagactatttcgcgtactggattccctccagcactctccatggcagtgctatccgacacaagatacacggggacgcctgtgtccatactttttcgccaaccaagagttttactcactggattcacagctccccatctggggagtcaggcaggttcactgcggctctgaaatcttgagggtcaccctctattgttcttttgataactatgaggatgctatcaggctatacgagatgatcctacagagggaggctaccctgcagaagagcaatttctgttttttcgtactctatgcgagcaagagtttcgcgctgcagctgagccttaaacaactgccaccgggtatgtcagtagatcccaaagagtcaagcgtgctgcagttcaaggttcaggaaatcggacagctcgtgcctctgctgcccaatccatgcatgccaatcagttctacccgatggcaaacccaggactacgacggcaacaagatcctcctacagcggtgggagtcttccagcgtggcccaaacgcgcgtgagatggtgccaccatagttccctgcgcagctcccctagcggatttaaatag

SEQ ID NO: 216851 - DNA, 819 bp, Artificial Sequence
  derived and/or modified sequence
atggacgaaacccaaggccctttagctatgaccgtacacctcttagcaaattctggtcatggctccctcctgcaaaggacgctggatcaattacttgattgcatctgccctgaagtgaggctgtttcaggtgtcggagcgagcctccccagtgaaatactgcgaaaaatctcattccaagaggtcacggtttcccggaatgtcagttcttctttttctccatgaatccccaggagaggaccgactgttccgagtcttggacagtctacagcatagcccctggcaatgttaccccacacaggacactaggggaagattgtgcccttacttttttgctaaccaggagttctattcgcttgattcccagctccctatctggggagtgaggcaggttcactgcgggtccgaaattctaagggtaaccctctactgttcattcgataattacgaggacgctattaggctctatgagatgattctgcaacgggaggccaccctccagaaatcaaacttctgcttctttgtactatacgcttctaagtctttcgccctgcagctcagcctcaagcagctccctcctgggatgtcagtggatcccaaggaaagcagcgtactccagttcaaagtgcaggagatcgggcagctggtgcccctgcttcctaacccttgtatgcccatcagttcaaccaggtggcagacacaggattacgacggcaacaagattctcctccaacgttgggaaagcagcagtgtggcacagactcgcgtaagatggtgccaccacagttctttaaggtcttccccgagcggctttaaatag

SEQ ID NO: 216852 - protein, 412 aa, Artificial Sequence
  derived and/or modified sequence
MDTRSGSQCSVTPEAILNNEKLVLPPRISRVNGWSLPLHYFQVVTWAVFVGLSSATFGIFIPFLPHAWKYIAYVVTGGIFSFHLVVHLIASCIDPADSNVRLMKNYSQPMPLFDRSKHAHVIQNQFCHLCKVTVNKKTKHCISCNKCVSGFDHHCKWINNCVGSRNYWFFFSTVASATAGMLCLIAILLYVLVQYLVNPGVLRTDPRYEDVKNMNTWLLFLPLFPVQVQTLIVVIIGMLVLLLDFLGLVHLGQLLIFHIYLKAKKMTTFEYLINNRKEESSKHQAVRKDPYVQMDKGVLQQGAGALGSSAQGVKAKSSLLIHKHLCHFCTSVNQDGDSTAREGDEDPCPSALGAKARNSRLICRRLCQFSTRVHPDGGSMAQEADDAPSISTLGLQQETTEPMKTDSAESED

SEQ ID NO: 216853 - DNA, 1239 bp, Artificial Sequence
  derived and/or modified sequence
atggacaccagaagcggcagccagtgcagcgtgacccccgaggccatcctgaacaacgagaagctggtgctgccccccagaatcagcagagtgaacggctggagcctgcccctgcactacttccaggtggtgacctgggccgtgttcgtgggcctgagcagcgccaccttcggcatcttcatccccttcctgccccacgcctggaagtacatcgcctacgtggtgaccggcggcatcttcagcttccacctggtggtgcacctgatcgccagctgcatcgaccccgccgacagcaacgtgagactgatgaagaactacagccagcccatgcccctgttcgacagaagcaagcacgcccacgtgatccagaaccagttctgccacctgtgcaaggtgaccgtgaacaagaagaccaagcactgcatcagctgcaacaagtgcgtgagcggcttcgaccaccactgcaagtggatcaacaactgcgtgggcagcagaaactactggttcttcttcagcaccgtggccagcgccaccgccggcatgctgtgcctgatcgccatcctgctgtacgtgctggtgcagtacctggtgaaccccggcgtgctgagaaccgaccccagatacgaggacgtgaagaacatgaacacctggctgctgttcctgcccctgttccccgtgcaggtgcagaccctgatcgtggtgatcatcggcatgctggtgctgctgctggacttcctgggcctggtgcacctgggccagctgctgatcttccacatctacctgaaggccaagaagatgaccaccttcgagtacctgatcaacaacagaaaggaggagagcagcaagcaccaggccgtgagaaaggacccctacgtgcagatggacaagggcgtgctgcagcagggcgccggcgccctgggcagcagcgcccagggcgtgaaggccaagagcagcctgctgatccacaagcacctgtgccacttctgcaccagcgtgaaccaggacggcgacagcaccgccagagagggcgacgaggacccctgccccagcgccctgggcgccaaggccagaaacagcagactgatctgcagaagactgtgccagttcagcaccagagtgcaccccgacggcggcagcatggcccaggaggccgacgacgcccccagcatcagcaccctgggcctgcagcaggagaccaccgagcccatgaagaccgacagcgccgagagcgaggactag

SEQ ID NO: 216854 - DNA, 1239 bp, Artificial Sequence
  derived and/or modified sequence
atggatacgcggtctggctctcagtgctcagtgactcccgaggcaatcttgaacaacgagaagctggttctgccgccacgtatctccagggtgaacggctggagtctaccactgcactatttccaggtggtcacttgggctgtctttgtgggcttgtcctctgcaacttttggaattttcatcccatttttgccgcacgcctggaaatatattgcctacgtggtgactggtgggatattcagttttcatctcgtggtccacctgatcgcttcatgcatcgaccccgctgattctaatgtgcggttgatgaagaactactcccagcctatgccccttttcgatcggtcaaagcacgcacacgtgatccaaaaccagttttgccacttgtgcaaggtgactgtgaataagaaaacaaagcattgcatttcctgcaataagtgcgtgtcaggcttcgaccatcactgtaagtggatcaacaactgtgtgggttcccgcaactactggttcttctttagcactgtggcaagcgcgaccgcaggaatgctctgcctcatcgctatcctgttatatgtcttggtgcagtacctggtgaacccgggtgtcctgagaaccgacccccgctacgaggacgtgaagaatatgaatacctggctcttatttctccccctatttcctgtccaggtgcagaccctaatagttgtgatcattggaatgctggtgctgctgttagattttcttggactggttcatttgggacagttgcttatctttcatatatatttgaaagcaaagaagatgaccaccttcgagtatctgattaataaccggaaggaggagtcatcaaaacaccaggcagtgagaaaggatccttacgtgcagatggacaagggtgtgctgcagcagggggcgggcgctctggggtcctcagcccagggagtgaaggccaagtcttctcttcttatccataagcacctttgccacttctgcacgtctgttaatcaagacggggacagcacagccagagaaggggatgaggacccttgcccgtctgctctgggggccaaggcccgcaattcgcgcctgatttgcagaaggctgtgccaattcagcacccgagtgcaccccgatggtgggtctatggctcaagaggccgatgacgctcctagcattagtaccttgggtctgcagcaggagactacagaaccaatgaaaacggatagcgcggagtctgaggattag

SEQ ID NO: 216855 - DNA, 1239 bp, Artificial Sequence
  derived and/or modified sequence
atggatacccgcagtggttcacagtgttcagtgacccccgaggcaatcttaaataatgagaagctggtcctgcctccaaggatatcgagagtcaacgggtggtctttgccactgcattactttcaagtggtcacatgggcggtgttcgtcggcttgtccagtgccaccttcggcatttttattccttttctgccccacgcttggaaatatatcgcttatgtggtgaccggaggaatcttttcctttcacctagtggtgcacttaattgcaagttgtatagatcctgccgacagcaatgtcagactgatgaaaaactatagtcaaccgatgcctttgttcgataggtccaaacacgctcacgttattcagaaccagttttgtcacctgtgcaaagtgacagtgaataagaaaaccaagcactgcatctcttgcaacaaatgtgtatctggatttgaccaccattgcaaatggattaacaactgtgtcggttctaggaattactggttcttcttctccaccgtggcctcggcaaccgccggcatgctgtgtcttatcgctattttgctgtacgtcctggttcagtacctggtgaatccaggcgtgctccggactgacccgaggtacgaagacgtgaagaatatgaatacctggttactgttcctcccgctttttcccgtgcaggtgcaaacactgatcgtggtgattatcgggatgttggtgcttttgttggacttcttgggtttagttcatctcggccaactcctgatcttccacatatacctaaaggccaagaagatgaccacttttgaatacttgattaataaccggaaggaggagagttcaaaacaccaagctgtccgcaaggacccctatgtgcagatggacaagggagtcttgcagcagggggcaggggccttaggctctagcgcccagggagtcaaagcgaaatcaagtctgttgatccacaaacatctgtgtcacttttgtacttcagtgaatcaagacggggacagcaccgctagggaaggggatgaagatccctgcccctccgcactcggcgcaaaggcgcgaaattctaggctcatttgcagaaggctgtgccagttcagtacccgcgtgcaccccgacggcggaagcatggctcaggaggcagacgacgcccccagcatctctacattaggcctgcagcaggagacaaccgagccaatgaaaaccgactctgccgagtctgaggactag

SEQ ID NO: 216856 - DNA, 1239 bp, Artificial Sequence
  derived and/or modified sequence
atggacaccaggagcggcagccagtgcagcgtgaccccagaggccatcctgaacaatgagaagctggtgctgcccccacgcatcagccgggtgaatggctggagcctgcccctgcactacttccaggtggtgacctgggccgtgtttgtgggcctgagcagcgccaccttcggcatcttcatccccttcctgccccacgcctggaagtacatcgcctacgtggtgactggaggcatcttctccttccacctggtggtgcacctgattgccagctgcattgatcctgctgacagcaatgtgcggctgatgaagaactacagccagcccatgcccctgtttgacaggagcaagcacgcccacgtgatccagaaccagttctgccacctgtgcaaggtgacagtgaacaagaagaccaagcactgcatcagctgcaacaagtgtgtgtctggctttgaccaccactgcaagtggatcaacaactgtgtgggcagcaggaactactggttcttcttcagcacagtggccagcgccacagctggcatgctgtgcctgattgccatcctgctgtatgtgctggtgcagtacctggtgaaccctggggtgctgaggacagaccccaggtatgaagatgtgaagaacatgaacacctggctgctcttcctgcccctcttccctgtgcaggtgcagaccctcatcgtggtgatcatcggcatgctggtgctgctgctggacttcctgggcctggtgcacctgggccagctgctgatcttccacatctacctgaaggccaagaagatgaccacctttgagtacctgatcaacaacaggaaggaggagagcagcaagcaccaggccgtgaggaaggacccctacgtgcagatggacaagggcgtgctgcagcagggcgctggggccctgggcagcagcgcccagggcgtgaaggccaagagcagcctgctgatccacaagcacctgtgccacttctgcacctctgtgaaccaggatggagacagcacagcccgggagggagatgaggacccctgccccagcgccctgggcgccaaggccaggaacagccgcctcatctgccggcggctgtgccagttcagcaccagggtgcacccagatggcggctccatggcccaggaggctgatgatgcccccagcatcagcaccctgggcctgcagcaggagaccacagagcccatgaagacagattctgctgagagtgaagattag

SEQ ID NO: 216857 - DNA, 1239 bp, Artificial Sequence
  derived and/or modified sequence
atggacacccggagcggcagccagtgcagcgtgacccccgaggccattcttaacaatgagaagctggttttaccaccaagaatctccagggtgaatggctggtcactgcccctccactatttccaagtggtaacttgggctgtatttgtcggattatcgtcagccacatttggaatatttattcctttccttccacacgcatggaaatacatcgcctacgtggtgactgggggcatattctcattccacctggtcgtacatttgatcgccagttgtattgaccccgcagattcaaatgtgaggctgatgaagaattattcacaaccaatgcctttgttcgataggtctaaacacgcccatgtaattcagaatcaattctgccacctttgtaaggtcacagtcaacaagaaaacgaagcactgcatcagttgtaacaagtgcgtgtctggcttcgaccaccattgtaaatggatcaacaattgtgtgggatcccgcaactattggttcttcttttctacggtagcctcagccactgccggtatgctctgtctgattgctattctgttgtatgtcctggtacaatatttggtgaatccaggtgtcctgcgcaccgaccctcggtatgaggatgtgaagaatatgaacacgtggctcctgttccttccacttttcccagttcaagtgcagactttaattgtcgtgataattgggatgttagttctgctgcttgattttctggggttagtgcaccttggtcagctgctgatatttcatatatatctaaaagccaagaaaatgacgacatttgagtacctcattaataaccgaaaagaggagtcctcaaaacatcaagccgtgcgcaaggacccttacgtccaaatggataaaggcgtgctccaacagggggccggtgccctggggagtagcgctcaaggagtcaaggctaagtcaagtcttctgattcacaagcatctgtgtcacttctgtacatctgtgaatcaggacggcgacagcacagccagggagggggacgaagacccttgtcccagtgccctgggtgccaaagcgaggaattctagattgatttgtagaaggttgtgtcagttctccacccgcgtgcaccctgacggcgggtcaatggcccaggaggctgatgacgcacctagcatctctactcttggacttcaacaggagacaacagagcctatgaagacagatagtgccgaatcagaggactag

SEQ ID NO: 216858 - DNA, 1239 bp, Artificial Sequence
  derived and/or modified sequence
atggacacccggagcggcagccagtgcagcgtgacccccgaggccatcctgaacaatgagaagctcgtgctgcccccacggatatcccgggtaaatggctggtccctgcccctgcactacttccaggtggtgacttgggcagtatttgttggactgtcatctgcaacattcggcatttttattccattcctgccgcacgcttggaaatatatcgcgtacgttgtgaccgggggcatttttagctttcatctcgtcgtgcatcttattgcatcctgcatcgacccagctgattctaatgttcgccttatgaagaattattctcagcccatgcccttgtttgaccgatctaagcatgcccacgtcatacagaaccagttttgtcacctgtgcaaggtcactgtcaacaagaagactaagcattgcataagttgtaataaatgcgttagcggctttgaccaccactgcaaatggattaacaattgcgtcggatcccgcaactactggttcttcttttctaccgttgcctctgccacagctggcatgctctgtctgattgctattctgttgtacgtgctcgtccagtatctggtaaacccaggcgtgctaaggacagaccccaggtacgaagatgtcaaaaatatgaatacctggttgctatttctccccttgttccctgttcaggtccagaccttgattgtcgttatcatcggcatgttagttctactgctggactttctgggtctcgtgcatttgggccagctgcttatctttcacatatatctcaaggccaaaaagatgaccacattcgagtatctgatcaacaacagaaaggaagagtcatccaagcatcaggcagtccgaaaggacccgtatgtgcagatggacaaaggcgtactgcagcagggggctggcgctcttggttcgagtgcccaaggtgttaaggctaagtctagtctgttgatacacaaacacctgtgccatttctgcacaagcgtgaatcaagatggagatagcactgcgcgtgaaggcgacgaggatccctgccccagcgcactgggagccaaagcgagaaactctcgtttgatatgtcgcaggctttgccagttctctacaagggttcaccccgacggaggttccatggcccaagaggctgatgacgcccccagcatatcaaccctcgggttgcaacaggagacaaccgagcccatgaaaaccgacagcgccgagtccgaagactag

SEQ ID NO: 216859 - DNA, 1239 bp, Artificial Sequence
  derived and/or modified sequence
atggacacccggagcggctcacaatgctcggtcacgcctgaggctatcttaaacaacgagaagctcgtgttgcctccacgcatctctcgggtcaacgggtggtccctcccgctccattactttcaggtcgtcacctgggctgtctttgtggggttaagctcagccacttttgggatttttattcccttccttccacacgcctggaagtatattgcttatgttgttacaggtggcatatttagtttccacctggttgtgcatttaatcgcctcttgtatcgacccagcagactcaaacgtcagacttatgaaaaattacagccagcccatgcctctgtttgaccggtccaagcacgcacatgtaatacagaatcagttctgtcatctctgtaaagttaccgtgaacaagaagaccaagcattgtatttcctgtaataagtgtgttagtgggtttgatcatcattgtaagtggataaataactgcgtaggctcaagaaattactggtttttcttctcgaccgttgcctctgcaactgctggaatgctgtgtcttatcgccatcttactgtacgtcctcgtacagtacctggtaaatccgggagtgctgagaacggacccacgttatgaagatgtcaaaaatatgaacacctggctgttgttcctgccgctgtttcccgtccaggttcaaacccttatcgtcgtgattataggtatgctggtcctcttgctcgattttctgggcctagtgcacctcggccagctgctgatattccacatctacctgaaagccaaaaagatgaccacatttgaataccttatcaacaaccgcaaggaggagtcctcaaagcaccaagcagttcggaaggatccatacgtacagatggataagggggtgctgcagcaaggcgcaggcgcacttgggagttccgcccagggcgtaaaggccaaatcatctctgctgatccataagcacttgtgtcacttctgcactagtgttaaccaagacggtgattccaccgctagagaaggcgatgaggatccttgcccttctgcacttggggcaaaggcccgtaattcccggctgatttgccgcagactttgccagttttcaactagggtgcatcctgatggcggaagcatggcccaagaggctgatgatgctcctagtatctccactctcggcctgcagcaagagactacagagcccatgaagacagattccgccgaatctgaggactag

SEQ ID NO: 216860 - DNA, 1239 bp, Artificial Sequence
  derived and/or modified sequence
atggatacgcggagcggctcacagtgcagtgttacccccgaagctattctaaataatgagaaattggttctcccaccaaggattagccgagtcaacgggtggagtcttcctcttcactattttcaggtggtgacatgggctgtttttgtgggcctcagcagtgccacattcggcatctttattccctttctcccacatgcctggaaatacattgcatatgtggtcacgggaggaatcttctcttttcacctcgtggttcacctaatcgcgtcgtgcatcgatcccgcagacagtaacgtgcgactgatgaagaattacagccagccaatgcctctgtttgatcggtcaaagcacgctcatgtgattcaaaaccagttctgtcacctgtgtaaagttactgtgaataagaaaacaaagcactgcatcagttgtaacaaatgcgtttctggtttcgaccaccattgcaagtggataaacaactgtgtggggtcaaggaactactggttcttcttttctaccgtggcatcagctactgccggaatgttatgcctgatagccatcctactgtatgtcttggtgcaataccttgtaaaccccggagttctgcggactgatccaaggtatgaggatgtcaaaaacatgaatacatggcttctattcctcccgttgttccctgtgcaggttcagacactgatcgtcgtgataatcgggatgctggttctcctgctggatttcttgggcctggttcatctcggacagctcttgatctttcacatttatctcaaggccaaaaaaatgaccaccttcgagtatttaattaacaatagaaaagaggagtctagcaagcaccaagctgtgcggaaagatccttatgtgcaaatggacaagggggtgctgcagcagggagccggtgcactgggtagctcggcacagggtgtgaaggccaagtcatcccttctaatccataaacatttgtgtcacttctgtacgagtgtgaatcaagatggagattcaaccgctcgagaaggtgacgaagatccttgccccagtgccctcggagctaaagcccgaaacagcagactgatttgccggagattatgccagttctctactcgggtgcacccagatggcggatccatggcacaggaggctgacgacgcaccaagcatctcaactctgggcctgcagcaagagacaacagaacctatgaagactgatagcgccgaatccgaggactag

SEQ ID NO: 216861 - DNA, 2604 bp, Artificial Sequence
  derived and/or modified sequence
gtgaacgggttgtgggacctgtcgctgtgtgggggctgtcgagcactccccagaacgtaacaaatcctcaggggaactgatgggcggtcgcgcgggcactgggtcctccacaccctggagagccgttttccgttgccactcggctctggccggggtcacattctgcagcatgtctgttcattcccctgggcggggccctgcaccgactccagcccagcccctgctccctctgcggggaacgtggccccaggcagtgctgggccattggctgtcagtgctggtcctggcggctgcattcccagtccccttggtctctgtgacagtgggcggggccggccctcccaggatctgacggcgcaggtcctccccttctgtgtcctgcagatggacacccgctccgggagccagtgttccgtcaccccagaagccatactcaataatgaaaagctggtcttgccgccccgcatctccagagtgaacggctggtcgttacccctgcactacttccaggtggtgacctgggctgtcttcgtgggcctttcctcggccaccttcgggatcttcattcccttcctgcctcacgcgtggaaatacattgcctacgtggtgaccggggggatcttctcgttccacctcgtcgtccacctgatcgcgtcctgcatcgacccggccgactccaatgtcagactcatgaagaactattctcagcccatgcccctcttcgacagatcaaaacatgcacacgtgatccagaatcagttctgccacctgtgcaaggtcaccgtgaacaagaaaaccaaacactgcatttcctgcaataagtgtgtgtccggcttcgaccaccactgcaaatggatcaacaactgcgtgggaagccggaattattggttcttcttcagcactgtggcctcggccacagctggcatgctctgcctgatcgccatcctgctgtatgtcctcgtccagtacctcgtgaaccccggggtgctccgcacggaccccaggtatgaagatgtcaagaatatgaacacgtggctgctgttcctccccctgttcccggtgcaggtgcagaccctgatagtcgtgatcatcgggatgctcgtgctcctgctggactttcttggcttggtgcacctgggccagctgctcatcttccacatctacctgaaggccaagaagatgaccacctttgagtatctcattaataaccgcaaagaagagagttcaaaacatcaagcagtgaggaaagatccatacgtgcaaatggacaaaggagttctccagcaaggagctggcgccctgggctcatctgcacagggagtcaaagccaagagctccctgctgattcacaagcacttatgtcacttctgcacttcagtaaaccaggatggggattcgacggcacgggaaggggatgaagacccgtgtccatctgcacttggagccaaggccaggaactcccggctgatttgcaggcgcctgtgtcagttctccactcgtgtacacccagacgggggctcgatggcacaggaagcagatgatgccccgagtatatctacacttgggctgcaacaagaaacaacagagcccatgaaaactgacagtgctgaaagtgaagactgagattcaggagctcaggtgcccctgtgatccaggtcttctaccctgaaaccccaccctccatcaaggtcctgcctgtagagtctaccttgcaaagcctcctgctcctacccatgctacaggccaggaaccagagcccatcatctcagaggcccctggatgtccttcgaaggaaccaggaccctcagagcccagcatccatctctgtcatcatcttcatcacacccaaagaagagccagccttgcaggagggtttacatctccaggaagatgggctgccagcaactgcagaggatgcagccacctgcttaactgtgctgtccagccagccagccagctgcagggcctcttgctgcttaagagctgatgggccgggcatgttggctcacacctgtgagcacagtactgggaaatgggagcacagtactaggaaatgggagcacagtactgggaaatgggagcacagtactgggaaatgggggctcacagcactgcaaaatgggagcacagtattgggaaatgggagcacagtactgggaagtgggagcacagtactgagaagtgggagcacagtactgagaaatgggagtacactactgagaaatgggagcacagtactgggaaatgggcatacagtactgagaaatgggagcacacagtactgggaaatgggagcacagtactgggaaatgggagcccacagtactgggaaaggggagttcacagtactcggaaatgggagcatagtactgggaaatgggagcacagtactgggaaatgggagcatagtactgggaaaccccagacctggattctgagtttttcagcctagcccagacttcttatcttagtagacaaaaagagtcaataccagagaaccagaggcatcctctgtattttaatgaactctgcattttaatctgtttagtagtcattttttaaaagataatcagttttccaaatatatctataagttactacgtg

SEQ ID NO: 216862 - DNA, 2245 bp, Artificial Sequence
  derived and/or modified sequence
cagatggacacccgctccgggagccagtgttccgtcaccccagaagccatactcaataatgaaaagctggtcttgccgccccgcatctccagagtgaacggctggtcgttacccctgcactacttccaggtggtgacctgggctgtcttcgtgggcctttcctcggccaccttcgggatcttcattcccttcctgcctcacgcgtggaaatacattgcctacgtggtgaccggggggatcttctcgttccacctcgtcgtccacctgatcgcgtcctgcatcgacccggccgactccaatgtcagactcatgaagaactattctcagcccatgcccctcttcgacagatcaaaacatgcacacgtgatccagaatcagttctgccacctgtgcaaggtcaccgtgaacaagaaaaccaaacactgcatttcctgcaataagtgtgtgtccggcttcgaccaccactgcaaatggatcaacaactgcgtgggaagccggaattattggttcttcttcagcactgtggcctcggccacagctggcatgctctgcctgatcgccatcctgctgtatgtcctcgtccagtacctcgtgaaccccggggtgctccgcacggaccccaggtatgaagatgtcaagaatatgaacacgtggctgctgttcctccccctgttcccggtgcaggtgcagaccctgatagtcgtgatcatcgggatgctcgtgctcctgctggactttcttggcttggtgcacctgggccagctgctcatcttccacatctacctgaaggccaagaagatgaccacctttgagtatctcattaataaccgcaaagaagagagttcaaaacatcaagcagtgaggaaagatccatacgtgcaaatggacaaaggagttctccagcaaggagctggcgccctgggctcatctgcacagggagtcaaagccaagagctccctgctgattcacaagcacttatgtcacttctgcacttcagtaaaccaggatggggattcgacggcacgggaaggggatgaagacccgtgtccatctgcacttggagccaaggccaggaactcccggctgatttgcaggcgcctgtgtcagttctccactcgtgtacacccagacgggggctcgatggcacaggaagcagatgatgccccgagtatatctacacttgggctgcaacaagaaacaacagagcccatgaaaactgacagtgctgaaagtgaagactgagattcaggagctcaggtgcccctgtgatccaggtcttctaccctgaaaccccaccctccatcaaggtcctgcctgtagagtctaccttgcaaagcctcctgctcctacccatgctacaggccaggaaccagagcccatcatctcagaggcccctggatgtccttcgaaggaaccaggaccctcagagcccagcatccatctctgtcatcatcttcatcacacccaaagaagagccagccttgcaggagggtttacatctccaggaagatgggctgccagcaactgcagaggatgcagccacctgcttaactgtgctgtccagccagccagccagctgcagggcctcttgctgcttaagagctgatgggccgggcatgttggctcacacctgtgagcacagtactgggaaatgggagcacagtactaggaaatgggagcacagtactgggaaatgggagcacagtactgggaaatgggggctcacagcactgcaaaatgggagcacagtattgggaaatgggagcacagtactgggaagtgggagcacagtactgagaagtgggagcacagtactgagaaatgggagtacactactgagaaatgggagcacagtactgggaaatgggcatacagtactgagaaatgggagcacacagtactgggaaatgggagcacagtactgggaaatgggagcacagtactgggaaatgggagctcacagtactgggaaatgggagctcacagtactgggaaatgggagcacagtactgtgaaatgggagcacagtactgggaaatgggagcatagtactgagaaaccccagacctggattctgagtttttcagtctagcccagacttcttatcttagtagacaaaaagagtcaataccagagaaccagaggcatcctctgtattttaatgaactctgcgttttagtctgtttagtagtcatattttaaaagataatcagttttctaaatatatctataagttactacatgc

SEQ ID NO: 216863 - protein, 1221 aa, Artificial Sequence
  derived and/or modified sequence
MLFPLQVAAVTSSVRDDPLEHCVSPRTRARSPEICKMADNLDEFIEEQKARLAEDKAELESDPPYMEMKGKLSAKLSENSKILISMAKENIPPNSQQTRGSLGIDYGLSLPLGEDYERKKHKLKEELRQDYRRYLTQERLKLERNKEYNQFLRGKEESSEKFRQVEKSTEPKSQRNKKPIGQVKPDLTSQIQTSCENSEGPRKDVLTPSEAYEELLNQRRLEEDRYRQLDDEIELRNRRIIKKANEEVGISNLKHQRFASKAGIPDRRFHRFNEDRVFDRRYHRPDQDPEVSEEMDERFRYESDFDRRLSRVYTNDRMHRNKRGNMPPMEHDGDVIEQSNIRISSAENKSAPDNETSKSANQDTCSPFAGMLFGGEDRELIQRRKEKYRLELLEQMAEQQRNKRREKDLELRVAASGAQDPEKSPDRLKQFSVAPRHFEEMIPPERPRIAFQTPLPPLSAPSVPPIPSVHPVPSQNEDLRSGLSSALGEMVSPRIAPLPPPPLLPPLATNYRTPYDDAYYFYGSRNTFDPSLAYYGSGMMGVQPAAYVSAPVTHQLAQPVVNTVGQNELKITSDQVINSGLIFEDKPKPSKQSLQSYQEALQQQIREREERRKKEREEKEEYEAKLEAEMRTYNPWGKGGGGAPLRDAKGNLITDLNRMHRQNIDAYHNPDARTYEDKRAVVSLDPNLATSNAENLEDAANKSSGHMQTQSSPFARGNVFGEPPTELQIKQQELYKNFLRFQIEEKKQREEAERERLRIAEEKEERRLAEQRARIQQEYEEEQEKKREKEEEQRLKNEEHIRLAEERQKEAERKKKEEEEKYNLQLQHYCERDNLIGEETKHMRQPSPIVPALQNKIASKLQRPPSVDSIIRSFIHESSMSRAQSPPVPARKNQLRAEEEKKNVIMELSEMRKQLRSEERRLQERLLHMDSDDEIPIRKKERNPMDIFDMARHRLQAPVRRQSPKGLDAATFQNVHDFNELKDRDSETRVDLKFMYLDPPRDHHTLEIQQQALLREQQKRLNRIKMQEGAKVDLDAIPSAKVREQRMPRDDTSDFLKNSLLESDSAFIGAYGETYPAIEDDVLPPPSQLPSARERRRNKWKGLDIDSSRPNVAPDGLSLKSISSVNVDELRVRNEERMRRLNEFHNKPINTDDESSLVDPDDIMKHIGDDGSNSVATEPWLRPGTSETLKRFMAEQLNQEQQQIPGKPGTFTWQGLSTAHG

SEQ ID NO: 216864 - DNA, 3666 bp, Artificial Sequence
  derived and/or modified sequence
atgctgtttccgttacaagtcgcagctgttactagctctgtccgagacgatccactggagcactgcgtcagtcctcgtacacgggcccggtcaccggagatctgcaaaatggctgataacttggacgagtttatcgaagagcaaaaagccaggctggcagaggataaggcagagctggaaagcgacccaccatacatggagatgaaggggaaactcagcgccaaactcagtgagaatagcaagatcctgattagcatggccaaggaaaatattcctcccaattcacaacagacacgcggcagcttgggcatagactacggacttagcctgcctctgggggaagactacgagaggaagaaacacaagctgaaggaggaactgcgccaggattatcgccgatacttaacgcaggaacggctgaaactggagcgcaacaaagagtacaaccaattcttgagaggtaaagaagagtcgtcagagaaatttaggcaagtcgagaaatccacagaacctaagtcacagcgaaacaagaagcccattggccaggttaagcccgatttgacctcccaaattcaaacgagttgcgaaaattctgaagggcccaggaaggatgtccttaccccttccgaagcatatgaagagctcctcaatcaacggcgcctcgaggaagatagatataggcagctggatgatgagatcgaactgaggaacagacgaattattaaaaaggccaacgaggaagtgggcatctcaaacttgaaacatcaaagattcgcatctaaggctggaatcccggacaggaggttccatcgcttcaacgaggaccgggtcttcgatcgccggtaccaccgacccgaccaggatcctgaggtgagcgaggagatggatgaacggttccgatacgagagcgacttcgatcgacgactcagcagagtgtacaccaatgatagaatgcatcgcaacaagcgaggcaatatgcctccaatggaacacgacggggacgtaatcgaacagtctaatatccgcatctcctccgcagagaataagagtgcgcctgataacgaaacaagtaagtctgcgaaccaggatacatgcagcccattcgctggcatgttattcggcggtgaggacagggagcttatccaaagaagaaaggaaaaatacagactagaacttcttgagcagatggccgaacagcagagaaataaacgaagagagaaggatctggaactgcgcgtggctgcatctggggcccaggaccccgaaaagtcacctgaccgcctgaaacagttctcagtcgccccgcgtcattttgaggagatgatcccacctgaaagacctcggattgcattccagactccgctcccacctttgtctgccccctccgtgccccctattcctagtgttcaccccgtcccttctcagaatgaagatcttcggagcggtctgagcagcgccctgggcgagatggtgtcccctcgaattgcccctctccctcctccacccctgctgccccctttggccacaaactatagaacaccctatgacgatgcctactacttctacggatctcggaacacttttgatccttcccttgcatactacggctccggcatgatgggcgttcagccggctgcgtacgtgtcagcacctgtcacacaccaattggcacagcccgtcgttaatactgtaggacagaatgaattgaagattacctctgaccaggttatcaactccggcctcattttcgaggataagccaaaaccatcgaagcagagtctgcaaagctatcaggaggccttgcagcaacagatcagggagagagaggagcgccggaagaaggaacgggaagagaaggaagagtatgaagccaaacttgaagcggaaatgagaacttacaatccctggggcaaaggcggaggcggtgcccccctgagagacgccaagggcaatctgattaccgatctaaatcggatgcatagacagaatatcgatgcttaccataaccccgatgctcgaacatatgaggataagcgagccgttgtgtcgctggaccccaatttagctaccagcaacgctgagaatctagaggatgcagccaacaagtcgtcggggcacatgcagacccagtcttccccgtttgcccgcgggaatgtattcggagagcctccaaccgagctccagatcaaacagcaggaattgtacaaaaatttcctcaggtttcagattgaagagaagaaacagcgggaggaggcggagagagagcggctcaggatcgccgaagagaaagaggagcgcagactggcagagcagcgagctagaatccaacaggaatatgaggaagaacaagaaaaaaaacgggagaaggaggaggaacaacgtctgaaaaatgaagagcacatacgacttgccgaggagcgtcaaaaggaggccgagcggaagaaaaaggaagaagaagagaagtataacctacagctccagcactattgcgagcgtgataatttgatcggagaggaaaccaaacacatgagacaacccagtccaattgtaccagcgttgcaaaacaagattgctagtaagctccagaggccgcctagtgtggacagtatcattcgatctttcattcatgaaagttccatgagtagggctcagtcccccccagtgccggctagaaagaatcagctacgggcagaagaagaaaaaaagaatgtgatcatggagcttagcgaaatgcgcaagcaattacgctctgaggaaaggaggctgcaggaacgattactgcatatggactccgatgacgagattcccatccggaaaaaagaaagaaatccaatggacatattcgacatggcccggcacagactgcaggcccctgttagacggcagagccccaagggtctggatgctgccacgtttcagaatgttcatgattttaatgaactaaaagatcgggacagtgagactcgggtagacctcaagttcatgtacctcgatccccctagagatcaccatactctcgagatccagcagcaagccctgctgcgcgaacagcagaaaaggcttaataggattaagatgcaggagggtgccaaggtcgatctggacgctatccctagtgctaaagtaagggagcagcggatgcccagagacgacaccagtgacttcctcaagaattcgctcctggaaagcgatagcgccttcataggtgcgtatggagaaacctaccccgccattgaggatgatgtgctgcccccaccgtcgcagctcccatccgcaagagagcgacgccgtaacaagtggaaaggtctagacatcgactcatccaggccaaacgttgcccctgacggtctgtccctcaagagtatctcgtccgtaaatgtcgacgaactgagggtgaggaatgaggaaagaatgcgcagacttaacgaattccacaataagcccatcaataccgatgatgagtcttccctggttgaccccgatgacataatgaagcatatcggcgatgatgggtccaattcagtcgccaccgagccatggctccgacctggcaccagcgagacgttgaagaggttcatggcagagcagttgaaccaggagcagcagcagatacctgggaaaccaggtacctttacttggcagggtctgagcactgcacacggctag

SEQ ID NO: 216865 - DNA, 3666 bp, Artificial Sequence
  derived and/or modified sequence
atgctgttccccctgcaggtggccgctgtgaccagctctgtgagagatgaccccctggagcactgtgtgagccccaggacccgggcccggagccctgagatctgcaagatggctgacaacctggatgagttcatcgaggagcagaaggcccggctggccgaggacaaggccgagctggagagtgaccccccctacatggagatgaagggcaagctgagcgccaagctgtctgagaacagcaagatcctgatctccatggccaaggagaacatcccccccaacagccagcagacccggggcagcctgggcatcgactatggcctgagcctgcccctgggggaggactatgaaaggaagaagcacaagctgaaggaggagctgcggcaggactaccgccgctacctgacccaggagcggctgaagctggagaggaacaaggagtacaaccagttcctgcggggcaaggaggagagcagcgagaagttccggcaggtggagaagagcacagagcccaagagccagaggaacaagaagcccatcggccaggtgaagccagacctgaccagccagatccagaccagctgtgagaacagcgagggccccaggaaggatgtgctgaccccatctgaggcctatgaggagctgctgaaccagaggcggctggaggaggaccgctaccggcagctggatgatgaaattgagctgaggaacagacgcatcatcaagaaggccaatgaggaggtgggcatcagcaacctgaagcaccagagatttgccagcaaggccggcatcccagaccggcgcttccaccgcttcaatgaagatagagtgtttgaccggcgctaccacaggccagaccaggaccctgaggtgtctgaggagatggatgagcgcttccgctatgaaagtgactttgaccggcggctgagccgggtgtacaccaatgacaggatgcacaggaacaagaggggcaacatgccacccatggagcatgatggagatgtgattgagcagagcaacatccgcatcagcagcgctgagaacaagagcgccccagacaatgagaccagcaagagcgccaaccaggacacctgcagcccctttgctggcatgctgtttggaggagaggaccgggagctgatccagaggaggaaggagaagtaccgcctggagctgctggagcagatggccgagcagcagaggaacaagaggcgggagaaggacctggagctgcgggtggccgccagcggggcccaggaccctgagaagagcccagaccggctgaagcagttctctgtggcccccaggcactttgaggagatgatccccccagagcggcccagaattgccttccagacccccctgccccccctgagcgcccccagcgtgccccccatccccagcgtgcaccctgtgcccagccagaatgaagacctgcggagcggcctgagcagcgccctgggggagatggtgagccccagaattgcccccctgcccccaccacccctgctgccccccctggccaccaactaccgcaccccctatgatgatgcctactacttctacggcagcaggaacacctttgaccccagcctggcctactacggcagcggcatgatgggcgtgcagcctgctgcctacgtgtctgcccctgtgacccaccagctggcccagcctgtggtgaacacagtgggccagaatgagctgaagatcaccagtgaccaggtgatcaacagcggcctcatctttgaggacaagcccaagcccagcaagcagagcctgcagagctaccaggaggccctgcagcagcagatccgggagcgggaggagaggaggaagaaggagcgggaggagaaggaggagtatgaggccaagctggaggccgagatgaggacctacaacccctggggcaagggcggcggcggggcccccctgagagatgccaagggcaacctgatcacagacctgaacaggatgcaccggcagaacattgatgcctaccacaacccagatgcccggacctatgaggacaagagagctgtggtgtccctggaccccaacctggccaccagcaatgctgagaacctggaggatgctgccaacaagagcagcggccacatgcagacccagagcagcccctttgcccggggaaatgtgtttggagagcccccaacagagctgcagatcaagcagcaggagctgtacaagaacttcctgcgcttccagatcgaggagaagaagcagcgggaggaggccgagcgggagcggctgagaattgctgaggagaaggaggagcggcggctggccgagcagagggcccgcatccagcaggagtatgaggaggagcaggagaagaagcgggagaaggaggaggagcagaggctgaagaatgaggagcacatccggctggccgaggagcggcagaaggaggccgagaggaagaagaaggaggaggaggagaagtacaacctgcagctgcagcactactgtgagcgggacaacctgattggagaggagaccaagcacatgaggcagcccagccccatcgtgcctgccctgcagaacaagatcgccagcaagctgcagaggcctcccagcgtggacagcatcatccgctccttcatccacgagagctccatgagccgggcccagagcccccctgtgcctgccaggaagaaccagctgcgggcagaggaggagaagaagaatgtcatcatggagctgtctgagatgaggaagcagctgcggtctgaggagcggcggctgcaggagcggctgctgcacatggacagtgatgatgagatccccatcaggaagaaggagaggaaccccatggacatctttgacatggcccggcaccggctgcaggcccctgtgcggcggcagagccccaagggcctggatgctgccaccttccagaatgtgcatgacttcaatgagctgaaggaccgggacagcgagaccagggtggacctgaagttcatgtacctggaccccccccgggaccaccacaccctggagatccagcagcaggccctgctgcgggagcagcagaagaggctgaaccgcatcaagatgcaggagggcgccaaggtggacctggatgccatccccagcgccaaggtgcgggagcagaggatgcccagagatgacaccagtgacttcctgaagaacagcctgctggagagtgacagcgccttcatcggggcctatggagagacctacccagccattgaagatgatgtgctgcccccacccagccagctgcccagcgcccgggagaggagaagaaacaagtggaagggcctggacatcgacagcagccggcccaacgtggccccagatggcctgagcctgaagagcatcagctctgtgaatgtggatgagctgcgggtgagaaatgaggagaggatgaggcggctgaatgagttccacaacaagcccatcaacacagatgatgagagcagcctggtggaccctgatgacatcatgaagcacatcggagatgatggcagcaacagcgtggccacagagccctggctgcggcccggcaccagcgagaccctgaagcgcttcatggccgagcagctgaaccaggagcagcagcagatccctgggaagccaggcaccttcacctggcagggcctgagcacagcccacggctag

SEQ ID NO: 216866 - DNA, 3666 bp, Artificial Sequence
  derived and/or modified sequence
atgctgttccccctgcaggtggccgccgtgaccagcagcgtgcgggatgatccccttgaacattgcgtgagtccaaggacacgggcccgctctccagagatatgtaagatggctgacaacctcgatgagtttattgaggagcagaaagcccgcctggctgaggataaagctgaactcgaaagcgacccaccgtacatggagatgaagggcaaactctctgcaaagctgagtgaaaactctaagattcttattagtatggctaaggagaatatcccaccgaatagtcagcagacgcgagggtctcttggcattgactacggactatccctacccctcggagaagattatgaacgaaagaagcacaagctcaaggaagaactaaggcaggattatcgacgctatttgacacaggaaagactcaagttagagagaaataaagagtacaatcaattcttgcgggggaaggaggagagcagtgagaagttccggcaagtagaaaagtccacagagccaaaatcccagagaaataagaagccaatcggtcaagttaagcctgatctcacctcgcagattcagacctcctgtgagaactctgagggaccgcgcaaggatgtgttgaccccgtctgaggcctatgaagagcttctcaatcagagacgccttgaggaagatcggtatcggcagctagacgatgaaatagagctgcgtaaccgcagaattatcaaaaaagctaatgaggaggtcgggatatcaaaccttaagcaccagaggttcgcatctaaagctggcatcccagaccgaaggttccataggttcaatgaggacagggttttcgacagacgttatcaccgccctgaccaggatcccgaggtctcagaggagatggacgagcgtttcagatatgagagtgatttcgacagaaggctttcccgggtatacacgaatgaccggatgcaccgcaataagcgaggtaatatgcctccgatggagcacgacggagacgtaatagagcagtctaatattaggatcagttctgccgaaaacaaaagtgcccccgacaacgagactagcaaatcagccaatcaggacacatgttcacccttcgcggggatgctcttcggaggcgaagatcgggaactgattcagagacgcaaggaaaagtatcggctcgagctgctcgaacagatggctgagcagcagcgcaataaacgtagggaaaaagatctggagctgagggtggccgcatctggtgcgcaggaccccgaaaagagtcccgataggctaaagcaattctctgtcgctccccggcattttgaagagatgattccaccagaacgacccagaatagccttccagacaccgcttccccccctgtctgctccaagcgttccccccatcccgtctgtccacccggtgccctcccagaacgaagatctgcgctcgggcctatcttctgctcttggagaaatggtaagccctaggatcgcccctctccccccaccccctttactgcctccccttgcgaccaattacagaaccccgtacgacgacgcgtactacttttacggctcccgcaataccttcgatccgagcctagcttactatggctcaggcatgatgggtgtccaaccagccgcatacgtgtctgctcccgtcacacaccagctggctcagcctgtagtgaacaccgtagggcagaacgagctgaaaatcacaagtgaccaggtgattaacagcggcctgatcttcgaggataagccgaagcccagtaagcaatctctccagagctatcaggaggccctgcaacaacagatacgggagcgagaggagaggaggaagaaggagagagaagagaaagaggagtatgaggccaagttggaggctgagatgcggacctataacccgtggggcaaagggggaggtggcgcgcctcttagagacgcgaaaggaaaccttataacagatctgaatcgaatgcacaggcagaacatcgacgcctatcacaacccagacgccaggacatacgaagacaagcgggcagtcgttagtctggaccctaacctcgcaaccagcaatgctgagaacctcgaagacgctgctaataaatcatctgggcatatgcaaacacaaagtagcccattcgcacgcgggaatgtgttcggggaaccgccaactgaactccagatcaaacagcaagagctgtataaaaattttctgcgttttcagattgaagagaaaaaacaacgtgaggaggcggagagggagagactacgaatcgcagaagagaaggaggaacggcggctggcagagcagagggctagaatccagcaggagtacgaggaagaacaggaaaaaaagcgtgagaaggaagaagaacagcgcctgaagaatgaggagcacataaggttggctgaagaacgtcagaaggaggccgagaggaaaaagaaggaagaggaggagaagtacaacctccaactgcaacactactgtgaaagggataatttgatcggggaggagacaaagcacatgcggcagccaagccctattgtccccgcactgcagaataagatcgctagcaagttgcagcgtcctccgtccgtggatagcatcattaggagcttcatccatgaatcttccatgagccgggcacagagtccccctgtgcccgctcgtaaaaaccaactgcgggccgaagaggaaaaaaagaacgtaatcatggaattgtccgagatgcgcaagcagctgagatctgaagaaaggaggctccaagagaggctgctgcacatggattcggacgatgagatccctattcgcaagaaagaacgcaacccaatggacattttcgacatggcaaggcacaggcttcaggcgccagtcagacgacaatccccaaaggggctggacgctgcaacctttcaaaacgtccacgatttcaatgagctcaaagacagagacagcgaaacacgggtggatctgaaatttatgtatctggacccacctagggatcatcacacgttggagatacagcagcaagccctgcttcgcgaacagcaaaagaggctgaaccgtatcaaaatgcaggaaggggccaaggtggacctcgacgccatcccatccgctaaagtgcgcgagcagcgcatgccccgcgacgacacgagcgattttcttaagaacagcctgctggagagcgatagcgcctttatcggtgcctatggagaaacttaccccgccatcgaagatgacgtgctgcccccccctagtcaacttccctccgccagagaacgccgacgtaacaaatggaagggcttggacattgatagctctcgtccgaatgtggcgccagacgggctgtccctgaagtctatatccagcgttaacgtagatgagctgcgcgtgcggaacgaagaaagaatgcggcggttaaatgagtttcacaacaaacccataaacactgatgacgaaagttccctcgtcgatcctgacgatatcatgaaacacatcggcgatgacggaagcaactctgttgccaccgaaccctggttgaggcccggaacgtcagagacactcaaaagatttatggccgagcagctgaatcaggagcagcaacaaattcctggcaagcctgggacatttacatggcagggcctctcgaccgcgcacggttag

SEQ ID NO: 216867 - DNA, 3666 bp, Artificial Sequence
  derived and/or modified sequence
atgctttttccactgcaagttgccgctgtgaccagctcagttcgggacgaccccttagaacattgcgtgagccccaggactagagccaggtcccctgagatctgcaagatggccgacaatctggacgagtttatcgaggagcagaaggcccgactagcggaagataaggcagagctggaaagcgatccaccctacatggagatgaaaggcaagctgtctgctaagctcagtgaaaacagcaaaatcttaatatctatggctaaggagaatataccgccaaacagtcagcagactcggggaagtctagggattgactacggcttgagtctccctctgggagaagactatgagcgcaagaagcacaaactgaaagaggagctgcgccaggactacagacggtatttgacccaggagcggctgaaacttgagcggaacaaagagtacaatcaatttttgcgtgggaaagaagaaagcagtgaaaaattccgacaggttgaaaagtccacggagcccaagagccagcgtaacaagaagccaattggccaggtaaagcccgacctgacctcacaaatccagacctcatgcgaaaatagcgaggggccacgcaaagacgtactgaccccatcggaggcgtatgaagaactgcttaaccagcggaggctcgaggaagaccgttatcgccaactcgacgatgagatcgaattgcgcaataggcggattatcaagaaggctaacgaggaggtgggtatcagcaatttgaaacatcagcggttcgcgtctaaggccggtatccccgaccgaagatttcaccggtttaacgaggacagagtgttcgaccgcaggtatcaccggccagatcaggaccccgaggtgtcggaggaaatggatgagcgcttcaggtatgagtccgactttgataggagactctctagagtgtacactaacgatagaatgcataggaataagagggggaatatgccacctatggagcatgacggggatgttatcgaacagtctaacattcgcattagttccgccgagaataaatctgctcccgataatgagactagcaaaagtgccaatcaagatacttgttctccattcgctggcatgttgtttggtggggaggaccgcgaattaattcagcgtcggaaggagaagtataggctcgagctgctggagcagatggcagaacagcagagaaataagcggagagagaaggacctggaacttagagtggccgcttccggagctcaggacccagagaaaagcccagaccgtttgaaacaattcagcgtggcgcctcgacattttgaggaaatgataccccctgagcgcccacggattgctttccaaactcccctgccacccctctccgctccctccgtgcctccaattccctctgtccacccagtaccatcacagaacgaagaccttagaagtggtttaagcagcgctcttggcgagatggttagccctagaattgctcccctgccccctcctccattgcttcctccgctcgctaccaactatcgcactccttacgacgatgcttattacttctacgggtcacggaacacatttgacccgtccctggcgtactatggttctggtatgatgggggttcagcctgctgcttacgtgtctgctcctgttactcaccagttggcacaacccgtagtgaatactgttggtcagaatgagttaaaaattacatccgatcaggtaatcaactcggggcttatcttcgaagacaaacccaagccttcaaagcagtcactccagtcttatcaggaagcgctgcaacagcagattcgggagcgggaagaacgaaggaagaaggagcgagaggaaaaagaggaatatgaagcaaagcttgaggcagagatgcgcacctataacccttggggaaagggcggagggggagccccactgcgggatgctaaagggaacctcattacagatctcaaccgaatgcataggcagaatattgatgcctaccataatcctgacgccaggacttatgaggataaaagggctgttgttagtttggacccgaatctggccacttcgaatgccgaaaacctggaggacgctgctaacaagagctcagggcatatgcagacacaatcatcacctttcgcacggggtaacgtgttcggcgaaccccctacagagcttcagatcaagcaacaggagctgtataaaaatttcctgagattccagatcgaagagaaaaagcagcgggaagaggcagagcgggaacgacttagaatcgctgaagagaaggaagagcgcagactggcagagcagcgggctcgtattcagcaggaatatgaggaagaacaggaaaaaaaacgagagaaggaggaagagcaacgtttaaaaaacgaagaacatattagactagcagaagagcgtcaaaaggaggccgagcgcaagaagaaagaagaggaagagaagtacaacttacagttgcagcattattgcgagcgcgataacctcattggggaggaaacgaaacacatgagacagccatcccccattgttccggcattgcagaataaaattgcttcaaagcttcagaggccaccgtcagtggattctatcatcagatccttcatccacgagagcagtatgagtcgggcacagtctcccccagtaccggctagaaaaaatcagctgcgcgcagaagaggagaaaaaaaacgtcatcatggagctgtctgaaatgcgcaagcagctgaggtcggaggagagacggttgcaagaacgccttttgcatatggactccgatgacgaaatccccattaggaagaaagagcgcaatccgatggacatttttgatatggccaggcatcggcttcaggcaccagtccgcaggcagagtcccaaaggcctggacgctgctacgttccagaacgtgcacgatttcaatgaattgaaggatcgggactcagagacccgagtggatctgaaattcatgtatctcgatcccccaagagatcatcataccctggaaatccagcagcaggccctcctgcgagagcagcagaagcgcctgaaccgtattaagatgcaagagggcgcaaaggtggacttggacgccatcccaagcgccaaggtgagagaacagcgcatgccaagagacgacacctctgacttcctgaagaatagcctactggagtccgactccgctttcattggggcatacggcgagacttacccggctatagaagacgacgtgctcccaccgccttctcaactcccttcagccagagagaggcgtcgtaacaaatggaagggactagatatagatagctctcgtccaaacgtcgccccagatggattgtccctcaagagcatttccagcgtcaacgttgatgagctgcgcgtcaggaacgaggaacggatgagaaggcttaacgagtttcacaacaagccgattaataccgatgacgagagctccctcgtggatcccgacgatattatgaagcatatcggagatgatggcagcaactcggtggcaacagagccctggctaagacctggtacctccgaaactctcaagcgctttatggctgagcagttgaaccaagagcaacaacagattcccggtaagcctggcacctttacatggcagggcctcagtactgcccatggctag

SEQ ID NO: 216868 - DNA, 3666 bp, Artificial Sequence
  derived and/or modified sequence
atgctgttccccctgcaggtggccgccgtgaccagcagcgtgagagacgaccccctggagcactgcgtgagccccagaaccagagccagaagccccgagatctgcaagatggccgacaacctggacgagttcatcgaggagcagaaggccagactggccgaggacaaggccgagctggagagcgaccccccctacatggagatgaagggcaagctgagcgccaagctgagcgagaacagcaagatcctgatcagcatggccaaggagaacatcccccccaacagccagcagaccagaggcagcctgggcatcgactacggcctgagcctgcccctgggcgaggactacgagagaaagaagcacaagctgaaggaggagctgagacaggactacagaagatacctgacccaggagagactgaagctggagagaaacaaggagtacaaccagttcctgagaggcaaggaggagagcagcgagaagttcagacaggtggagaagagcaccgagcccaagagccagagaaacaagaagcccatcggccaggtgaagcccgacctgaccagccagatccagaccagctgcgagaacagcgagggccccagaaaggacgtgctgacccccagcgaggcctacgaggagctgctgaaccagagaagactggaggaggacagatacagacagctggacgacgagatcgagctgagaaacagaagaatcatcaagaaggccaacgaggaggtgggcatcagcaacctgaagcaccagagattcgccagcaaggccggcatccccgacagaagattccacagattcaacgaggacagagtgttcgacagaagataccacagacccgaccaggaccccgaggtgagcgaggagatggacgagagattcagatacgagagcgacttcgacagaagactgagcagagtgtacaccaacgacagaatgcacagaaacaagagaggcaacatgccccccatggagcacgacggcgacgtgatcgagcagagcaacatcagaatcagcagcgccgagaacaagagcgcccccgacaacgagaccagcaagagcgccaaccaggacacctgcagccccttcgccggcatgctgttcggcggcgaggacagagagctgatccagagaagaaaggagaagtacagactggagctgctggagcagatggccgagcagcagagaaacaagagaagagagaaggacctggagctgagagtggccgccagcggcgcccaggaccccgagaagagccccgacagactgaagcagttcagcgtggcccccagacacttcgaggagatgatcccccccgagagacccagaatcgccttccagacccccctgccccccctgagcgcccccagcgtgccccccatccccagcgtgcaccccgtgcccagccagaacgaggacctgagaagcggcctgagcagcgccctgggcgagatggtgagccccagaatcgcccccctgccccccccccccctgctgccccccctggccaccaactacagaaccccctacgacgacgcctactacttctacggcagcagaaacaccttcgaccccagcctggcctactacggcagcggcatgatgggcgtgcagcccgccgcctacgtgagcgcccccgtgacccaccagctggcccagcccgtggtgaacaccgtgggccagaacgagctgaagatcaccagcgaccaggtgatcaacagcggcctgatcttcgaggacaagcccaagcccagcaagcagagcctgcagagctaccaggaggccctgcagcagcagatcagagagagagaggagagaagaaagaaggagagagaggagaaggaggagtacgaggccaagctggaggccgagatgagaacctacaacccctggggcaagggcggcggcggcgcccccctgagagacgccaagggcaacctgatcaccgacctgaacagaatgcacagacagaacatcgacgcctaccacaaccccgacgccagaacctacgaggacaagagagccgtggtgagcctggaccccaacctggccaccagcaacgccgagaacctggaggacgccgccaacaagagcagcggccacatgcagacccagagcagccccttcgccagaggcaacgtgttcggcgagccccccaccgagctgcagatcaagcagcaggagctgtacaagaacttcctgagattccagatcgaggagaagaagcagagagaggaggccgagagagagagactgagaatcgccgaggagaaggaggagagaagactggccgagcagagagccagaatccagcaggagtacgaggaggagcaggagaagaagagagagaaggaggaggagcagagactgaagaacgaggagcacatcagactggccgaggagagacagaaggaggccgagagaaagaagaaggaggaggaggagaagtacaacctgcagctgcagcactactgcgagagagacaacctgatcggcgaggagaccaagcacatgagacagcccagccccatcgtgcccgccctgcagaacaagatcgccagcaagctgcagagaccccccagcgtggacagcatcatcagaagcttcatccacgagagcagcatgagcagagcccagagcccccccgtgcccgccagaaagaaccagctgagagccgaggaggagaagaagaacgtgatcatggagctgagcgagatgagaaagcagctgagaagcgaggagagaagactgcaggagagactgctgcacatggacagcgacgacgagatccccatcagaaagaaggagagaaaccccatggacatcttcgacatggccagacacagactgcaggcccccgtgagaagacagagccccaagggcctggacgccgccaccttccagaacgtgcacgacttcaacgagctgaaggacagagacagcgagaccagagtggacctgaagttcatgtacctggacccccccagagaccaccacaccctggagatccagcagcaggccctgctgagagagcagcagaagagactgaacagaatcaagatgcaggagggcgccaaggtggacctggacgccatccccagcgccaaggtgagagagcagagaatgcccagagacgacaccagcgacttcctgaagaacagcctgctggagagcgacagcgccttcatcggcgcctacggcgagacctaccccgccatcgaggacgacgtgctgcccccccccagccagctgcccagcgccagagagagaagaagaaacaagtggaagggcctggacatcgacagcagcagacccaacgtggcccccgacggcctgagcctgaagagcatcagcagcgtgaacgtggacgagctgagagtgagaaacgaggagagaatgagaagactgaacgagttccacaacaagcccatcaacaccgacgacgagagcagcctggtggaccccgacgacatcatgaagcacatcggcgacgacggcagcaacagcgtggccaccgagccctggctgagacccggcaccagcgagaccctgaagagattcatggccgagcagctgaaccaggagcagcagcagatccccggcaagcccggcaccttcacctggcagggcctgagcaccgcccacggctag

SEQ ID NO: 216869 - protein, 257 aa, Artificial Sequence
  derived and/or modified sequence
MLLTLAGGALFFPGLFALCTWALRRSQPGWSRTDCVMISTRLVSSVHAVLATGSGIVIIRSCDDVITGRHWLAREYVWFLIPYMIYDSYAMYLCEWCRTRDQNRAPSLTLRNFLSRNRLMITHHAVILFVLVPVAQRLRGDLGDFFVGCIFTAELSTPFVSLGRVLIQLKQQHTLLYKVNGILTLATFLSCRILLFPFMYWSYGRQQGLSLLQVPFSIPFYCNVANAFLVAPQIYWFCLLCRKAVRLFDTPQAKKDG

SEQ ID NO: 216870 - protein, 330 aa, Artificial Sequence
  derived and/or modified sequence
MISTRYRRRRDAPRGPGRCPPHPTRPRGPGRKRGAAGSPGAAPSASRRPEFPKPLRVLPWRERGRGGREWPMSLRSPLPTSACGWGESGRRPGRAPCGPRTGLSARAVLSARARLVSSVHAVLATGSGIVIIRSCDDVITGRHWLAREYVWFLIPYMIYDSYAMYLCEWCRTRDQNRAPSLTLRNFLSRNRLMITHHAVILFVLVPVAQRLRGDLGDFFVGCIFTAELSTPFVSLGRVLIQLKQQHTLLYKVNGILTLATFLSCRILLFPFMYWSYGRQQGLSLLQVPFSIPFYCNVANAFLVAPQIYWFCLLCRKAVRLFDTPQAKKDG

SEQ ID NO: 216871 - DNA, 2079 bp, Artificial Sequence
  derived and/or modified sequence
agccacgcggcgccagcgaggcggccggacccgcagccccgatgctgctgacgctggccgggggcgcgctcttcttcccggggctcttcgcgctctgcacctgggcgctgcgccgctcccagcccggatggagccgcaccgactgcgtgatgatcagcaccaggctggtttcctcggtgcacgccgtgctggccaccggctcggggatcgtcatcattcgctcctgcgacgacgtgatcaccggcaggcactggcttgcccgggaatatgtgtggtttctgattccatacatgatctatgactcgtacgccatgtacctctgtgaatggtgccgaaccagagaccagaaccgtgcgccctccctcactcttcgaaacttcctaagtcgaaaccgcctcatgatcacacatcatgcggtcattctctttgtccttgtgccagtcgcacagaggctccggggagaccttggggacttctttgtcggctgcatcttcacggcagaactgagcactccgtttgtgtcgctgggcagggttctgattcagctaaagcagcagcacacccttctgtacaaggtgaatggaatcctcacgctggccaccttcctttcctgccggatccttctcttccccttcatgtactggtcctatggccgccagcagggactaagcctgctccaagtacccttcagcatcccattctactgcaacgtggccaatgccttcctcgtagctcctcagatctactggttctgtctgctgtgcaggaaggcagtccggctctttgacactccccaagccaaaaaggatggctaaatgctcctgggagtcaggcgcagcctcacaccagctgcctcctccactcagcattccatggaccaaattgtgccctgggtagcctcagactttgggtattgataagccgatggatttgagtttttctaaagaatattcatattacctccttcttctaacttgccctatttgcaaaagcacttttgtagtaacaactattgggtcctgtcagacctccacggacagcaaagtggttttaatgcaagcccaaggatccttcttaaggtcttatctcaagagctctgggaggtggaagcatggggtgggatcggtggaccagggtggtaagtgtctgcacatctgcctgtccctgtatcagcggctacccaccttccaaaccactcaggacagtacccgtggcactgggcccgcagaagcaagggatgacttggttcttggaagtaatgtcgtcttgtgacattggcctgggacaatcattgtgggtaggtagttattgatcgtttactagataacccattggttctttgcctcatcctctcatccatgggtcagagttgaattcttatgtctatagacttccaatcagaagtctcactggtggggctgggggtgggggcaggcaggaggcatggatgggaacctgagtaggtagtgtggccaagagatcagcacaacctttgcaggctgacttgctaagtctgacagtgacaaacttgtgagcttactgcagtcagtcacagaggctgttctttttcacacaccccttcatgcccggctttccccatatccacatgcagagggcgagctcataaaactacagggaagcgtgaaatgatggctttggtagctgtttactgggtaaccccactgtgacactgtccttttcatgtgatgtggaaacctacttctgtcctccaaaccatgaaatgtgtcatctagactgcagagtacttgagtgctttgcctcccgatatgccagagcttgtggtccaaagcccattcctgtgtgtccgtcctgccatttagccacagaaggctgcggagtgaggcggcagctagcctggccagtggctgtcccgtggaccgacacctgcgcccccttctgcaagcaggattttctggtgccaacactcattcatcattcccgatcaactaggatgaatttaagactgtgctaccatgtgttctcaagtggtagtttaaaaagtggatttttaaagtgcctttcaattgtctgtgaacgtctaaaggactgatttgtctc

SEQ ID NO: 216872 - DNA, 2257 bp, Artificial Sequence
  derived and/or modified sequence
atgatcagcaccaggtaccggcgccgccgagacgccccccgaggcccggggcgctgcccaccgcaccccacccggccgcggggcccagggcggaaaaggggggcggcaggaagcccgggggctgctccctccgcgtcccggcggcccgagtttccgaagcccctccgcgtcctcccctggcgggagcggggccggggcgggcgggaatggccgatgagcctccggagcccgctccccacatctgcctgcggctggggagagtcaggccgaaggccgggccgggctccctgcggtcctcggaccggactgagcgcgcgcgctgttctctccgcccgcgctaggctggtttcctcggtgcacgccgtgctggccaccggctcggggatcgtcatcattcgctcctgcgacgacgtgatcaccggcaggcactggcttgcccgggaatatgtgtggtttctgattccatacatgatctatgactcgtacgccatgtacctctgtgaatggtgccgaaccagagaccagaaccgtgcgccctccctcactcttcgaaacttcctaagtcgaaaccgcctcatgatcacacatcatgcggtcattctctttgtccttgtgccagtcgcacagaggctccggggagaccttggggacttctttgtcggctgcatcttcacggcagaactgagcactccgtttgtgtcgctgggcagggttctgattcagctaaagcagcagcacacccttctgtacaaggtgaatggaatcctcacgctggccaccttcctttcctgccggatccttctcttccccttcatgtactggtcctatggccgccagcagggactaagcctgctccaagtacccttcagcatcccattctactgcaacgtggccaatgccttcctcgtagctcctcagatctactggttctgtctgctgtgcaggaaggcagtccggctctttgacactccccaagccaaaaaggatggctaaatgctcctgggagtcaggcgcagcctcacaccagctgcctcctccactcagcattccatggaccaaattgtgccctgggtagcctcagactttgggtattgataagccgatggatttgagtttttctaaagaatattcatattacctccttcttctaacttgccctatttgcaaaagcacttttgtagtaacaactattgggtcctgtcagacctccacggacagcaaagtggttttaatgcaagcccaaggatccttcttaaggtcttatctcaagagctctgggaggtggaagcatggggtgggatcggtggaccagggtggtaagtgtctgcacatctgcctgtccctgtatcagcggctacccaccttccaaaccactcaggacagtacccgtggcactgggcccgcagaagcaagggatgacttggttcttggaagtaatgtcgtcttgtgacattggcctgggacaatcattgtgggtaggtagttattgatcgtttactagataacccattggttctttgcctcatcctctcatccatgggtcagagttgaattcttatgtctatagacttccaatcagaagtctcactggtggggctgggggtgggggcaggcaggaggcatggatgggaacctgagtaggtagtgtggccaagagatcagcacaacctttgcaggctgacttgctaagtctgacagtgacaaacttgtgagcttactgcagtcagtcacagaggctgttctttttcacacaccccttcatgcccggctttccccatatccacatgcagagggcgagctcataaaactacagggaagcgtgaaatgatggctttggtagctgtttactgggtaaccccactgtgacactgtccttttcatgtgatgtggaaacctacttctgtcctccaaaccatgaaatgtgtcatctagactgcagagtacttgagtgctttgcctcccgatatgccagagcttgtggtccaaagcccattcctgtgtgtccgtcctgccatttagccacagaaggctgcggagtgaggcggcagctagcctggccagtggctgtcccgtggaccgacacctgcgcccccttctgcaagcaggattttctggtgccaacactcattcatcattcccgatcaactaggatgaatttaagactgtgctaccatgtgttctcaagtggtagtttaaaaagtggatttttaaagtgcctttcaattgtctgtgaacgtctaaaggactgatttgtctc

SEQ ID NO: 216873 - DNA, 774 bp, Artificial Sequence
  derived and/or modified sequence
atgctgctgactctcgcggggggcgcgctcttcttcccagggttattcgccttgtgcacctgggccctgcgccggagccagccggggtggagcaggactgactgcgtaatgatctccacccggctcgtgtcttctgtccatgctgtattggccacgggaagcgggatcgtgatcatccggagctgcgacgacgtgattaccgggcgtcattggctcgcccgggagtatgtgtggtttttaattccgtacatgatatacgattcgtatgccatgtacctatgcgaatggtgccggactcgcgaccagaatcgcgcaccaagcctcactttacgcaacttcctatctaggaaccgcctcatgattacacatcatgcagtgattttgttcgttttggtacccgtggcccaacgacttcggggcgacctgggagattttttcgtgggttgtatttttacggctgagttaagcactccctttgtgtctctgggacgggtgcttattcagctgaagcagcagcataccctgttgtacaaagtgaacggaatcctgaccctcgccacattccttagctgtcggatcctgttgttcccttttatgtactggtcctacgggagacagcaaggtctcagcctgcttcaggttcccttctcaattcccttttactgtaatgtcgccaacgcctttctcgtggccccccagatatattggttttgcctcctctgccggaaagctgttcgactgttcgatacaccccaggccaaaaaggatgggtag

SEQ ID NO: 216874 - DNA, 993 bp, Artificial Sequence
  derived and/or modified sequence
atgatcagcacacgctaccgccggagacgcgacgctcctagaggacccggcagatgcccccctcatccaactcggccccgaggcccagggcgcaagcggggggcggcaggctcccccggtgcagctccatccgcatcaagacgcccagaattccctaaaccactgagagtgttgccttggagagaacgcggtaggggcggtcgagaatggcctatgtccctgagaagcccgctgccaacaagcgcttgtggctggggtgaatccggtcgaagaccaggccgcgccccctgcggccctcggactgggcttagtgcgagggccgttctctctgcaagagcccgccttgtctcatccgtgcacgccgtcctggcaacaggcagtggcattgtgatcatccgttcttgtgatgacgtgatcaccggccggcactggctggcacgggaatacgtctggttccttatcccttacatgatctatgactcttatgccatgtatctatgtgagtggtgtcggaccagggatcagaatagagccccgagccttacattacgcaacttcttgtcaagaaaccgacttatgatcacccaccatgccgtgattcttttcgtcttagttcctgttgcgcagaggctacggggtgacctgggcgacttctttgttggctgtattttcacggctgagctgtccacaccatttgtatccctgggcagggtgctgattcagctgaaacagcagcataccttactatacaaagtgaacgggattttgacccttgctacttttctctcctgtaggatcttattgttccctttcatgtactggtcatatggacggcagcaggggcttagcctacttcaggttccttttagtattccattctattgtaatgtcgcgaacgcatttctcgtggctccacagatctactggttctgccttctgtgccggaaggcagtccggttatttgacacacctcaagccaagaaagatggttag

SEQ ID NO: 216875 - DNA, 774 bp, Artificial Sequence
  derived and/or modified sequence
atgctgctgaccctggccggcggggccctcttcttccctggcctgtttgccctgtgcacctgggccctgcggcgcagccagcccggctggagcaggacagactgtgtgatgatcagcacccggctggtgtcctctgtgcatgctgtgctggccaccggcagcggcatcgtcatcatccgcagctgtgatgatgtgatcaccggccgccactggctggcccgggagtatgtgtggttcctgatcccctacatgatctatgacagctatgccatgtacctgtgtgagtggtgcaggacccgggaccagaacagagcccccagcctgaccctgaggaacttcctgagcaggaaccggctgatgatcacccaccacgctgtgatcctgtttgtgctggtgcctgtggcccagaggctgcggggggacctgggggacttctttgtgggctgcatcttcaccgctgagctgagcaccccatttgtgtccctgggccgggtgctgatccagctgaagcagcagcacaccctgctgtacaaggtgaatggcatcctgaccctggccaccttcctgagctgccgcatcctgctcttccccttcatgtactggagctatggccggcagcagggcctgagcctgctgcaggtgcccttcagcatccccttctactgcaatgtggccaatgccttcctggtggccccccagatctactggttctgcctgctgtgcaggaaggctgtgcggctgtttgacaccccccaggccaagaaggatggatag

SEQ ID NO: 216876 - DNA, 993 bp, Artificial Sequence
  derived and/or modified sequence
atgatcagcacccgctacagaagaagaagagatgccccccggggccctggccgctgccccccccaccccacccggccccggggccctggcaggaagagaggagctgctggcagccctggagctgcccccagcgccagcagaagacctgagttccccaagcccctgcgggtgctgccctggagggagcggggccggggcggccgggagtggcccatgagcctgcggagccccctgcccaccagcgcctgtggctggggcgagagcggccggcggcccggccgggccccctgtggccccaggacaggcctgagcgcccgggctgtgctgagcgcccgggcccggctggtgtcctctgtgcatgctgtgctggccactggaagtggcatcgtcatcatccgcagctgtgatgatgtgatcaccggccgccactggctggcccgggagtatgtgtggttcctgatcccctacatgatctatgacagctatgccatgtacctgtgtgagtggtgcaggacccgggaccagaacagagcccccagcctgaccctgaggaacttcctgagcaggaaccggctgatgatcacccaccacgccgtcatcctgtttgtgctggtgcctgtggcccagaggctgcggggggacctgggggacttctttgtgggctgcatcttcaccgctgagctgagcaccccatttgtgtccctgggccgggtgctgatccagctgaagcagcagcacaccctgctgtacaaggtgaatggcatcctgaccctggccaccttcctgagctgccgcatcctgctcttccccttcatgtactggagctatggccggcagcagggcctgagcctgctgcaggtgcccttcagcatccccttctactgcaatgtggccaatgccttcctggtggccccccagatctactggttctgcctgctgtgcaggaaggctgtgcggctgtttgacaccccccaggccaagaaggatggatag

SEQ ID NO: 216877 - DNA, 774 bp, Artificial Sequence
  derived and/or modified sequence
atgctgctgaccctggccggcggcgccctgttcttccccggcctgttcgcgctatgtacctgggccctacgtaggtcgcaaccagggtggtcaaggacagactgcgtgatgatttctactagacttgtgtccagcgttcacgccgtgctggcaacggggtccgggatagtcattattagaagttgcgacgatgtgattactggaaggcattggctcgccagagagtatgtctggtttttgattccttacatgatctacgactcatacgctatgtacttatgtgagtggtgtagaacccgagaccaaaaccgggcaccgtccctgaccttaaggaatttcttatcacgtaatagattgatgatcacacatcacgccgttattttgttcgtcttggtgccagtcgctcagcgactgagaggcgacctcggagacttcttcgttgggtgcatcttcacagctgaacttagcacccctttcgtcagcctggggcgagtactcatccagctcaagcaacaacacacactcctgtataaggtaaacggcatcctcactttagcgaccttccttagctgccgcatcctgttgttccccttcatgtactggagctatggtaggcagcagggcctgtctctgctgcaggtgccatttagcattccattctattgtaatgttgccaatgccttcctcgtggccccacagatatattggttctgtctgttgtgtcgcaaggctgtcaggctattcgatacgccacaggccaaaaaagatggctag

SEQ ID NO: 216878 - DNA, 993 bp, Artificial Sequence
  derived and/or modified sequence
atgatcagcacccggtaccggcggcggcgggacgccccccggggccccggaaggtgccctccccatcctacacgcccccggggccctggacggaagcgcggagccgccggaagccccggagccgcgccttctgcctcccggcgcccagagttccccaagcccctacgcgttttgccttggcgagagcgggggcgtggcggtagggagtggccaatgagcctccggtctcccttgcccacatctgcctgtggttggggcgagtctggaaggcgccccgggagggcaccatgcggacccagaaccgggctgtctgctcgagcagtcctgtccgcaagggcccggctggtctcctctgtacacgccgtactggctaccggttctggcatcgtgattatccgatcttgcgatgatgtcattaccggacggcactggctggctagagaatacgtgtggtttctgattccctacatgatctacgactcttacgctatgtacctctgtgaatggtgtaggacccgggatcagaacagggccccttctttaaccctccgtaatttcctgtctcgtaaccgattaatgattacccaccatgctgtcattctctttgttctggtgccggtggcacagagattacggggggatctgggggattttttcgtgggttgcatctttacagctgagctgtccactccatttgtctcactgggacgagtcttgatccaattaaagcagcaacatacgctgctgtataaggtgaatggaatcctgaccctggccaccttcttgtcttgtcgaatactgttgttccccttcatgtactggtcctacggccggcagcaaggtctgtcactacttcaggtgcccttctctatcccattttactgtaacgtggctaatgcatttctggtggcaccacagatctactggttttgtcttttatgtagaaaagctgttagactgtttgataccccacaggccaaaaaagatggatag

SEQ ID NO: 216879 - DNA, 774 bp, Artificial Sequence
  derived and/or modified sequence
atgctgctcaccctggccggtggcgcactcttttttcccggattattcgccctgtgcacgtgggctctgcgaagaagccagcctggatggagccgaactgattgtgttatgatctctacacgcctggtcagttccgtacacgctgttttagccaccggctccggaattgtaattattcgctcatgcgatgacgttatcactggacgccactggttggctagagagtatgtgtggtttctgattccttacatgatctacgactcatacgcaatgtatctctgcgaatggtgcaggacacgagaccagaatagagctccgagcctcacacttaggaactttctgtctagaaataggctgatgataactcatcatgctgtgattctgtttgtgctcgtacccgttgcgcagaggctgaggggggacctgggggatttttttgtcgggtgcatttttacagcggagctgtcaacaccatttgtgagcctgggtagagtgctgatccaattgaaacagcaacatacgctgctgtacaaagtcaacggcatcctgacattagcaactttcctgagttgcaggatcttactgtttccatttatgtattggagttacggtcgtcagcagggccttagcttgctgcaggtacctttcagcatccccttctactgcaacgttgccaacgcctttctggtcgcaccccagatctactggttttgtctgctatgccggaaggcagtgaggttgtttgataccccccaggcaaaaaaagatggctag

SEQ ID NO: 216880 - DNA, 993 bp, Artificial Sequence
  derived and/or modified sequence
atgattagtacccgataccgccgtagacgagatgcaccgaggggcccaggcagatgcccaccacaccccacacgaccacgaggccctggacggaaaagaggagctgccggatctcccggtgctgcccctagcgcctcacgacgcccagaattcccaaagccgctgcgcgtgctaccgtggagggagaggggcagaggaggaagggagtggcccatgtcactgcgatctccactccccacatctgcctgcggttggggtgagtcaggtaggagacccggtcgcgctccctgcgggcctcggaccgggctgagcgctagagcagttctgtccgccagagccaggcttgtgagctctgttcatgccgtattagccacgggctccggaattgtgatcatccggtcttgcgacgatgtgattacgggcaggcattggcttgccagggagtacgtttggttcctgataccttacatgatttatgactcctatgccatgtacctgtgtgagtggtgccgcactcgggatcagaatagggccccatctctgacccttaggaatttcttgtcccgaaatcgcctgatgatcacgcaccacgctgtcatactgttcgtgctggtgccagtcgcacagagactccggggagatctcggagacttcttcgttggctgtatctttacagcagaactttccactcccttcgtctcgctggggagggtgctaatccagctaaaacagcagcacactctgttatacaaagtgaacggaatactaacactcgctacttttctatcatgccgaattctgcttttccctttcatgtactggtcatacggccgacagcaaggcttaagcctgcttcaggtgccgttctccatcccgttctactgcaacgtggcaaatgcatttcttgttgcccctcaaatctattggttttgtttactatgtcgcaaggccgtcaggcttttcgacacccctcaggctaaaaaggatggctag

SEQ ID NO: 216881 - DNA, 774 bp, Artificial Sequence
  derived and/or modified sequence
atgctgctgaccctggccggcggcgccctgttcttccccggcctgttcgccctgtgcacctgggccctgagaagaagccagcccggctggagcagaaccgactgcgtgatgatcagcaccagactggtgagcagcgtgcacgccgtgctggccaccggcagcggcatcgtgatcatcagaagctgcgacgacgtgatcaccggcagacactggctggccagagagtacgtgtggttcctgatcccctacatgatctacgacagctacgccatgtacctgtgcgagtggtgcagaaccagagaccagaacagagcccccagcctgaccctgagaaacttcctgagcagaaacagactgatgatcacccaccacgccgtgatcctgttcgtgctggtgcccgtggcccagagactgagaggcgacctgggcgacttcttcgtgggctgcatcttcaccgccgagctgagcacccccttcgtgagcctgggcagagtgctgatccagctgaagcagcagcacaccctgctgtacaaggtgaacggcatcctgaccctggccaccttcctgagctgcagaatcctgctgttccccttcatgtactggagctacggcagacagcagggcctgagcctgctgcaggtgcccttcagcatccccttctactgcaacgtggccaacgccttcctggtggccccccagatctactggttctgcctgctgtgcagaaaggccgtgagactgttcgacaccccccaggccaagaaggacggctag

SEQ ID NO: 216882 - DNA, 993 bp, Artificial Sequence
  derived and/or modified sequence
atgatcagcaccagatacagaagaagaagagacgcccccagaggccccggcagatgccccccccaccccaccagacccagaggccccggcagaaagagaggcgccgccggcagccccggcgccgcccccagcgccagcagaagacccgagttccccaagcccctgagagtgctgccctggagagagagaggcagaggcggcagagagtggcccatgagcctgagaagccccctgcccaccagcgcctgcggctggggcgagagcggcagaagacccggcagagccccctgcggccccagaaccggcctgagcgccagagccgtgctgagcgccagagccagactggtgagcagcgtgcacgccgtgctggccaccggcagcggcatcgtgatcatcagaagctgcgacgacgtgatcaccggcagacactggctggccagagagtacgtgtggttcctgatcccctacatgatctacgacagctacgccatgtacctgtgcgagtggtgcagaaccagagaccagaacagagcccccagcctgaccctgagaaacttcctgagcagaaacagactgatgatcacccaccacgccgtgatcctgttcgtgctggtgcccgtggcccagagactgagaggcgacctgggcgacttcttcgtgggctgcatcttcaccgccgagctgagcacccccttcgtgagcctgggcagagtgctgatccagctgaagcagcagcacaccctgctgtacaaggtgaacggcatcctgaccctggccaccttcctgagctgcagaatcctgctgttccccttcatgtactggagctacggcagacagcagggcctgagcctgctgcaggtgcccttcagcatccccttctactgcaacgtggccaacgccttcctggtggccccccagatctactggttctgcctgctgtgcagaaaggccgtgagactgttcgacaccccccaggccaagaaggacggctag

SEQ ID NO: 216883 - DNA, 744 bp, Artificial Sequence
  derived and/or modified sequence
atgcgcacggaagcaatcgcaagaccactggaaatcaatgagactgaaaaagtcatgcggattgccattaaagagatcctcacacaggttcagaaaactaaggaccttttgaacaatgtggcgagcgatgaggcaaatctcgaagctaaaatcgagaaaagaaaactggagctggagagaaaccgtaaaaggttagaaaccttgcagtccgttcgaccctgcttcatggacgaatacgaaaagacagaagaagaactccagaaacagtacgatacgtatctggagaaatttcaaaacctgacctatctggagcaacagctcgaagaccaccacaggatggaacaggaacgctttgaggaagctaaaaacacactttgtttgattcaaaacaagctgaaggaggaggagaagcgtctgctaaaaagtggttcaaatgatgattctgatatcgacatccaggaggacgacgaatcagactctgaactagaggagcgacgcctgcccaagccccaaactgctatggaaatgctcatgcaaggacggcccggaaagcggatcgtcggaacaatgcagggcggtgactcagacgataacgaggacagtgaagagagtgagatcgacatggaggatgacgacgacgaagacgacgaccttgaagacgagtcaattagtctgtcgcccaccaagccaaatcggagagttagaaaatctgagcccctcgacgagtcagataacgacttctag

SEQ ID NO: 216884 - DNA, 576 bp, Artificial Sequence
  derived and/or modified sequence
atggatgaatatgagaagactgaggaggagttgcagaagcagtacgatacatatttggaaaagttccaaaacctgacatacttggagcaacagctggaagatcatcatcgcatggaacaagagcggtttgaagaggccaaaaacactctgtgtttgattcaaaataaacttaaagaagaggaaaaaaggctgcttaaatccggttctaacgatgactctgatatcgacattcaggaggatgacgagtcagactccgaactggaagagcggcggttgcccaaaccacagaccgcaatggagatgctcatgcagggaagaccaggcaagaggatcgtgggcaccatgcagggaggagattctgatgacaacatggaagccgcgcccgccctgcttggtaagtgcaaaacatctagttctaagaaacaggaggattccgaagagagtgaaatagatatggaggacgatgatgacgaggacgatgatctcgaggacgagtcaatttctctgtccccaacaaagcccaaccgaagagtacgcaagtcagaaccgctggacgaatctgataacgacttttag

SEQ ID NO: 216885 - DNA, 744 bp, Artificial Sequence
  derived and/or modified sequence
atgaggacagaggccatcgcccggcccctggagatcaatgaaacagagaaggtgatgagaattgccatcaaggagatcctgacccaggtgcagaagaccaaggacctgctgaacaacgtggccagtgatgaggccaacctggaggccaagattgagaagaggaagctggagctggagaggaacaggaagaggctggagaccctgcagagcgtgcggccctgcttcatggatgaatatgagaagacagaggaggagctgcagaagcagtatgacacctacctggagaagttccagaacctgacctacctggagcagcagctggaggaccaccacaggatggagcaggagagatttgaggaggccaagaacaccctgtgcctgatccagaacaagctgaaggaggaggagaagaggctgctgaagagcggcagcaatgatgacagcgacatcgacatccaggaggatgatgaaagtgacagcgagctggaggagcggcggctgcccaagccccagacagccatggagatgctgatgcagggccggcctgggaagagaattgtgggcaccatgcagggcggggacagtgatgacaatgaagattctgaggagagcgagattgacatggaggatgatgatgatgaagatgatgacctggaggatgagagcatcagcctgagccccaccaagcccaacagaagagtgaggaagtctgagcccctggatgaaagtgacaatgacttctag

SEQ ID NO: 216886 - DNA, 576 bp, Artificial Sequence
  derived and/or modified sequence
atggatgaatatgagaagacagaggaggagctgcagaagcagtatgacacctacctggagaagttccagaacctgacctacctggagcagcagctggaggaccaccacaggatggagcaggagagatttgaggaggccaagaacaccctgtgcctgatccagaacaagctgaaggaggaggagaagaggctgctgaagagcggcagcaatgatgacagcgacatcgacatccaggaggatgatgaaagtgacagcgagctggaggagcggcggctgcccaagccccagacagccatggagatgctgatgcagggccggcctgggaagagaattgtgggcaccatgcagggcggggacagtgatgacaacatggaggccgccccagccctgctgggcaagtgcaagaccagcagcagcaagaagcaggaggacagcgaggagagcgagattgacatggaggatgatgatgatgaagatgatgacctggaggatgagagcatcagcctgagccccaccaagcccaacagaagagtgaggaagtctgagcccctggatgaaagtgacaatgacttctag

SEQ ID NO: 216887 - DNA, 744 bp, Artificial Sequence
  derived and/or modified sequence
atgcggaccgaggccatcgcccggcccctggagatcaacgagaccgagaaggtcatgcgaattgcgatcaaagagatccttacacaggtgcagaaaactaaagatcttctaaataatgtggcatctgatgaagccaacctggaggccaaaatcgagaagcgcaagcttgagctcgagagaaaccggaagcggcttgagaccctccagtctgtgcgcccctgctttatggacgaatacgagaagactgaggaagagctgcagaagcagtatgatacctatcttgagaaatttcagaatctgacatacttggaacagcagctggaggatcatcatcgtatggagcaggaaagatttgaagaagcgaagaacacactatgtctgattcagaataaattgaaagaggaggagaaacggctactcaagtcagggagcaacgacgactcagacatcgatattcaagaggatgatgagtccgactcagagctggaggagcggagactcccgaaaccccagaccgctatggagatgctgatgcagggacggcccggaaaaaggatagtggggactatgcagggcggcgattcagacgacaacgaagacagcgaagaatctgaaatagatatggaagacgatgacgatgaggatgacgatctcgaggacgagtctatctccctctcccctacaaaaccgaaccgcagagtccgcaagagtgaacccctagatgagtccgataacgatttctag

SEQ ID NO: 216888 - DNA, 576 bp, Artificial Sequence
  derived and/or modified sequence
atggacgagtacgagaagaccgaggaggagctgcagaagcagtacgacacttatctagagaagtttcagaacctgacgtatctggagcaacagctggaggatcatcataggatggagcaggagaggtttgaagaggctaagaacacattatgcctcattcagaataaacttaaagaggaggagaagcgtctgctgaaaagcgggtcgaacgacgattctgacattgatattcaggaagacgatgagtcagactcagagctcgaagagcggaggttacctaagccgcagacagccatggagatgttaatgcagggcaggcctggcaagcgcatcgtgggtacgatgcaaggtggtgatagcgacgataatatggaggctgctcccgcgctcctggggaagtgcaaaacgtctagctccaagaaacaggaagattctgaagaaagtgagattgacatggaagacgatgacgatgaggacgacgatctggaagatgaatctatcagtttgtctcccaccaaaccaaatagaagagtccggaagagtgagcccctcgacgaatcagataatgatttctag

SEQ ID NO: 216889 - DNA, 744 bp, Artificial Sequence
  derived and/or modified sequence
atgcgtacagaggccattgctagacctctcgagattaacgaaaccgagaaagtgatgagaatagctatcaaagaaattttaacccaggtgcaaaaaaccaaggacttacttaacaatgtggcgtcggacgaggcaaatctggaggctaaaatagagaagaggaagctcgaactggagcgcaacaggaagcgtttggagactctgcaatcagtgcggccttgcttcatggacgagtacgaaaagaccgaggaagagttgcagaaacaatacgatacctatctggagaagttccaaaatctgacttatctagagcagcaactggaagaccaccacaggatggagcaagagaggtttgaagaagctaagaatactctgtgtctgattcagaacaagctgaaagaagaggagaagaggctgctgaaaagcggatctaatgatgactcagacatcgatatccaagaggatgacgaaagtgacagcgaattggaggagcgccgtttaccaaaaccacagaccgcgatggaaatgctgatgcaggggaggccaggcaaaagaattgttggcacaatgcagggcggtgatagcgacgacaatgaggacagcgaggagagcgaaattgatatggaggatgacgatgatgaagacgacgatctcgaggacgaatcgattagtctgagccccaccaaaccgaacagaagggtgcgtaaaagcgagccactcgacgagagcgataacgacttctag

SEQ ID NO: 216890 - DNA, 576 bp, Artificial Sequence
  derived and/or modified sequence
atggacgagtacgagaaaactgaagaagagctgcagaaacagtatgatacatatctggagaaatttcagaatcttacctatttagaacagcagctcgaagaccatcatcgtatggaacaggagagattcgaagaggccaagaatacactgtgtttaatccagaacaagctgaaggaagaagagaaacggctactgaagtccggctccaacgatgatagcgacattgacatacaggaggatgatgaaagcgatagtgaactagaggagcgcaggctccccaagccgcaaacagctatggaaatgctgatgcagggaaggcctggtaagcggattgtgggcacaatgcagggtggggatagcgatgataacatggaagccgcaccagcgctgctgggaaaatgtaaaactagcagcagtaagaagcaggaggactctgaggagtccgaaattgatatggaggatgatgacgacgaggacgatgatctcgaagacgagtctatttcgctctctcctaccaagcctaatcggcgagtccgcaagagcgaacccttagatgagtcagacaacgatttctag

SEQ ID NO: 216891 - DNA, 924 bp, Artificial Sequence
  derived and/or modified sequence
gctcaataatgtggcctctgatgaagctaatttagaagccaaaatcgaaaagagaaaattagaactggaaagaaatcggaagcgactagagactctgcagagtgtcaggccatgttttatggatgagtatgagaagactgaggaagaattacaaaagcagtatgacacttatctggagaaatttcaaaatctgacttatctggaacaacagcttgaagaccatcataggatggagcaagaaaggtttgaggaagctaaaaacactctctgcctgatacagaacaagctcaaggaggaagagaagcgcctgctcaagagtggaagtaacgatgactcggacatagacatccaggaggacgatgaatccgacagtgagttggaagaaaggcggctgcccaagccacagacagccatggagatgctcatgcaaggaagacctggcaaacgcattgtgggcacgatgcaaggtggagactccgatgacaatatggaagcagcaccagctctcttaggtaaatgcaagacttccagctccaagaagcaggaggactcggaggagagtgaaattgacatggaagatgatgatgacgaggatgacgatttggaagacgagagcatttctctctcaccaaccaagcccaatcgaagggtccggaaatctgaacccctggatgagagtgacaatgacttctgacccttttgccaagggaccctggcagattaaaaccctcagacttgtaggtaaatgggaacttagaaggttaggaaggtaacccctgttttgtttactaagctggctggactcatgatcactgaagcaatacttatttctgctttagcctcctatgtttgcattccatgaagcttaaataagaattgaagcaaatccctaagatttatttttttccaccttatttatcttct

SEQ ID NO: 216892 - DNA, 744 bp, Artificial Sequence
  derived and/or modified sequence
atgagaaccgaggccatcgccagacccctggagatcaacgagaccgagaaggtgatgagaatcgccatcaaggagatcctgacccaggtgcagaagaccaaggacctgctgaacaacgtggccagcgacgaggccaacctggaggccaagatcgagaagagaaagctggagctggagagaaacagaaagagactggagaccctgcagagcgtgagaccctgcttcatggacgagtacgagaagaccgaggaggagctgcagaagcagtacgacacctacctggagaagttccagaacctgacctacctggagcagcagctggaggaccaccacagaatggagcaggagagattcgaggaggccaagaacaccctgtgcctgatccagaacaagctgaaggaggaggagaagagactgctgaagagcggcagcaacgacgacagcgacatcgacatccaggaggacgacgagagcgacagcgagctggaggagagaagactgcccaagccccagaccgccatggagatgctgatgcagggcagacccggcaagagaatcgtgggcaccatgcagggcggcgacagcgacgacaacgaggacagcgaggagagcgagatcgacatggaggacgacgacgacgaggacgacgacctggaggacgagagcatcagcctgagccccaccaagcccaacagaagagtgagaaagagcgagcccctggacgagagcgacaacgacttctag

SEQ ID NO: 216893 - DNA, 576 bp, Artificial Sequence
  derived and/or modified sequence
atggacgagtacgagaagaccgaggaggagctgcagaagcagtacgacacctacctggagaagttccagaacctgacctacctggagcagcagctggaggaccaccacagaatggagcaggagagattcgaggaggccaagaacaccctgtgcctgatccagaacaagctgaaggaggaggagaagagactgctgaagagcggcagcaacgacgacagcgacatcgacatccaggaggacgacgagagcgacagcgagctggaggagagaagactgcccaagccccagaccgccatggagatgctgatgcagggcagacccggcaagagaatcgtgggcaccatgcagggcggcgacagcgacgacaacatggaggccgcccccgccctgctgggcaagtgcaagaccagcagcagcaagaagcaggaggacagcgaggagagcgagatcgacatggaggacgacgacgacgaggacgacgacctggaggacgagagcatcagcctgagccccaccaagcccaacagaagagtgagaaagagcgagcccctggacgagagcgacaacgacttctag

SEQ ID NO: 216894 - protein, 229 aa, Artificial Sequence
  derived and/or modified sequence
MTCCEGWTSCNGFSLLVLLLLGVVLNAIPLIVSLVEEDQFSQNPISCFEWWFPGIIGAGLMAIPATTMSLTARKRACCNNRTGMFLSSLFSVITVIGALYCMLISIQALLKGPLMCNSPSNSNANCEFSLKNISDIHPESFNLQWFFNDSCAPPTGFNKPTSNDTMASGWRASSFHFDSEENKHRLIHFSVFLGLLLVGILEVLFGLSQIVIGFLGCLCGVSKRRSQIV

SEQ ID NO: 216895 - protein, 14 aa, Artificial Sequence
  derived and/or modified sequence
MTCCEGWTSCNGFS

SEQ ID NO: 216896 - DNA, 690 bp, Artificial Sequence
  derived and/or modified sequence
atgacctgctgcgagggctggaccagctgcaacggcttcagcctgctggtgctgctgctgctgggcgtggtgctgaacgccatccccctgatcgtgagcctggtggaggaggaccagttcagccagaaccccatcagctgcttcgagtggtggttccccggcatcatcggcgccggcctgatggccatccccgccaccaccatgagcctgaccgccagaaagagagcctgctgcaacaacagaaccggcatgttcctgagcagcctgttcagcgtgatcaccgtgatcggcgccctgtactgcatgctgatcagcatccaggccctgctgaagggccccctgatgtgcaacagccccagcaacagcaacgccaactgcgagttcagcctgaagaacatcagcgacatccaccccgagagcttcaacctgcagtggttcttcaacgacagctgcgccccccccaccggcttcaacaagcccaccagcaacgacaccatggccagcggctggagagccagcagcttccacttcgacagcgaggagaacaagcacagactgatccacttcagcgtgttcctgggcctgctgctggtgggcatcctggaggtgctgttcggcctgagccagatcgtgatcggcttcctgggctgcctgtgcggcgtgagcaagagaagaagccagatcgtgtag

SEQ ID NO: 216897 - DNA, 45 bp, Artificial Sequence
  derived and/or modified sequence
atgacctgctgcgagggctggaccagctgcaacggcttcagctag

SEQ ID NO: 216898 - DNA, 690 bp, Artificial Sequence
  derived and/or modified sequence
atgacatgctgcgaaggctggacatcctgtaacgggttttcgctattggttctactgctactaggcgtggtcttgaatgcgattccactgattgtgtctcttgtggaggaagaccagttttcccagaatccaatcagctgcttcgagtggtggttcccaggaataattggcgccggtcttatggcaattcctgccaccaccatgagcctaacggcaagaaaacgcgcatgctgtaataaccgcaccggaatgttcttgagttctcttttctcagtgataacagtaatcggggctttgtattgtatgcttatcagcatccaggcgctcctgaaaggacctctgatgtgcaattccccaagcaacagtaatgcaaattgtgaattttcccttaaaaatatctctgacattcatcccgagtcctttaatctccagtggtttttcaacgactcgtgcgcacctccaacagggtttaacaaacccacctccaacgacaccatggcgtcaggatggagagcatcttcgttccactttgacagcgaggagaataagcacagactgatccacttctctgtgttcctcggcctgttgttggtgggaatcctcgaagtcctcttcggcctgagccagatcgtcatcgggttcctaggctgcttgtgcggagtatccaaacgacgcagccaaatcgtgtag

SEQ ID NO: 216899 - DNA, 45 bp, Artificial Sequence
  derived and/or modified sequence
atgacctgctgtgagggctggacgagttgcaacgggttcagttag

SEQ ID NO: 216900 - DNA, 690 bp, Artificial Sequence
  derived and/or modified sequence
atgacctgctgtgagggctggaccagctgcaatggcttcagcctgctggtgctgctgctgctgggcgtggtgctgaatgccatccccctgattgtgtccctggtggaggaggaccagttcagccagaaccccatcagctgctttgagtggtggttccctggcatcatcggggccggcctgatggccatcccagccaccaccatgagcctgacagccaggaagagggcctgctgcaacaacagaacaggcatgttcctgagcagcctcttcagcgtcatcaccgtcatcggggccctgtactgcatgctgatcagcatccaggccctgctgaagggccccctgatgtgcaacagccccagcaacagcaatgccaactgtgagttcagcctgaagaacatcagtgacatccaccctgagagcttcaacctgcagtggttcttcaatgacagctgtgcccccccaacaggcttcaacaagcccaccagcaatgacaccatggccagcggctggagggccagcagcttccactttgattctgaggagaacaagcacaggctcatccacttcagcgtcttcctgggcctgctgctggtgggcatcctggaggtgctgtttggcctgagccagatcgtcatcggcttcctgggctgcctgtgtggggtgtccaagaggaggagccagatcgtgtag

SEQ ID NO: 216901 - DNA, 45 bp, Artificial Sequence
  derived and/or modified sequence
atgacctgctgtgagggctggaccagctgcaatggcttctcctag

SEQ ID NO: 216902 - DNA, 690 bp, Artificial Sequence
  derived and/or modified sequence
atgacctgctgcgagggctggaccagctgcaacggcttcagcctgttagttctgctcctacttggcgtggtcctgaacgctatcccccttatcgtgtcactcgtggaggaggatcagttcagccaaaatccaatttcttgtttcgaatggtggtttcccggaattatcggcgctggcctgatggcaatcccagcaacgaccatgtctctaactgctcgcaagcgcgcctgttgcaataacagaacagggatgttcctctcaagcctcttttctgttattaccgtgataggggccctgtactgtatgctgattagtatccaagcactattgaagggacccctgatgtgcaactcccccagcaattcaaacgcgaattgcgagtttagcttgaaaaatatctcagatatccatcctgaatcttttaacctacagtggttcttcaacgacagttgcgctccaccaacgggttttaacaaaccgacaagtaatgacactatggcttccggctggcgggccagctctttccactttgactccgaagagaacaagcaccggctgatccacttcagtgtgtttctaggccttttgctggtcggcatccttgaggtgctttttggactcagtcaaatcgtgatcgggttcctaggctgcctctgcggcgtcagcaaacgacggtctcagattgtttag

SEQ ID NO: 216903 - DNA, 690 bp, Artificial Sequence
  derived and/or modified sequence
atgacatgctgcgaggggtggactagctgcaatggcttctccctcctggtgctgctcctgttaggcgttgtacttaatgctatccccttaattgtatctttggttgaggaggaccaattcagtcagaatcccatttcttgctttgaatggtggttcccgggaatcattggcgcaggcctgatggctatccctgccaccacgatgtctctaactgccaggaagcgggcatgctgtaataacaggaccgggatgttcttgagtagcctgttctcagtgatcacagtgatcggagcgctctattgcatgctcatctcaatccaggccctcctgaaaggtccgctgatgtgcaattctccatctaactcaaacgcaaactgtgagttttctctgaaaaacatatctgacatccacccagagtctttcaacttacagtggttcttcaacgattcatgcgcccctcccaccggattcaacaaaccaacctctaacgacaccatggcatcaggctggagagcaagttccttccatttcgactcggaagagaacaagcacaggctgatccacttctcagtctttctagggcttttactggtggggatcttagaggttttattcggactttctcagatcgtgattggctttcttgggtgcctctgtggtgtcagtaagcgtcgcagtcaaattgtgtag

SEQ ID NO: 216904 - DNA, 45 bp, Artificial Sequence
  derived and/or modified sequence
atgacctgctgcgagggctggacaagttgcaacgggtttagttag

SEQ ID NO: 216905 - DNA, 2296 bp, Artificial Sequence
  derived and/or modified sequence
atagccactttgacaacgtttctgagccaggggtgaccatgacctgctgcgaaggatggacatcctgcaatggattcagcctgctggttctactgctgttaggagtagttctcaatgcgatacctctaattgtcagcttagttgaggaagaccaattttctcaaaaccccatctcttgctttgagtggtggttcccaggaattataggagcaggtctgatggccattccagcaacaacaatgtccttgacagcaagaaaaagagcgtgctgcaacaacagaactggaatgtttctttcatcacttttcagtgtgatcacagtcattggtgctctgtattgcatgctgatatccatccaggctctcttaaaaggtcctctcatgtgtaattctccaagcaacagtaatgccaattgtgaattttcattgaaaaacatcagtgacattcatccagaatccttcaacttgcagtggtttttcaatgactcttgtgcacctcctactggtttcaataaacccaccagtaacgacaccatggcgagtggctggagagcatctagtttccacttcgattctgaagaaaacaaacataggcttatccacttctcagtatttttaggtctattgcttgttggaattctggaggtcctgtttgggctcagtcagatagtcatcggtttccttggctgtctgtgtggagtctctaagcgaagaagtcaaattgtgtagtttaatgggaataaaatgtaagtatcagtagtttgaattaatttgagaagtacacttgttttcaaagtcatctttgagatgatttaaaaaatcaacccttcacgtagaaagcacgttgtaaatgcataacactctcatatcagtggttgatttgggaaaggtggagagaattttcaattagttttgtgttgtactattcaaattttttacctcttcactgtgtgtagagaaaggagaagggaaggaggatgagaaggaacggaagtcatcctgaaaataaaagtacaggactttttttttttttttttgagacagggtctcaaaaaaggctggagtacagtagtacagtggtgctatctcagcttactgcagcctcaacctcctgggctcaggtgattctcccatctcagcctccctagtagctgggactacaggtgcgtgccactatgccaagctaatttttgtatttttagtagagatgggggttttccatattgcccaggctggtcccgaactcatggactcaagtgatctgcctgcctcagcctcctaaagtgctgcgattacaggcatgagccatcgcgcctaaaggacaggacctttttattgtatttctttaaagaataaatacataacctgaatgcaatcaagtctttagatctaattctcagcttgcagggaacactaggacaaatccaaaaagtgggtcagcgggcacagaatggcccaattttcaacaggaaaatgttataaaagaaaaatatttttgagggaactgttatagattaagagaatagaggcatgtttcagctaaacacatgtaaactttgtcagagataattgggaggagtatgtagaagaatcggattattgttaattttggtaggtctgataatggttttatagtataaaggctgagtaccccttatccaaaatgattaagatcagaagtgttttggctttcacatttttttggattttggaattttgcctataataatgagacatcttggggatgggatgcaagtctaaccacaaaattcatttatgtctcatacacactttgaacacctggcctgaaggtaatttcacacaatattttaaataactttgtgcatgaaacacaattttgactgcattttgactgcaactcatcacatgaggtcaggtatggaattttccacttgtggtgttacgttactggctcaaaaagttttggatctcggagcattctggattttgaatttttggattagtgatgctcaacctgtatacagaaatgtcctcatttttaaaaaaagaaatgcatatttatatgttttaaaattacttcaaccaaaagcaacggggagatgtttactgttatatttaggtgacaggtacatggcaattcattataccctcctattttcctatgtttacattattcattaattaaaaaacaatacctagaaaaacccaagactttcaaaagctattttctatatgtgccaatctttaaaaaacaggataacaagggtatttatcacattaaaatgttgtaaaacagcaaagctaaaaatctaaaa

SEQ ID NO: 216906 - DNA, 542 bp, Artificial Sequence
  derived and/or modified sequence
aaacaggcacgtgtgttgggcagatactaaaaagtggtcatcattctcctcttcagttataagctaattctcttttcagctttatactgaaatatcttccccttcatcacatacagattaaatttctacatttttacagaattcttcagatacttccttttagccacaaatgtaaggagtactaaacccgagtggaactatgttatgcccactagcaaaagcatgcagcttactcagttttggtcaaatggcaaagactctggaaatcagacacttgattctcacagtcaggtggagtccaaccgatccagttccctacatataaaatgattccctaaacagttcttcaattcaacatcttatgaagacagcaaaaagatttgaaatggcacaacccacattctaagcgttaaattttaaccagaagattgggataaaaggcaacatagtaccatgcaagcatagccactttgacaacgtttctgagccaggggtgaccatgacctgctgcgaaggatggacatcctgcaatggattcagcc

SEQ ID NO: 216907 - protein, 645 aa, Artificial Sequence
  derived and/or modified sequence
MLKFQEAAKCVSGSTAISTYPKTLIARRYVLQQKLGSGSFGTVYLVSDKKAKRGEELKVLKEISVGELNPNETVQANLEAQLLSKLDHPAIVKFHASFVEQDNFCIITEYCEGRDLDDKIQEYKQAGKIFPENQIIEWFIQLLLGVDYMHERRILHRDLKSKNVFLKNNLLKIGDFGVSRLLMGSCDLATTLTGTPHYMSPEALKHQGYDTKSDIWSLACILYEMCCMNHAFAGSNFLSIVLKIVEGDTPSLPERYPKELNAIMESMLNKNPSLRPSAIEILKIPYLDEQLQNLMCRYSEMTLEDKNLDCQKEAAHIINAMQKRIHLQTLRALSEVQKMTPRERMRLRKLQAADEKARKLKKIVEEKYEENSKRMQELRSRNFQQLSVDVLHEKTHLKGMEEKEEQPEGRLSCSPQDEDEERWQGREEESDEPTLENLPESQPIPSMDLHELESIVEDATSDLGYHEIPEDPLVAEEYYADAFDSYCEESDEEEEEIALERPEKEIRNEGSQPAYRTNQQDSDIEALARCLENVLGCTSLDTKTITTMAEDMSPGPPIFNSVMARTKMKRMRESAMQKLGTEVFEEVYNYLKRARHQNASEAEIRECLEKVVPQASDCFEVDQLLYFEEQLLITMGKEPTLQNHL

SEQ ID NO: 216908 - DNA, 1938 bp, Artificial Sequence
  derived and/or modified sequence
atgctcaaatttcaggaggccgcaaagtgcgttagcgggagcaccgccattagtacctaccccaagaccctgattgccagacgatatgtgttgcagcagaagctggggagcgggagttttgggaccgtatacctggtctctgacaaaaaagcaaaaaggggggaggaactgaaggttctgaaagagatcagcgtcggcgagctcaaccccaatgagacagttcaggccaatctggaggctcagctgctgtcaaagctcgaccaccctgctattgtaaagttccacgcctcgttcgtggaacaagacaacttctgcatcattacagagtattgcgagggtcgcgatctggatgacaagatacaggaatataaacaggccggaaaaattttcccggaaaatcagatcatcgagtggtttatacagctgctgctgggggtggattacatgcatgagagacggatcctgcatcgggacctcaagtcgaaaaacgtgttcttgaagaataacctgctcaagattggcgactttggcgtcagtagattgctcatgggctcgtgcgacctggctacaactctcaccgggaccccacattacatgagcccagaagccctaaaacaccaaggctatgatacaaaaagtgatatatggagcttggcatgtatcttgtatgagatgtgctgcatgaatcacgctttcgccggctctaactttctaagtatcgtcctcaagatagtggagggggacaccccatctctgcccgaacgctatccaaaggagttgaacgccattatggagagtatgttgaacaaaaacccctcactgcgtcctagtgccattgagatactgaagattccatatcttgacgagcaactccagaacctgatgtgccggtattcagagatgaccctggaggataagaacctggactgccaaaaggaagcagcccatattataaatgcaatgcaaaagaggatccacctgcagacgcttagagccctgagcgaggtgcagaagatgactccccgggagcgcatgcgtctccggaaactgcaggccgcggacgagaaggcccggaagctgaagaagatagtggaagagaagtatgaagagaactctaaacgaatgcaggagctgaggagtcgaaactttcagcaactaagcgtggacgtcttgcatgagaagactcacctgaaaggcatggaggagaaagaggaacagcctgagggccgcctctcctgcagcccccaggatgaagacgaagagaggtggcaggggcgggaagaggaatccgacgaacctacactggaaaacttgcccgagtcccagcctatcccttctatggacttacacgagttggaaagcattgttgaagatgccactagcgacctcgggtatcacgagatccctgaggatccactggtcgcagaagagtattacgccgacgcctttgactcctactgcgaggagtctgacgaagaggaggaagagattgccctcgagaggccggaaaaagagatccggaacgaaggctctcagccagcctacaggactaatcagcaggacagcgacattgaggccctggcccggtgtctcgaaaacgtactaggctgcacatccctagacaccaaaactataacgacaatggcagaagatatgtctcccgggcccccgatctttaactcagtgatggcccggactaaaatgaagcgcatgcgcgaaagtgccatgcagaagctcggaaccgaagtttttgaggaggtgtacaattacctgaaacgggcacgtcatcagaacgccagcgaggccgaaatccgggaatgtctggaaaaggtcgtacctcaagctagtgattgctttgaggttgaccaattattgtactttgaggagcaattattgatcacaatgggaaaagagccaactctccagaatcacctttag

SEQ ID NO: 216909 - DNA, 1938 bp, Artificial Sequence
  derived and/or modified sequence
atgctcaagttccaggaagctgccaaatgtgtgtcagggtcaacagctatcagcacctacccaaaaaccttaattgctcgccgttacgtgctccagcagaagctgggatccggctcatttggcacagtgtatcttgtgtcggacaagaaggcaaaaaggggagaagaactgaaagtgctgaaagagatcagcgtgggagaattgaatcctaatgaaacggtccaggccaacctcgaggctcagctcctgtctaaacttgatcaccctgctatagtaaaattccacgcctccttcgtcgagcaggataacttttgcattatcacagagtattgcgagggtcgggatcttgacgataaaattcaagagtacaagcaagccggaaagatcttccctgagaatcagattattgagtggtttatacagctgctcttgggcgtcgactacatgcacgagcggaggattttgcaccgggacctaaaaagcaaaaacgtctttctcaagaataaccttctgaaaattggcgactttggagtttcaagacttctcatgggcagctgtgatctggctaccaccttgacaggtacaccacactacatgtctcctgaggctctaaagcaccagggatacgataccaaaagcgacatctggagccttgcttgtattttatatgaaatgtgctgtatgaaccacgcattcgctgggtccaacttcttaagcatcgtgctcaagatagtggagggagatacaccatctttgcccgaacggtatcccaaggaactgaatgctattatggagtccatgctaaataaaaatcctagtctccgtccgagtgctattgagattctgaaaatcccctatctggatgaacagctccagaatctgatgtgccggtattctgagatgaccctggaagacaagaatttagattgtcagaaggaggctgcccacatcattaacgctatgcagaagcggattcacctgcaaaccttacgggccctgagcgaggtccagaagatgacccctagggagcggatgaggctgaggaagttgcaggccgcagatgaaaaggcaaggaaactgaagaagatagtagaagagaagtacgaagaaaactccaaacggatgcaggagctccggtcccggaatttccagcaactttccgttgatgtcttgcacgaaaagacccacttaaagggcatggaagagaaggaggagcagcctgaaggccggctgtcctgttcaccccaggatgaggacgaagagagatggcagggtcgggaggaggagagtgatgagcctaccctcgagaacctacccgagagccaaccaattccatcaatggatctccatgagctcgagtccattgtcgaagacgcaacatcggacctcggttaccatgaaatccctgaggatcccttggtcgccgaagagtactacgctgatgcttttgactcctactgcgaagagtcagatgaagaggaagaagaaatcgcactggaacggccggagaaagagatccgcaatgaaggcagtcagcccgcctaccgcacgaaccagcaggatagcgacatagaagcactggcaagatgcctcgagaacgttctgggatgtacatctctggacacgaagacaatcactactatggccgaagatatgtcccctgggccaccaatattcaacagtgtaatggctagaaccaagatgaagaggatgcgggagagtgcaatgcagaaactgggtacagaagtgttcgaggaggtgtacaactatttaaagagggcaaggcaccagaatgcctccgaagcggagatcagggagtgtctggagaaggtggtgccccaggcttcagattgcttcgaggtggaccaactgttgtacttcgaggagcaacttttaatcacgatggggaaagagccaactctacagaatcacctgtag

SEQ ID NO: 216910 - DNA, 1938 bp, Artificial Sequence
  derived and/or modified sequence
atgctgaaattccaggaggccgccaagtgtgtctcagggtctactgctatttcgacataccctaagactcttattgcccggaggtatgtgctacaacagaagctagggagcggatccttcggtactgtatacttggtgtcagacaagaaggcaaagaggggggaggagcttaaggtgttgaaggagatctccgttggggagctgaaccctaatgaaacagttcaggcaaatttagaggcccagctgctatccaagcttgaccaccccgcaatcgtcaagttccatgctagttttgtcgaacaggacaacttttgcataatcacggagtactgtgaaggaagggatcttgatgataagatccaggaatataagcaggcaggcaagatctttcctgaaaatcagatcattgaatggtttattcaactgctgttgggcgttgactacatgcacgaaaggcgcattttgcatcgtgatcttaagtccaagaatgtcttcttgaagaacaatctcttgaaaattggggacttcggagtttcgcgacttttgatgggctcgtgcgacctcgcaactacgcttacaggaacccctcactacatgagcccagaagctttgaaacaccaggggtacgataccaagtcagacatatggagtttggcctgtatcctctacgagatgtgttgtatgaatcacgcctttgcgggctctaacttcttgtctatagtcctgaaaatcgttgaaggagacaccccctccttgcctgagagataccccaaggaactgaacgctattatggagtcaatgctcaataaaaatccatccctccggccgtctgcaatcgagattctgaagattccctatctggatgaacagctgcaaaaccttatgtgccgctactctgagatgacacttgaagataagaacctagactgccagaaggaggcagcacatatcattaatgcaatgcaaaagcggatccatcttcagaccctgagggcattgagtgaggtgcaaaagatgacacctcgggagagaatgcgtctccgcaaattgcaagcggcagacgagaaggcccgtaagctcaaaaaaatagttgaagaaaagtacgaggagaattcaaaaagaatgcaagaactgagatcaaggaacttccagcagctcagtgttgatgtgctgcatgaaaaaactcacctcaaagggatggaagagaaggaagaacagcccgagggccgcctatcctgttcccctcaggatgaagatgaggagcggtggcagggacgagaggaagaatcagatgaacccactctcgaaaatctccctgagagtcaacccataccaagcatggatctccatgagttggaaagtatcgtcgaggacgccactagcgacttgggatatcatgagatacccgaagatccgctggtagctgaggaatactacgctgacgcatttgattcctactgtgaagaatcagatgaagaagaggaagagatcgcactcgagcgacccgagaaggaaatccgcaacgaaggaagccagcctgcctatcggaccaatcagcaggattctgacatcgaggcactcgcccgttgcctggaaaatgtgcttgggtgcactagtcttgatacgaagaccatcactactatggccgaggacatgagtcctggcccaccgatcttcaacagtgtgatggcaagaaccaaaatgaagcggatgagggaatccgctatgcaaaagctcggaacagaggtgtttgaggaagtatataactacctgaaaagagcgagacaccagaacgcctcagaggccgaaatcagggagtgtcttgaaaaggtggttccacaggcttccgattgtttcgaagttgaccagctcctgtactttgaagagcaactgctgattaccatggggaaagagccaaccctgcagaaccacctgtag

SEQ ID NO: 216911 - DNA, 1938 bp, Artificial Sequence
  derived and/or modified sequence
atgctgaagttccaggaggccgccaagtgtgtgtctggcagcacagccatcagcacctaccccaagaccctgattgccaggagatatgtgctgcagcagaagctgggcagcggcagctttggcaccgtgtacctggtgtctgacaagaaggccaagagaggagaggagctgaaggtgctgaaggagatctctgtgggggagctgaaccccaatgaaacagtgcaggccaacctggaggcccagctgctgagcaagctggaccacccagccatcgtgaagttccacgccagctttgtggagcaggacaacttctgcatcatcacagagtactgtgagggccgggacctggatgacaagatccaggagtacaagcaggccggcaagatcttccctgagaaccagatcatcgagtggttcatccagctgctgctgggcgtggactacatgcatgagcggcgcatcctgcaccgggacctgaagagcaagaatgtgttcctgaagaacaacctgctgaagattggagactttggagtgtcccggctgctgatgggcagctgtgacctggccaccaccctgaccggcaccccccactacatgagccctgaggccctgaagcaccagggctatgacaccaagagtgacatctggagcctggcctgcatcctgtatgagatgtgctgcatgaaccacgcctttgctggcagcaacttcctgagcatcgtgctgaagatcgtggagggggacacccccagcctgcctgagcgctaccccaaggagctgaatgccatcatggagagcatgctgaacaagaaccccagcctgcggcccagcgccatcgagatcctgaagatcccctacctggatgagcagctgcagaacctgatgtgccgctacagcgagatgaccctggaggacaagaacctggactgccagaaggaggccgcccacatcatcaatgccatgcagaagaggatccacctgcagaccctgcgggccctgtctgaggtgcagaagatgaccccccgggagaggatgaggctgaggaagctgcaggccgcagatgagaaggccaggaagctgaagaagatcgtggaggagaagtatgaggagaacagcaagaggatgcaggagctgcggagcaggaacttccagcagctgtctgtggatgtgctgcacgagaagacccacctgaagggcatggaggagaaggaggagcagcctgagggccgcctgagctgcagcccccaggatgaagatgaggagcgctggcagggccgggaggaggagagtgatgagcccaccctggagaacctgcctgagagccagcccatccccagcatggacctgcacgagctggagagcatcgtggaggatgccaccagtgacctgggctaccacgagatccctgaggaccccctggtggccgaggagtactatgcagatgcctttgacagctactgtgaggagagtgatgaggaggaggaggagatcgccctggagaggcctgagaaggagatcagaaatgaaggcagccagcctgcctaccgcaccaaccagcaggacagcgacatcgaggccctggcccgctgcctggagaatgtgctgggctgcaccagcctggacaccaagaccatcaccaccatggccgaggacatgagccctggcccccccatcttcaacagcgtgatggcccggaccaagatgaagaggatgagggagagcgccatgcagaagctgggcacagaggtgtttgaggaggtgtacaactacctgaagagggcccggcaccagaatgccagcgaggccgagatccgggagtgcctggagaaggtggtgccccaggccagtgactgctttgaggtggaccagctgctgtactttgaggagcagctgctgatcaccatgggcaaggagcccaccctgcagaaccacctgtag

SEQ ID NO: 216912 - DNA, 1938 bp, Artificial Sequence
  derived and/or modified sequence
atgctgaagttccaggaggccgccaagtgcgtgagcggcagcaccgcgatcagcacttatcctaaaactctcatcgcgagacggtatgtactccagcagaaactgggctctggatctttcgggactgtatatctggtgagtgacaaaaaggccaaaaggggcgaggaactcaaagtgctcaaagagatcagcgtgggtgaactaaacccaaacgaaactgtccaggccaacctggaggctcagctgttgtcgaagttggaccatccggctatagttaagtttcatgctagctttgtcgagcaggataatttctgcatcattaccgaatattgtgagggtcgcgatctggacgacaaaattcaggagtataaacaagcaggtaagatctttcccgaaaatcagataatcgagtggtttatacaacttttattgggcgttgactacatgcatgagcggcggatcctacatcgcgatttgaaatctaaaaatgtgtttttgaagaataatctccttaaaattggtgactttggcgtcagcagactactgatggggtcctgcgacctggctaccacattaaccgggacaccacactatatgtcacccgaggctttgaagcaccagggttacgacacaaaatctgacatttggagcttagcatgcatcctgtacgagatgtgttgcatgaatcatgctttcgcgggctccaacttcctgtctatcgtgctcaagatagtcgagggggacacccccagcttgccggagcggtacccgaaggagctcaatgccattatggaaagcatgttgaacaagaatccgtcactgaggcccagtgccatcgagattttaaagattccttatctggatgagcagctgcagaatctgatgtgtagatattcagaaatgactctcgaggataaaaatctggactgccagaaagaagctgcccacatcatcaatgctatgcaaaaaaggatccaccttcagacgctacgcgctttgtctgaagtccagaagatgacccccagggaacgtatgaggctgaggaagctccaggcagcagacgaaaaagctaggaagttaaagaagatcgtcgaggagaaatacgaagagaattctaaacggatgcaggaactacggtcccggaactttcagcaactttcagtcgatgtcctccacgagaagacccaccttaaaggaatggaagaaaaggaagagcaacccgaaggtcggctgtcatgttctccgcaggacgaggacgaggagagatggcagggcagagaggaagaatcagacgaaccgaccctggaaaacttaccggagtcccaacccatcccgtcaatggacctgcacgagctggagagcatcgtggaggatgctaccagcgacttaggataccacgaaatcccagaggacccactggtggctgaagagtactacgcagatgcttttgatagctactgcgaggagtctgacgaggaggaggaggaaatcgccctcgaaagacctgaaaaggaaatcaggaatgagggctcccagccagcatatcgcacaaaccaacaggacagtgatatagaggctctggcccgctgtctggagaacgtgctcggttgtacatcgttagacacgaagactatcactacaatggcagaagacatgtctccaggtccgccgatctttaactccgtgatggcacggacaaagatgaaaaggatgcgtgaatcagctatgcaaaagctaggaacagaggtatttgaggaagtttacaactacctgaagcgtgccaggcatcagaacgccagtgaggccgaaatcagggaatgcttggagaaagtggttccacaggcatctgattgtttcgaggtggaccaattactgtatttcgaggaacagttgctgatcacaatgggcaaagaaccaaccctccagaaccatctctag

SEQ ID NO: 216913 - DNA, 1938 bp, Artificial Sequence
  derived and/or modified sequence
atgctgaagttccaggaggccgccaagtgcgtgagcggcagcaccgcgatcagtacataccccaagacacttattgcccgtcgttatgtgttacagcagaagttggggtccggcagtttcggcaccgtgtacctggtcagtgacaaaaaggccaagcggggggaagagcttaaagtactgaaggagatctctgtcggggagctcaaccctaatgaaacagtccaggcaaatttggaggcccagttgctatcaaagcttgaccatcccgcgattgtgaaattccatgcctcttttgttgaacaggataatttctgcatcatcacggagtactgcgagggcagggacctggacgacaagattcaggagtataagcaggccggaaagatatttccggaaaatcaaatcatcgaatggtttatacagttgttgctgggcgtggactacatgcatgagagacggatattacaccgggatctgaaatctaaaaacgtcttcctgaagaataatctgctcaagatcggagatttcggcgtctcccgccttctgatgggatcatgtgacttagccaccacactcactggtaccccacactatatgtctccagaggccctcaaacaccaaggctatgatacaaagtccgatatttggtccctggcgtgcatcctctacgaaatgtgttgtatgaatcacgctttcgccggatccaacttcctgtccatcgttttgaaaatcgttgagggggacacacccagcctccccgagcggtatccaaaggagctcaacgctattatggagtccatgcttaataagaacccaagcttaagaccatcagcgatagagatactgaagatcccttatcttgatgaacagctacagaacttgatgtgccgatattccgaaatgactctcgaggataaaaaccttgactgccagaaagaggcggcacacattatcaacgcgatgcaaaaaaggatacacttgcagacacttcgagcactgtccgaagttcagaagatgactccaagagagcggatgcgcctacgcaaactccaggccgcagatgagaaagcccggaagctaaaaaagatcgtcgaggaaaagtatgaagagaattcgaaacggatgcaggagctgagatccagaaatttccagcagctgtcagttgacgtgttacatgagaaaacacatctgaagggcatggaagaaaaagaggagcaacctgaagggagattgagctgctccccgcaagatgaagatgaagagaggtggcagggcagggaggaagagtcggacgagccaacactcgaaaacttgccagagtctcaaccaattccaagtatggaccttcacgagctggaaagtatcgtcgaggacgccactagcgatctgggataccatgagatccccgaagaccctctggtggctgaagaatactacgccgatgcctttgacagttactgtgaagagtcagacgaagaggaggaagaaattgctcttgaacgacctgagaaagaaatccgcaacgaaggaagccagcccgcttatcgcactaatcaacaggacagcgacatcgaagccctggcgcgctgcctcgagaacgtgctcggctgcacctccctcgataccaagactataacgacaatggccgaagacatgtctcctgggcctccaatatttaattcagtcatggccagaaccaaaatgaagaggatgagagaaagcgctatgcagaaacttggtaccgaggttttcgaggaagtgtacaactatctgaaacgagcaaggcaccagaatgctagcgaagcagaaatcagggagtgccttgagaaggtggtgcctcaagcatcggattgcttcgaggtggatcaactactgtattttgaggaacaactgctcatcacaatgggtaaagaaccgaccctgcagaaccacctctag

SEQ ID NO: 216914 - DNA, 1938 bp, Artificial Sequence
  derived and/or modified sequence
atgctgaagttccaggaggccgccaagtgcgtgagcggcagcaccgccatcagtacctatcctaaaactctcattgcacgacgatatgtactgcagcagaagctgggcagcgggtccttcgggacggtctacttagtttcagacaagaaggccaaaaggggagaggaactgaaagtgttgaaagaaatttccgtgggagagttaaatcccaacgaaacagtgcaggccaacttagaagcacagttgctgtcaaaactggatcatcctgctatagtgaagtttcacgcttcattcgtggaacaggataacttctgcattattaccgaatactgtgaagggcgagacctggatgacaagattcaggagtacaaacaggctgggaaaatcttccctgagaaccagatcatagaatggtttatccagctgctgttaggagttgactacatgcatgagcgtaggatcctgcaccgggatcttaaaagcaagaacgtcttcctcaaaaataacttgttaaagatcggtgatttcggtgtgtctaggctcctcatggggtcttgcgacctggccactactctcactgggactccacactacatgtcccctgaagccctgaagcaccagggatacgacacaaaatccgacatttggagtctggcatgtatcttatatgagatgtgttgtatgaaccacgccttcgccggatcgaatttcttgagtattgttctgaagattgtagaaggagatacaccaagcctccccgagagatatccaaaggagctgaacgcaattatggagagcatgctgaacaaaaaccctagcctgcgacccagcgccattgagatcttaaaaattccttacttggacgagcagttgcagaatctgatgtgtagatattctgaaatgacacttgaggataaaaatttggattgccagaaggaggccgcccatatcatcaatgccatgcagaaaagaatacacctgcagactctgcgagcacttagcgaggtgcagaagatgactcctcgcgaaagaatgcgcctcagaaagcttcaggccgcagacgaaaaagccaggaaactcaagaaaatcgtagaggagaagtacgaggaaaacagtaagaggatgcaggagctaaggtccagaaacttccagcagctgagcgtggacgtcctccacgagaagacgcacctgaagggcatggaagaaaaggaagaacaaccggaaggcaggttgtcttgtagcccccaggacgaggacgaggagcgctggcaaggacgcgaggaggagtcagacgaaccgaccctggaaaatcttccagagtctcagccgatcccttctatggatctgcacgagctagagtccatcgtggaagacgctaccagcgacctaggctaccatgagattccggaagatcccttggttgctgaagagtactatgccgatgcttttgacagttattgcgaggaaagcgacgaagaagaggaggagattgctctggaacggcctgaaaaagagattcgaaacgaaggcagccagcccgcttaccggaccaatcaacaagactccgatatcgaagccctggctagatgtctcgagaacgtgctcggttgtacatctttagacaccaaaaccataaccacaatggcggaggatatgtcccccgggcctcccatctttaattcggtgatggcccggaccaagatgaaaaggatgcgtgagtcagctatgcagaaactaggtacagaagtgttcgaagaagtttacaactacctcaaaagagccaggcatcagaatgcctcagaggccgagatacgagagtgtctagaaaaggtcgtgcctcaggccagtgattgtttcgaagtcgaccaactcctctattttgaggaacagcttctcataactatggggaaagaaccaacgctacaaaaccacctgtag

SEQ ID NO: 216915 - DNA, 2914 bp, Artificial Sequence
  derived and/or modified sequence
ccaaacagccgtggcccgcggtgtctggcgctcggtgggtgtggttgcccctagtttgaggcctgcccgattacccgcaagacttgggcagccccgggcgccgctccgaccacgacagggaaaggaaccttaatctcatctttaaaataaggagaattactgagtgacctgaaggacccttttcagctggaaagtctgaactgaccaacactggatgaatttgaccatttcttaggagactggaatgttaagtttctataaatgaatgaaccagttctctcttgtttggagcaatgctgaaattccaagaggcagctaagtgtgtgagtggatcaacagccatttccacttatccaaagaccttgattgcaagaagatacgtgcttcaacaaaaacttggcagtggaagttttggaactgtctatctggtttcagacaagaaagccaaacgaggagaggaattaaaggtacttaaggaaatatctgttggagaactaaatccaaatgaaactgtacaggccaatttggaagcccaactcctctccaagctggaccacccagccattgtcaagttccatgcaagttttgtggagcaagataatttctgcattatcacggagtactgtgagggccgagatctggacgataaaattcaggaatataaacaagctggaaaaatctttccagaaaatcaaataatagaatggtttatccagctgctgctgggagttgactacatgcatgagaggaggatacttcatcgagacttaaagtcaaagaatgtatttctgaaaaataatctccttaaaattggagattttggagtttctcgacttctaatgggatcctgtgacctggccacaactttaactggaactccccattatatgagtcctgaggctctgaaacaccaaggctatgacacaaagtcggacatctggtcactggcatgcattttgtatgagatgtgctgcatgaatcatgcattcgctggctccaatttcttatccattgttttaaaaattgttgaaggtgacacaccttctctccctgagagatatccaaaagaactaaatgccatcatggaaagcatgttgaacaagaatccttcattaagaccatctgctatcgaaattttaaaaatcccttaccttgatgagcagctacagaacctaatgtgtagatattcagaaatgactctggaagacaaaaatttggattgtcagaaggaggctgctcatataattaatgccatgcaaaaaaggatccacctgcagactctgagggcactgtcagaagtacagaaaatgacgccaagagaaaggatgcggctgaggaagctccaggcggctgatgagaaagccaggaagctgaaaaagattgtggaagaaaaatatgaagaaaatagcaaacgaatgcaagaattgagatctcggaactttcagcagctgagtgttgatgtactccatgaaaaaacacatttaaaaggaatggaagaaaaggaggagcaacctgagggaagactttcttgttcaccccaggacgaggatgaagagaggtggcaaggcagggaagaggaatctgatgaaccaactttagagaacctgcctgagtctcagcctattccttccatggacctccacgaacttgaatcaattgtagaggatgccacatctgaccttggataccatgagatcccagaagacccacttgtggctgaagagtactacgctgatgcatttgattcctattgtgaagagagtgatgaggaggaagaagaaatagcgttagaaagaccagagaaagaaatcaggaatgagggatcccagcctgcttacagaacaaaccaacaggacagtgatatcgaagcgttggccaggtgtttggaaaatgtcctgggttgcacttctctagacacaaagaccatcaccaccatggctgaagacatgtccccaggaccaccaattttcaacagtgtgatggccaggaccaagatgaaacgcatgagggaatcagccatgcagaagctggggacagaagtatttgaagaggtctataattacctcaagagagcaaggcatcagaatgctagcgaagcagagatccgcgagtgtttggaaaaagtggtgcctcaagccagcgactgttttgaagtggaccagctcctgtactttgaagagcagttgctgatcacgatgggaaaagaacctactctccagaaccatctctaggcaactatcaaaaagaagcagaagttcaagtggacaaatttatgtgaaaattcatttaacatataagctgaactctattatggggaatggatacaaaagcagagctcccatcttgactttcaattcctcatcagaagtactggcttctttagagagtagtaagcatggctgcctatgcttggagtcataagtgttatttggactataccctgagataagcttatagatcaagtttggctcccttgaaaagcatttctctcatgtgcgccctcagggcttccagcaggattgagtcaccctgacgatgaccggggagaagccgtgtgctcttcattattttcagctggaggacagagctcagtgcctgactgcctagggtctcatggactgtaggcagcctgccagtgaaggtcactggactctagcctacaacatgctgagctacagcccagaagccagacatgcctgtcttagctgacctgtttttggtccacttttgcccttccatgactaataaggaagatatgtgtgtatttcatacacacacaaggacctggattaaaaatccaaaaagtgattctcttctatgatttatttcaaactcatccatagataattcaagatttgtattcaaaataaacatagttttcacagttacaaaataaatcacctattttatcttt

SEQ ID NO: 216916 - DNA, 2879 bp, Artificial Sequence
  derived and/or modified sequence
agtatgccccgcgccgtctccctggccacggttccaaacagccgtggcccgcggtgtctggcgctcggtgggtgtggttgcccctagtttgaggcctgcccgattacccgcaagacttgggcagccccgggcgccgctccgaccacgacagggaaaggaactgaccaacactggatgaatttgaccatttcttaggagactggaatgttaagtttctataaatgaatgaaccagttctctcttgtttggagcaatgctgaaattccaagaggcagctaagtgtgtgagtggatcaacagccatttccacttatccaaagaccttgattgcaagaagatacgtgcttcaacaaaaacttggcagtggaagttttggaactgtctatctggtttcagacaagaaagccaaacgaggagaggaattaaaggtacttaaggaaatatctgttggagaactaaatccaaatgaaactgtacaggccaatttggaagcccaactcctctccaagctggaccacccagccattgtcaagttccatgcaagttttgtggagcaagataatttctgcattatcacggagtactgtgagggccgagatctggacgataaaattcaggaatataaacaagctggaaaaatctttccagaaaatcaaataatagaatggtttatccagctgctgctgggagttgactacatgcatgagaggaggatacttcatcgagacttaaagtcaaagaatgtatttctgaaaaataatctccttaaaattggagattttggagtttctcgacttctaatgggatcctgtgacctggccacaactttaactggaactccccattatatgagtcctgaggctctgaaacaccaaggctatgacacaaagtcggacatctggtcactggcatgcattttgtatgagatgtgctgcatgaatcatgcattcgctggctccaatttcttatccattgttttaaaaattgttgaaggtgacacaccttctctccctgagagatatccaaaagaactaaatgccatcatggaaagcatgttgaacaagaatccttcattaagaccatctgctatcgaaattttaaaaatcccttaccttgatgagcagctacagaacctaatgtgtagatattcagaaatgactctggaagacaaaaatttggattgtcagaaggaggctgctcatataattaatgccatgcaaaaaaggatccacctgcagactctgagggcactgtcagaagtacagaaaatgacgccaagagaaaggatgcggctgaggaagctccaggcggctgatgagaaagccaggaagctgaaaaagattgtggaagaaaaatatgaagaaaatagcaaacgaatgcaagaattgagatctcggaactttcagcagctgagtgttgatgtactccatgaaaaaacacatttaaaaggaatggaagaaaaggaggagcaacctgagggaagactttcttgttcaccccaggacgaggatgaagagaggtggcaaggcagggaagaggaatctgatgaaccaactttagagaacctgcctgagtctcagcctattccttccatggacctccacgaacttgaatcaattgtagaggatgccacatctgaccttggataccatgagatcccagaagacccacttgtggctgaagagtactacgctgatgcatttgattcctattgtgaagagagtgatgaggaggaagaagaaatagcgttagaaagaccagagaaagaaatcaggaatgagggatcccagcctgcttacagaacaaaccaacaggacagtgatatcgaagcgttggccaggtgtttggaaaatgtcctgggttgcacttctctagacacaaagaccatcaccaccatggctgaagacatgtccccaggaccaccaattttcaacagtgtgatggccaggaccaagatgaaacgcatgagggaatcagccatgcagaagctggggacagaagtatttgaagaggtctataattacctcaagagagcaaggcatcagaatgctagcgaagcagagatccgcgagtgtttggaaaaagtggtgcctcaagccagcgactgttttgaagtggaccagctcctgtactttgaagagcagttgctgatcacgatgggaaaagaacctactctccagaaccatctctaggcaactatcaaaaagaagcagaagttcaagtggacaaatttatgtgaaaattcatttaacatataagctgaactctattatggggaatggatacaaaagcagagctcccatcttgactttcaattcctcatcagaagtactggcttctttagagagtagtaagcatggctgcctatgcttggagtcataagtgttatttggactataccctgagataagcttatagatcaagtttggctcccttgaaaagcatttctctcatgtgcgccctcagggcttccagcaggattgagtcaccctgacgatgaccggggagaagccgtgtgctcttcattattttcagctggaggacagagctcagtgcctgactgcctagggtctcatggactgtaggcagcctgccagtgaaggtcactggactctagcctacaacatgctgagctacagcccagaagccagacatgcctgtcttagctgacctgtttttggtccacttttgcccttccatgactaataaggaagatatgtgtgtatttcatacacacacaaggacctggattaaaaatccaaaaagtgattctcttctatgatttatttcaaactcatccatagataattcaagatttgtattcaaaataaacatagttttcacagttacaaaataaatcacctattttatcttttcctt

SEQ ID NO: 216917 - DNA, 1938 bp, Artificial Sequence
  derived and/or modified sequence
atgctgaaattccaagaggcagctaagtgtgtgagtggatcaacagccatttccacttatccaaagaccttgattgcaagaagatacgtgcttcaacaaaaacttggcagtggaagttttggaactgtctatctggtttcagacaagaaagccaaacgaggagaggaattaaaggtacttaaggaaatatctgttggagaactaaatccaaatgaaactgtacaggccaatttggaagcccaactcctctccaagctggaccacccagccattgtcaagttccatgcaagttttgtggagcaagataatttctgcattatcacggagtactgtgagggccgagatctggacgataaaattcaggaatataaacaagctggaaaaatctttccagaaaatcaaataatagaatggtttatccagctgctgctgggagttgactacatgcatgagaggaggatacttcatcgagacttaaagtcaaagaatgtatttctgaaaaataatctccttaaaattggagattttggagtttctcgacttctaatgggatcctgtgacctggccacaactttaactggaactccccattatatgagtcctgaggctctgaaacaccaaggctatgacacaaagtcggacatctggtcactggcatgcattttgtatgagatgtgctgcatgaatcatgcattcgctggctccaatttcttatccattgttttaaaaattgttgaaggtgacacaccttctctccctgagagatatccaaaagaactaaatgccatcatggaaagcatgttgaacaagaatccttcattaagaccatctgctatcgaaattttaaaaatcccttaccttgatgagcagctacagaacctaatgtgtagatattcagaaatgactctggaagacaaaaatttggattgtcagaaggaggctgctcatataattaatgccatgcaaaaaaggatccacctgcagactctgagggcactgtcagaagtacagaaaatgacgccaagagaaaggatgcggctgaggaagctccaggcggctgatgagaaagccaggaagctgaaaaagattgtggaagaaaaatatgaagaaaatagcaaacgaatgcaagaattgagatctcggaactttcagcagctgagtgttgatgtactccatgaaaaaacacatttaaaaggaatggaagaaaaggaggagcaacctgagggaagactttcttgttcaccccaggacgaggatgaagagaggtggcaaggcagggaagaggaatctgatgaaccaactttagagaacctgcctgagtctcagcctattccttccatggacctccacgaacttgaatcaattgtagaggatgccacatctgaccttggataccatgagatcccagaagacccacttgtggctgaagagtactacgctgatgcatttgattcctattgtgaagagagtgatgaggaggaagaagaaatagcgttagaaagaccagagaaagaaatcaggaatgagggatcccagcctgcttacagaacaaaccaacaggacagtgatatcgaagcgttggccaggtgtttggaaaatgtcctgggttgcacttctctagacacaaagaccatcaccaccatggctgaagacatgtccccaggaccaccaattttcaacagtgtgatggccaggaccaagatgaaacgcatgagggaatcagccatgcagaagctggggacagaagtatttgaagaggtctataattacctcaagagagcaaggcatcagaatgctagcgaagcagagatccgcgagtgtttggaaaaagtggtgcctcaagccagcgactgttttgaagtggaccagctcctgtactttgaagagcagttgctgatcacgatgggaaaagaacctactctccagaaccatctctag

SEQ ID NO: 216918 - DNA, 1938 bp, Artificial Sequence
  derived and/or modified sequence
atgcttaaattccaggaggccgcaaagtgtgtatccggatcaacagctatttcaacatatcctaagaccctgatcgcccgacgttatgtgttgcagcagaagctcgggtccgggtcattcggtacggtatacctcgtttctgataaaaaggccaaaaggggcgaggagctgaaagtcctcaaagaaattagcgtaggtgagttgaatcccaatgaaaccgtgcaggccaatctcgaggcccagctcctctctaaattggaccatcccgctattgtgaagttccacgccagttttgttgagcaggacaatttctgtataataaccgagtactgcgagggtcgagatctggatgacaaaattcaggagtacaaacaggcgggaaagatctttcctgagaatcagattatcgaatggtttatccagctcttacttggagtggactatatgcacgaaaggagaattctacaccgggacttaaagtccaagaatgtgtttttgaaaaataacctgttgaagattggagatttcggagtgagccggcttctgatgggctcgtgtgatctggctactactctgaccgggacgccacattacatgagtcccgaggccctgaaacatcaggggtacgataccaaaagcgatatatggtctctggcttgtatcctgtatgaaatgtgttgcatgaatcacgcatttgctgggtctaacttcctgtccatagtgctgaagatagtagaaggtgatacaccctccctgcctgaacgatatccaaaggagctcaatgcgattatggaatctatgttgaataaaaacccctcgctgcgaccgtctgcgatcgaaattttgaagatcccgtatctcgacgagcagttgcaaaacctgatgtgcaggtacagtgagatgaccctcgaggacaaaaatctagactgccagaaggaagccgcacatatcatcaacgcaatgcagaagagaatccacctgcagaccctccgcgcactgtccgaagtgcagaaaatgacaccacgggaacggatgaggctgcgcaagctgcaggcggcagacgagaaagcacggaagctgaaaaagatagtggaggagaaatatgaggagaactcgaagcgtatgcaggaactgagaagcaggaattttcaacaactgagcgttgatgtattacacgagaaaacccacctgaagggaatggaggagaaagaagaacagccagaaggtaggctctcttgtagcccccaggacgaagatgaggagagatggcagggcagggaggaagagtcagacgaacccaccctggagaacctgcccgagtcacaaccaataccctcgatggacttgcacgagctagagagcatcgttgaggatgccacttcagatcttggctatcacgagatccccgaggaccccctggtcgcggaagaatactacgccgatgccttcgacagctactgtgaggagtcagacgaggaagaggaggaaatcgccctcgagcggcctgaaaaggaaatacgaaacgagggatcacagcccgcttatagaaccaatcagcaggactccgacattgaagcactcgccagatgtttggaaaatgttctgggatgtacttcacttgacaccaagacaattacaactatggccgaggatatgagtccaggaccccctatcttcaactcagtcatggcccgtaccaagatgaaacggatgagagaatccgcgatgcagaaactgggcaccgaagttttcgaagaagtttataattacttgaaacgggcaagacatcagaacgcaagcgaggcagaaatccgcgagtgtctagaaaaggtagttcctcaagcatcagattgtttcgaagttgaccagctgctctacttcgaggaacagcttctaatcactatgggtaaggagccgactcttcaaaaccacttatag

SEQ ID NO: 216919 - DNA, 1938 bp, Artificial Sequence
  derived and/or modified sequence
atgttaaaatttcaggaagctgctaaatgcgtgagcggatctactgccatctctacatatcctaaaactctcatagcccgtagatacgttttgcagcagaaattggggtccggatcttttggaactgtctacttggttagcgataagaaggctaagcggggagaggagcttaaagtgctgaaggagatcagcgtaggcgagttaaacccgaacgagaccgtgcaggccaacctggaagctcagctgctatcaaaactggatcacccggctattgttaagttccacgcctcctttgttgagcaggataacttttgtatcataaccgagtattgcgaaggacgggatctagacgataaaatccaggagtataagcaggcgggtaaaatctttcctgagaaccagatcatcgagtggtttatacagctattgctgggagttgattatatgcatgaaagaagaattctgcacagggacctgaaatccaagaacgtctttctgaaaaataacctgcttaaaatcggtgacttcggagtcagtaggttgctgatgggtagctgcgacctggccaccacactgaccggtaccccccattatatgtctcccgaagccctcaagcatcaggggtatgacactaaatccgatatctggtctctggcatgcatactatacgaaatgtgctgtatgaaccacgccttcgccggatcaaatttcctatctattgtgctgaagatcgttgaaggagacacccctagtctgccagagaggtaccccaaggagctgaatgccatcatggagagcatgctgaacaaaaacccttccctgcgtccctcagctattgagatcctgaagatcccctacctggacgagcagctccagaacctgatgtgtcggtattctgagatgactcttgaggataagaatttggactgccaaaaagaagctgctcacattatcaacgcgatgcagaagaggattcatcttcagacattgcgtgctctctcagaggttcagaaaatgacacctcgcgagcggatgcggctgcggaaactccaagccgctgacgaaaaagccaggaagctaaagaagattgtcgaagagaaatacgaggaaaactctaaacgcatgcaggagctccgatcccgtaatttccagcagctgtctgtggatgtgcttcatgagaagacacacctgaagggaatggaagagaaggaggaacagcccgagggacggttgtcatgcagcccccaggatgaggatgaggagcggtggcagggcagggaggaggagagcgacgaacctacacttgagaatctgcccgagtcccagcctataccatctatggacctacacgaactcgagtctatcgttgaagacgccacttctgacctgggataccatgagatccctgaggaccctctggtggccgaggaatattatgctgatgccttcgattcttactgcgaagagtccgatgaggaggaagaggagatcgcactcgagcgccctgaaaaggagatcaggaatgaaggctcacagcctgcttatcggacaaatcagcaggattcagacatagaggccctggctaggtgtctggaaaatgtgctgggttgcacatcactggacactaagacgatcactacaatggctgaggatatgtcccccggacctcctattttcaactccgtgatggctcgcactaagatgaagcggatgagagagtcggcaatgcagaagctgggcacagaggtgttcgaggaggtttataattacctcaaaagggcaaggcaccagaacgcaagtgaagcagagatccgagagtgtctggaaaaagtggtgccacaagcgtctgactgcttcgaggtcgaccagctgctctatttcgaggagcagctgctaatcaccatgggcaaggagcctaccctgcagaaccatctttag

SEQ ID NO: 216920 - DNA, 1938 bp, Artificial Sequence
  derived and/or modified sequence
atgctcaagtttcaggaggccgcaaagtgtgtgagcggttccaccgcgattagcacgtaccccaagactttaatcgctagaaggtatgtgctgcagcaaaagctcggtagcggaagctttggcacagtctacctcgtgagtgacaaaaaagcaaagcgcggtgaggagctgaaagtgctgaaagaaatctcggtgggcgaactgaatcccaacgagacagtgcaggcaaacctggaggcccagttgttgtcaaagcttgaccatccggctatcgttaagtttcatgcatccttcgtggagcaagataacttttgcatcattactgaatattgcgaaggcagagacctggatgacaagatccaagagtacaaacaagctggaaagatctttccggagaaccagataattgagtggtttattcagctgttgttgggggtagattatatgcatgaaagacgtatcctgcatagggatctcaagtcgaagaatgtgttcctgaaaaataacctcctcaaaattggtgacttcggcgtatcgagactcctgatggggtcatgtgacttggcgactactctgacgggtactccacactacatgagcccggaagcccttaaacaccagggctacgatacaaaatctgatatttggtctctcgcatgtatcctttatgagatgtgttgcatgaatcacgccttcgccggtagcaatttcctcagcattgtgcttaaaatcgtggagggagatacaccctcattgccagagagatatcctaaggagctgaatgcaattatggagagcatgctcaacaaaaatccctccctgcgtcctagcgccatagagatattgaagatcccctacctcgacgagcagcttcagaatctgatgtgtcgctactccgagatgactctggaagataaaaacttggattgccaaaaagaggctgcccacattataaacgcaatgcagaaacgaatccatctgcagacattgcgagcactgtccgaagtacaaaagatgacacccagagaaaggatgcggttgcgaaagctgcaggctgcggacgagaaagcccgtaaactcaagaaaattgtcgaggaaaagtatgaagaaaacagtaaaagaatgcaggagctgcgcagccgaaacttccagcagttatcagtggacgtcctccacgagaagactcacctgaagggtatggaggagaaggaggagcagcccgagggccgattgtcatgctctccccaagacgaggatgaggaaagatggcaaggtagagaagaggaatcagacgagcctacccttgaaaaccttcccgaaagccagcccattccgtcaatggatctgcacgaactggaaagtattgtagaggacgctacttcggatctcggctaccatgaaataccggaggatccactcgtggccgaggagtactatgcagacgctttcgactcctactgtgaggagagcgacgaggaagaggaagaaattgccctcgaacgcccagaaaaggagattcgcaacgagggctcccagcccgcttatagaacaaaccagcaggattcagacatcgaggccctggctcgctgcctcgagaatgtcttaggatgtacttctttggacacaaagacgatcaccacaatggccgaggatatgtcaccaggcccacctatcttcaacagcgtgatggccaggactaaaatgaagagaatgcgggagagcgcaatgcagaaactcggaacggaggtctttgaggaggtgtacaactatctgaaacgggcacgtcatcagaatgcgagtgaggcggagattagggagtgtttggaaaaagtggtgccccaggcctccgactgtttcgaagtggaccaacttctgtacttcgaggagcagctgctgatcaccatgggaaaggaacccacactgcagaatcatttatag

SEQ ID NO: 216921 - DNA, 1938 bp, Artificial Sequence
  derived and/or modified sequence
atgctgaagttccaggaggccgccaagtgcgtgagcggcagcaccgccatcagcacctaccccaagaccctgatcgccagaagatacgtgctgcagcagaagctgggcagcggcagcttcggcaccgtgtacctggtgagcgacaagaaggccaagagaggcgaggagctgaaggtgctgaaggagatcagcgtgggcgagctgaaccccaacgagaccgtgcaggccaacctggaggcccagctgctgagcaagctggaccaccccgccatcgtgaagttccacgccagcttcgtggagcaggacaacttctgcatcatcaccgagtactgcgagggcagagacctggacgacaagatccaggagtacaagcaggccggcaagatcttccccgagaaccagatcatcgagtggttcatccagctgctgctgggcgtggactacatgcacgagagaagaatcctgcacagagacctgaagagcaagaacgtgttcctgaagaacaacctgctgaagatcggcgacttcggcgtgagcagactgctgatgggcagctgcgacctggccaccaccctgaccggcaccccccactacatgagccccgaggccctgaagcaccagggctacgacaccaagagcgacatctggagcctggcctgcatcctgtacgagatgtgctgcatgaaccacgccttcgccggcagcaacttcctgagcatcgtgctgaagatcgtggagggcgacacccccagcctgcccgagagataccccaaggagctgaacgccatcatggagagcatgctgaacaagaaccccagcctgagacccagcgccatcgagatcctgaagatcccctacctggacgagcagctgcagaacctgatgtgcagatacagcgagatgaccctggaggacaagaacctggactgccagaaggaggccgcccacatcatcaacgccatgcagaagagaatccacctgcagaccctgagagccctgagcgaggtgcagaagatgacccccagagagagaatgagactgagaaagctgcaggccgccgacgagaaggccagaaagctgaagaagatcgtggaggagaagtacgaggagaacagcaagagaatgcaggagctgagaagcagaaacttccagcagctgagcgtggacgtgctgcacgagaagacccacctgaagggcatggaggagaaggaggagcagcccgagggcagactgagctgcagcccccaggacgaggacgaggagagatggcagggcagagaggaggagagcgacgagcccaccctggagaacctgcccgagagccagcccatccccagcatggacctgcacgagctggagagcatcgtggaggacgccaccagcgacctgggctaccacgagatccccgaggaccccctggtggccgaggagtactacgccgacgccttcgacagctactgcgaggagagcgacgaggaggaggaggagatcgccctggagagacccgagaaggagatcagaaacgagggcagccagcccgcctacagaaccaaccagcaggacagcgacatcgaggccctggccagatgcctggagaacgtgctgggctgcaccagcctggacaccaagaccatcaccaccatggccgaggacatgagccccggcccccccatcttcaacagcgtgatggccagaaccaagatgaagagaatgagagagagcgccatgcagaagctgggcaccgaggtgttcgaggaggtgtacaactacctgaagagagccagacaccagaacgccagcgaggccgagatcagagagtgcctggagaaggtggtgccccaggccagcgactgcttcgaggtggaccagctgctgtacttcgaggagcagctgctgatcaccatgggcaaggagcccaccctgcagaaccacctgtag

SEQ ID NO: 216922 - protein, 321 aa, Artificial Sequence
  derived and/or modified sequence
MAPAFLLLLLLWPQGCVSGPSADSVYTKVRLLEGETLSVQCSYKGYKNRVEGKVWCKIRKKKCEPGFARVWVKGPRYLLQDDAQAKVVNITMVALKLQDSGRYWCMRNTSGILYPLMGFQLDVSPAPQTERNIPFTHLDNILKSGTVTTGQAPTSGPDAPFTTGVMVFTPGLITLPRLLASTRPASKTGYSFTATSTTSQGPRRTMGSQTVTASPSNARDSSAGPESISTKSGDLSTRSPTTGLCLTSRSLLNRLPSMPSIRHQDVYSTVLGVVLTLLVLMLIMVYGFWKKRHMASYSMCSDPSTRDPPGRPEPYVEVYLI

SEQ ID NO: 216923 - DNA, 966 bp, Artificial Sequence
  derived and/or modified sequence
atggcccccgccttcctgctgctgctgctgctgtggccccagggctgcgtgagcggccccagcgccgacagcgtgtacaccaaggtgagactgctggagggcgagaccctgagcgtgcagtgcagctacaagggctacaagaacagagtggagggcaaggtgtggtgcaagatcagaaagaagaagtgcgagcccggcttcgccagagtgtgggtgaagggccccagatacctgctgcaggacgacgcccaggccaaggtggtgaacatcaccatggtggccctgaagctgcaggacagcggcagatactggtgcatgagaaacaccagcggcatcctgtaccccctgatgggcttccagctggacgtgagccccgccccccagaccgagagaaacatccccttcacccacctggacaacatcctgaagagcggcaccgtgaccaccggccaggcccccaccagcggccccgacgcccccttcaccaccggcgtgatggtgttcacccccggcctgatcaccctgcccagactgctggccagcaccagacccgccagcaagaccggctacagcttcaccgccaccagcaccaccagccagggccccagaagaaccatgggcagccagaccgtgaccgccagccccagcaacgccagagacagcagcgccggccccgagagcatcagcaccaagagcggcgacctgagcaccagaagccccaccaccggcctgtgcctgaccagcagaagcctgctgaacagactgcccagcatgcccagcatcagacaccaggacgtgtacagcaccgtgctgggcgtggtgctgaccctgctggtgctgatgctgatcatggtgtacggcttctggaagaagagacacatggccagctacagcatgtgcagcgaccccagcaccagagacccccccggcagacccgagccctacgtggaggtgtacctgatctag

SEQ ID NO: 216924 - DNA, 966 bp, Artificial Sequence
  derived and/or modified sequence
atggcccctgcatttctcctgctgttgctgttgtggccccagggatgtgtgagtgggccctctgccgactcagtttacacgaaagtgcgcctgctcgagggggaaactctctcggtgcagtgttcttataagggatacaagaacagggtggagggcaaggtctggtgcaagatccggaaaaaaaaatgcgagcccgggttcgccagagtctgggtgaaagggccaagatacctgttacaggatgacgcgcaggccaaagttgtgaatatcaccatggtagccttaaagctgcaggactccggaagatattggtgcatgagaaatacatctggtatactctatcctctcatgggattccagctcgatgttagtcccgcacctcagactgagcgaaacatccccttcacccacctcgacaatattttgaagtctgggactgtgactacaggtcaggcacccacatcaggcccagatgcccctttcactaccggtgtcatggtgttcacgcctggactgattactctcccaagactcctggcctctaccaggcccgcctccaaaaccggctacagcttcacagcaacaagcacgacttctcaaggcccgaggcgtacaatgggttcacagacagtgacagcatccccctctaatgccagggattcttccgccgggcccgaatcaatatcgaccaaatctggagatctgtctacgcggagccctactactggcttatgcctgacatcccgttcactgttgaaccgcctgccatcgatgcctagcatcagacatcaagatgtgtactcgaccgtcctcggcgtcgtgctgaccctcctggttcttatgctgatcatggtgtatggcttctggaaaaaaaggcatatggcttcttactccatgtgcagcgacccgagtacccgagacccacctggccgccctgagccttacgtggaagtgtatctcatctag

SEQ ID NO: 216925 - DNA, 966 bp, Artificial Sequence
  derived and/or modified sequence
atggccccagccttcctgctgctgctgctgctgtggccccagggctgtgtgtctggccccagcgctgacagcgtgtacaccaaggtgcggctgctggagggggagaccctgtctgtgcagtgcagctacaagggctacaagaacagagtggagggcaaggtgtggtgcaagatcaggaagaagaagtgtgagcccggctttgcccgggtgtgggtgaagggcccccgctacctgctgcaggatgatgcccaggccaaggtggtgaacatcaccatggtggccctgaagctgcaggacagcggccgctactggtgcatgaggaacaccagcggcatcctgtaccccctgatgggcttccagctggatgtgtccccagccccccagacagaaagaaacatccccttcacccacctggacaacatcctgaagagcggcaccgtgaccaccggccaggcccccaccagcggcccagatgcccccttcaccactggagtgatggtgttcaccccaggcctcatcaccctgccccggctgctggccagcaccaggcctgccagcaagacaggctacagcttcaccgccaccagcaccaccagccagggccccaggaggaccatgggcagccagacagtgacagccagccccagcaatgcccgggacagcagcgctggccctgagagcatcagcaccaagagcggggacctgagcaccaggagccccaccaccggcctgtgcctgaccagccgcagcctgctgaaccggctgcccagcatgcccagcatccgccaccaggatgtgtacagcacagtgctgggcgtggtgctgaccctgctggtgctgatgctgatcatggtgtatggcttctggaagaagaggcacatggccagctacagcatgtgcagcgaccccagcacccgggaccccccaggccggcctgagccctacgtggaggtgtacctgatctag

SEQ ID NO: 216926 - DNA, 966 bp, Artificial Sequence
  derived and/or modified sequence
atggcccccgccttcctgctgctgctgctgctgtggccccagggctgtgttagcgggccaagcgctgattctgtgtacacaaaggtgaggcttctcgaaggcgagactctgagcgtgcagtgtagttataagggatacaaaaacagggttgagggcaaggtgtggtgtaagataagaaaaaaaaagtgtgagcctgggtttgctcgcgtgtgggtaaaagggccccggtatctcttgcaggacgatgcccaagcaaaggtggttaatataaccatggtggccctcaagctacaagatagcggacggtactggtgcatgagaaacacgtccggcatcttatatccccttatgggctttcagttagacgtctctcctgccccacagaccgaacgcaatatcccttttacccacctcgacaacattctcaagagtggtactgttacaacaggccaagcccctacaagcggccctgacgccccgtttaccacgggcgtgatggtgttcactcctgggctgataaccttaccacggcttctggcttctactagaccagcatctaagaccggatattcttttacagctactagcacaacttcacagggcccccgacggacaatggggtcccaaaccgtcacagcctctccttcaaatgcacgcgatagttctgcaggaccagagagtatttctacgaaatccggtgacctgtccactcggtcccccactactggtctgtgcctcacctcacggagccttctgaaccgcctgcctagtatgccgagcattcgtcaccaagatgtttactcaacagtgttaggagttgtgttaacgctgctagtcttgatgctcattatggtgtacggattttggaagaaacgccacatggcctcctactcaatgtgcagtgatccgagtactagggatccaccgggccggcccgagccttacgttgaggtgtacttgatatag

SEQ ID NO: 216927 - DNA, 966 bp, Artificial Sequence
  derived and/or modified sequence
atggcccctgcattcttattgctgcttctactctggccccagggttgcgtgagtgggccttctgccgattctgtctataccaaggttagactgcttgaaggggaaactctctctgtccagtgctcctacaaaggctataaaaacagggtggaaggcaaggtgtggtgtaagatcagaaaaaagaagtgcgagcctggctttgctcgagtgtgggtgaaagggcctagatacctgttgcaggacgacgctcaagccaaagtggtgaacatcaccatggtggcactcaaattacaagactcaggtcgctactggtgcatgcggaacaccagtggcatcctgtatcctcttatgggtttccagctggatgtctctcccgctccacaaactgagagaaatattcctttcacccatctggataatatattaaagtccggaacggtgacgacaggacaggcaccaaccagtgggccagatgccccattcacgactggtgtgatggtgttcactcccggactcattacccttccaaggctgctcgcaagtaccagacctgcttctaagaccggctattcatttacagccaccagcacgacatcacaaggtccaagacgtaccatgggcagccagacagtaaccgccagcccttccaacgctcgcgatagttctgcagggccagaaagcatcagtaccaagagcggtgacctgagcacacgatcacccacaaccggcctgtgcttgacctcccggtctctgttaaatcgactcccctctatgcctagcatcaggcaccaggacgtgtactcaacagtactgggggtggtgttgacgctgttagttctgatgctcatcatggtctatggtttttggaagaagaggcacatggccagctatagcatgtgctcagatccctctacgagagatcctcccggtagaccagagccatacgtggaggtttatttaatttag

SEQ ID NO: 216928 - DNA, 3302 bp, Artificial Sequence
  derived and/or modified sequence
ataggctcaatgaatccctgcggttggctgggggcagtgggtcccacactgcctcacttccctaaatgggcagcttcacttttagaaccccgggtccttccctggcaggcccaggtggcacatcctgtgtcgggtgggccctcaccttggatctccaggcctgacactgcccagctggatggaaccatggccccagccttcctgctgctgctgctgctgtggccacagggttgcgtctcaggcccctctgctgacagtgtatacacaaaagtgaggctccttgaaggggagactctgtctgtgcagtgctcctataagggctacaaaaaccgcgtggagggcaaggtttggtgcaaaatcaggaagaagaagtgtgagcctggctttgcccgagtctgggtgaaagggccccgctacttgctgcaggacgatgcccaggccaaggtggtcaacatcaccatggtggccctcaagctccaggactcaggccgatactggtgcatgcgcaacacctctgggatcctgtaccccttgatgggcttccagctggatgtgtctccagctccccaaactgagaggaacattcctttcacacatctggacaacatcctcaagagtggaactgtcacaactggccaagcccctacctcaggccctgatgccccttttaccactggtgtgatggtgttcaccccaggactcatcaccttgcctaggctcttagcctccaccagacctgcctccaagacaggctacagcttcactgctaccagcaccaccagccagggacccaggaggaccatggggtcccagacagtgaccgcgtctcccagcaatgccagggactcctctgctggcccagaatccatctccactaagtctggggacctcagcaccagatcgcccaccacagggctctgcctcaccagcagatctctcctcaacagactaccctccatgccctccatcaggcaccaggatgtttactccactgtgcttggggtggtgctgaccctcctggtgctgatgctgatcatggtctatgggttttggaagaagagacacatggcaagctacagcatgtgcagcgatccttctacacgtgacccacctggaagaccagagccctatgtggaagtctacttgatctgaggccacttaagcatggggtggggagcttctcccagagtggccccagggggttagaggaggggtgaagattggggccagtatcgatcttatgaagctggaggacttgtgcagtgctggactcacccaggacttcccaaacccagaggctgccatcctaagcagccccacagcccagtgttctccttgggggcaggaacctggggaggggcccagagcaaagggcatcagggagaaagtcccgaggaaatgtgaccagtggtttctgctcggagctgcagaccccagggctcttggtggaggcaggggaaccctgagagtgctgtttacagagaacctcagctcccgtctgcctcagaaaccctattgggctgagctgccctccccaccagggccactgtgtcctctgcttccctccgttctgcttcagcttcccctaaggttagggaagaaagaatcgggctcacgaatgccagaggcagtgatgtcccatcctggaggagaggaaacagtgactaaaagctggggacccacagaggggttggcagcttctcttgtcgggacaggtgtcctttgctgggcctctggatggccctgccctgactggggctgctcctccctcctgtcctgggaccgcgcagagcccacgctctcactgctgcctcctgctggccgctgcctccttagaaagctgtgaccaggcagctaagagcctctgggctgcagggtcagcctctcccaagactgaagtgcagaggctggacttggggctctctcccccagcttctacacctgggctccaagtctgagttcccacaggggacccagcagcctccaggaagtccataccctggggtggctgagaccttggctctgtatggaggctgctcaccccacagacactggtggggagaccatggctcagaggaagggtggagcaaccctcctcctacccctcaggatagagagagaagacacacttgggacacagtgaagacagtaacttggaactgaccacggcctggaggactggcccaggcagggggacagggaaaatggagcccaagtagcctctggccagggacccaatgtcccgaggaatctgcctcccacccactgactcagggctcagactcagcctctattgtccagagcactggcttggcgtccagcaatgaaggctggagaatgcagcctggattcccctacacacacacacacacacacacacacacacacacacacacacacacacacacaggtgtctactgacctggagtgactggaatagcacctggggataaatgtgacaactgtgcattgaaccctgggtcagggacgttccaatggccaagagagtgacacagccaggaccctggtggacagccagaggggccacttcaggatggatgtggggagagtggaagaggcagggagtaatcctgggggacagcagggaggaggcacttcttccctatgtccaggagagggcaatagagggaagactgaggctgaagaattgacggctctggacccaggacagacagacagacagacagacagacagacagacagacacgcacacacacccatctctgtctagcaagcagcctcctaagatagctgttctccctatcatgacggtgtagccaccatcctgttgtatactaggagagaacttaacccacctgggggaaaatagctccccaagagctggcaccagtaccactgatggccctgcttcctctgagtgagatgcccaggaggaggagccctagggaagaagtcagggacagggaccaggataccactctgtcactgtgtgaccctcagcaagtcactaacccttggcctcatttttcctgtcttgtgaaagaggacaataattcctacttctcaagattgttttcaagataaaataacattagcattgtacaatgatgcaaatgcctcattaccattattccttaagttgttttccagctctaatgttgtttccaacattacatttaagaccttaggattctgtttcttgcttttgtcatatctcttcccaagtgtcatcactatatggatgttgagggcccccgatgacagtccctttggtaaggtcctcttttgaggaggggagggtacagggtggactcatctca

SEQ ID NO: 216929 - DNA, 2741 bp, Artificial Sequence
  derived and/or modified sequence
gagtctatgcctgtcgtggaagctggcctggcccccggagctccctggagtcggtactgggggcttcgttttgtacgcaccgttttctctctgtgctatgggagatgtcaaggaatcaaagatgcaaataacaccagaaactccaggaaggatccctgttttaaatccttttgaaagtcctagtgattattctaatctccatgaacaaactctcgccagtccttctgtttttaaatcaacaaaattaccaactccagggaaatttagatggtctattgatcaactagctgtaataaatcctgtagaaatagacccagaagatattcatcgtcaagctttatacttaagtcattctcgaatagataaagatgtggaagacaaaagacaaaaagccattgaagagtttttcactaaagatgtcatcgtaccctctccttggactgatcatgaagggaaacagctttcacaatgtcattccagtaaatgcactaacataaatagtgactctccagttggaaaaaagctgaccattcattctgagaaaagcgatgctgcttgtcagacattgctgtctcttcctgtggattttaatttagaaaatatattaggtgactattttagagctgatgaatttgcagatcaatctcctggaaacctcagttcttcatccctcagaagaaagctgtttttagatgggaacggaagcatctccgactccttaccttcggcttctcccggaagtcctcacagtggtgttcaaacatcactagagatgttttattcaatagatttgtctcctgtaaagtgtaggagccccttgcagacaccaagttcggggcagttttcttctagccctattcaggctagtgcaaaaaaatacagcttgggaagcataactagtccttcgcctatttcttcacccactttctcaccaattgaatttcagataggagagactccactctcagaacaaaggaagtttactgttcattctcctgatgcttcatctggaacaaattctaatgggataactaatccgtgtatcagaagtccttatatagatggctgctcgccaattaaaaattggtctcctatgagacttcagatgtatagtggtggtactcagtatcggacctcagtgattcagataccttttactcttgagactcaaggtgaagatgaggaagataaagagaatattccttccacagatgtctcatcacccgccatggatgctgctggaatacacctacggcagtttagtaatgaggcttctacccatggtacacatttggttgtgactgccatgtctgttacacaaaatcagtccagtgcttctgagaaagaattagcactgttgcaggatgttgaaagggagaaagacaataacactgtggatatggttgatcctatagagatagcagatgagaccacttggattaaggagccggttgataatggcagtttacccatgactgattttgtaagtggcattgccttcagtattgaaaactctcatatgtgcatgtcacctcttgctgaaagcagtgtcattccttgtgaaagcagtaacattcagatggatagtggctataatacgcagaattgtggaagcaatattatggatacagttggggcagaaagttactgcaaagaaagtgatgcacaaacatgtgaagttgagagtaaatctcaagcatttaatatgaagcaagaccacacaacacagaggtgttggatgaaaacagcaagcccttttcaatgcagcagtccatagaatgcctctgtcagaatcaaagactaagcttaagagttcctcgcatatatcgttgtgcacaggatcaacatgatggtgactgggaaaaaattacttcaagtaacatgcttagctttccctccttaatgtgaaaaatcaagggcttactgacataggaacaacagaaatgctcctggaacttcaagttgctgaattataagtttattttttatcaataaatatttttatacttacattgagtgatgtgtttaacaacaaattgtgacagagctgagtgctcctatcttacagggtcaatgaactacttattaagccttactggtagcactgaatttagcagttctgagaacatgtgaaactatgttaaaactgaaggcactatatatttttacataaaagcttgaacatacagatgaattataacctatgtgaagaaatcttagatataaaactaacttttcaaagatacaaaagaaattaaacaggtttcctgaaattttagttcttggtctgttcacctctgtggggaaaattcttagttccagtgataactgttctagttactacttttaagtatgtaaatactagaaaggtagtactagtgacatcatcacgtgtattgttatctatggggcaaatgtgtggtgcccagaataaaatatacctcatgcctagggtagggacatcctttccagctcaaacgtgggtagggatgtgggagaataagaatgtgggagaaccaagagaaaaagtggggctgggagagtggagttcccgtagggcataggcctgtgaagtaacactggggcagatatgtatgttatatacaactatttttttaaaaaacttatatccatgttgggagtagatgggtatataacagtttggaaatactatctttggagaatgtatttttgtatttataaatcaacttttaaaaactgtctcattcaaaagggaataa

SEQ ID NO: 216930 - protein, 697 aa, Artificial Sequence
  derived and/or modified sequence
MGFQPPAALLLRLFLLQGILRLLWGDLAFIPPFIRMSGPAVSASLVGDTEGVTVSLAVLQDEAGILPIPTCGVLNNETEDWSVTVIPGAKVLEVTVRWKRGLDWCSSNETDSFSESPCILQTLLVSASHNSSCSAHLLIQVEIYANSSLTHNASENVTVIPNQVYQPLGPCPCNLTAGACDVRCCCDQECSSNLTTLFRRSCFTGVFGGDVNPPFDQLCSAGTTTRGVPDWFPFLCVQSPLANTPFLGYFYHGAVSPKQDSSFEVYVDTDAKDFADFGYKQGDPIMTVKKAYFTIPQVSLAGQCMQNAPVAFLHNFDVKCVTNLELYQERDGIINAKIKNVALGGIVTPKVIYEEATDLDKFITNTETPLNNGSTPRIVNVEEHYIFKWNNNTISEINVKIFRAEINAHQKGIMTQRFVVKFLSYNSGNEEELSGNPGYQLGKPVRALNINRMNNVTTLHLWQSAGRGLCTSATFKPILFGENVLSGCLLEVGINENCTQLRENAVERLDSLIQATHVAMRGNSDYADLSDGWLEIIRVDAPDPGADPLASSVNGMCLDIPAHLSIRILISDAGAVEGITQQEILGVETRFSSVNWQYQCGLTCEHKADLLPISASVQFIKIPAQLPHPLTRFQINYTEYDCNRNEVCWPQLLYPWTQYYQGELHSQCVAKGLLLLLFLTLALFLSNPWTRICKAYS

SEQ ID NO: 216931 - DNA, 2094 bp, Artificial Sequence
  derived and/or modified sequence
atgggcttccagccccccgccgccctgctgctgagactgttcctgctgcagggcatcctgagactgctgtggggcgacctggccttcatcccccccttcatcagaatgagcggccccgccgtgagcgccagcctggtgggcgacaccgagggcgtgaccgtgagcctggccgtgctgcaggacgaggccggcatcctgcccatccccacctgcggcgtgctgaacaacgagaccgaggactggagcgtgaccgtgatccccggcgccaaggtgctggaggtgaccgtgagatggaagagaggcctggactggtgcagcagcaacgagaccgacagcttcagcgagagcccctgcatcctgcagaccctgctggtgagcgccagccacaacagcagctgcagcgcccacctgctgatccaggtggagatctacgccaacagcagcctgacccacaacgccagcgagaacgtgaccgtgatccccaaccaggtgtaccagcccctgggcccctgcccctgcaacctgaccgccggcgcctgcgacgtgagatgctgctgcgaccaggagtgcagcagcaacctgaccaccctgttcagaagaagctgcttcaccggcgtgttcggcggcgacgtgaacccccccttcgaccagctgtgcagcgccggcaccaccaccagaggcgtgcccgactggttccccttcctgtgcgtgcagagccccctggccaacacccccttcctgggctacttctaccacggcgccgtgagccccaagcaggacagcagcttcgaggtgtacgtggacaccgacgccaaggacttcgccgacttcggctacaagcagggcgaccccatcatgaccgtgaagaaggcctacttcaccatcccccaggtgagcctggccggccagtgcatgcagaacgcccccgtggccttcctgcacaacttcgacgtgaagtgcgtgaccaacctggagctgtaccaggagagagacggcatcatcaacgccaagatcaagaacgtggccctgggcggcatcgtgacccccaaggtgatctacgaggaggccaccgacctggacaagttcatcaccaacaccgagacccccctgaacaacggcagcacccccagaatcgtgaacgtggaggagcactacatcttcaagtggaacaacaacaccatcagcgagatcaacgtgaagatcttcagagccgagatcaacgcccaccagaagggcatcatgacccagagattcgtggtgaagttcctgagctacaacagcggcaacgaggaggagctgagcggcaaccccggctaccagctgggcaagcccgtgagagccctgaacatcaacagaatgaacaacgtgaccaccctgcacctgtggcagagcgccggcagaggcctgtgcaccagcgccaccttcaagcccatcctgttcggcgagaacgtgctgagcggctgcctgctggaggtgggcatcaacgagaactgcacccagctgagagagaacgccgtggagagactggacagcctgatccaggccacccacgtggccatgagaggcaacagcgactacgccgacctgagcgacggctggctggagatcatcagagtggacgcccccgaccccggcgccgaccccctggccagcagcgtgaacggcatgtgcctggacatccccgcccacctgagcatcagaatcctgatcagcgacgccggcgccgtggagggcatcacccagcaggagatcctgggcgtggagaccagattcagcagcgtgaactggcagtaccagtgcggcctgacctgcgagcacaaggccgacctgctgcccatcagcgccagcgtgcagttcatcaagatccccgcccagctgccccaccccctgaccagattccagatcaactacaccgagtacgactgcaacagaaacgaggtgtgctggccccagctgctgtacccctggacccagtactaccagggcgagctgcacagccagtgcgtggccaagggcctgctgctgctgctgttcctgaccctggccctgttcctgagcaacccctggaccagaatctgcaaggcctacagctag

SEQ ID NO: 216932 - DNA, 2094 bp, Artificial Sequence
  derived and/or modified sequence
atggggtttcagccgccggctgcactgttgttgaggttgttcctgctgcaaggaattctgcgactcctctggggtgacctcgcctttatcccaccatttatccgtatgtcgggacccgcagtgagcgctagtctggtaggtgataccgaaggcgtgactgtctcgcttgccgttctgcaagacgaggccggcattcttcccattcctacttgcggagtcttgaacaatgagactgaggattggagtgtcaccgttatccctggggcgaaagtacttgaggtgacagtccggtggaagcgaggcctcgactggtgttcttcaaacgagaccgacagcttttccgaatcgccctgtattctgcagacactgttggtttccgcgagccataacagcagctgctccgcacaccttctgatccaggtcgagatctacgccaactcatcactcacacataatgccagcgaaaacgttacagtcatccctaatcaagtttaccagccactgggcccctgtccctgtaaccttactgcaggagcatgcgatgtaagatgttgctgtgaccaggagtgttcctccaacctgacaaccctttttcggcgaagctgtttcaccggcgtctttgggggagatgtgaatccacctttcgatcagctgtgctcagcagggactaccaccaggggagtcccagattggtttccgttcctttgcgtgcagagtcctctagcaaacacaccctttctcggatatttctaccatggcgcggtttctcctaagcaggattcctccttcgaagtgtatgtggacacagacgcgaaggacttcgctgacttcgggtacaagcagggggacccgattatgacagttaaaaaggcgtacttcactattccgcaggtgtctctcgcaggacagtgcatgcagaacgctcccgtggcctttttgcacaatttcgatgtcaaatgtgtaactaacctggagctgtaccaggaacgcgatggcatcattaacgcaaagattaagaatgtggcacttggggggattgtgacccccaaagttatttacgaggaggcaaccgacctcgacaagttcattacgaataccgagaccccactgaacaacgggagcacccctcgtatcgtcaacgtcgaggaacactacatcttcaagtggaataacaacacgatctcggaaattaacgtgaaaattttcagagccgagatcaacgctcatcagaaagggatcatgacacagcgatttgtggtgaaattcctgagctacaacagtgggaatgaagaggagttatctggtaaccctgggtatcagcttggcaagcctgtgagggcgttgaatattaacaggatgaataacgtcaccacccttcacttgtggcaatctgcgggacggggcctctgcacatccgccacgtttaagcccatcttatttggggagaacgttctgagtggatgcctcctggaggtgggcatcaacgagaattgtacccagctaagggagaacgccgtggagagattggactcattgatccaagctacacatgttgcgatgcggggaaacagcgactacgccgatctgtctgatggctggttagaaatcattcgggtggacgctcccgaccctggagcggacccactagcctcctcagtgaatggaatgtgtttggacataccggcgcacctgtccatccgtatcttaatatcagatgccggggctgttgaagggatcacccagcaggaaatccttggagtagagacgcgtttttcaagcgtgaattggcagtatcagtgcggccttacttgtgaacacaaggccgaccttcttcccattagcgccagcgtgcagttcatcaaaattcccgcccagctgcctcaccctctcactcgattccagatcaattatacagagtacgactgtaacaggaacgaagtctgttggccacagttattgtacccatggacccagtattaccagggggagttgcactcgcaatgcgtggcaaaagggctgcttctgctgctattcctcactctggctctcttccttagcaacccatggacacgaatatgcaaggcctatagctag

SEQ ID NO: 216933 - DNA, 2094 bp, Artificial Sequence
  derived and/or modified sequence
atgggcttccagcccccagctgccctgctgctgcggctcttcctgctgcagggcatcctgcggctgctgtggggagacctggccttcatcccccccttcatccgcatgagcggccctgctgtgtctgccagcctggtgggggacacagaaggagtgacagtgtccctggccgtgctgcaggatgaagctggcatcctgcccatccccacctgtggggtgctgaacaatgaaacagaggactggagcgtgaccgtcatccctggggccaaggtgctggaggtgacagtgcgctggaagaggggcctggactggtgcagcagcaatgaaacagacagcttcagcgagagcccctgcatcctgcagaccctgctggtgtctgccagccacaacagcagctgcagcgcccacctgctgatccaggtggagatctatgccaacagcagcctgacccacaatgcctctgaaaatgtgaccgtcatccccaaccaggtgtaccagcccctgggcccctgcccctgcaacctgacagctggggcctgtgatgtgcgctgctgctgtgaccaggagtgcagcagcaacctgaccaccctcttcagaagaagctgcttcaccggggtgtttggaggagatgtgaaccccccatttgaccagctgtgcagcgctggcaccaccacccggggcgtgcctgactggttccccttcctgtgtgtgcagagccccctggccaacacccccttcctgggctacttctaccacggggctgtgagccccaagcaggacagcagctttgaggtgtatgtggacacagatgccaaggactttgctgactttggctacaagcagggcgaccccatcatgacagtgaagaaggcctacttcaccatcccccaggtgtccctggccggccagtgcatgcagaatgcccctgtggccttcctgcacaactttgatgtgaagtgtgtgaccaacctggagctgtaccaggagagagatggcatcatcaatgccaagatcaagaatgtggccctgggcggcatcgtgacccccaaggtgatctatgaggaggccacagacctggacaagttcatcaccaacacagagacccccctgaacaacggcagcaccccccgcatcgtgaatgtggaggagcactacatcttcaagtggaacaacaacaccatcagcgagatcaacgtgaagatcttccgggcagagatcaatgcccaccagaagggcatcatgacccagagatttgtggtgaagttcctgagctacaacagcggaaatgaggaggagctgagcggcaaccctggctaccagctgggcaagcctgtgcgggccctgaacatcaacaggatgaacaacgtgaccaccctgcacctgtggcagagcgctggccggggcctgtgcaccagcgccaccttcaagcccatcctgtttggagaaaatgtgctgagcggctgcctgctggaggtgggcatcaatgaaaactgcacccagctgagagaaaatgctgtggagcggctggacagcctcatccaggccacccacgtggccatgaggggcaacagcgactatgctgacctgagtgatggctggctggagatcatccgggtggatgccccagaccccggggctgaccccctggccagctctgtgaatggcatgtgcctggacatcccagcccacctgagcatccgcatcctgatcagtgatgctggagctgtggagggcatcacccagcaggagatcctgggcgtggagacccgcttcagctctgtgaactggcagtaccagtgtggcctgacctgtgagcacaaggctgacctgctgcccatcagcgcctctgtgcagttcatcaagatcccagcccagctgccccaccccctgacccgcttccagatcaactacacagaatatgactgcaacagaaatgaggtgtgctggccccagctgctgtacccctggacccagtactaccagggcgagctgcacagccagtgtgtggccaagggcctgctgctgctgctcttcctgaccctggccctcttcctgagcaacccctggacccgcatctgcaaggcctacagctag

SEQ ID NO: 216934 - DNA, 2094 bp, Artificial Sequence
  derived and/or modified sequence
atgggcttccagccccccgccgccctgctgctgcggctgttcctgcttcaagggatactgcgcctgctgtggggggacttggctttcataccacctttcataaggatgtctgggccagccgtctccgccagtctggtgggagatacagagggtgtcactgtttcccttgcagtcctgcaggacgaggcaggtattctgcctatcccaacctgtggagtcctgaacaacgagaccgaggactggtccgtcacggtcataccgggagccaaagtacttgaggtcaccgttcggtggaagagagggttggactggtgctctagtaatgagaccgactcttttagtgaatccccttgcatcctccaaacactgcttgtatcagcttcccataatagttcatgttcagctcaccttcttattcaagtcgaaatctatgcaaacagctcacttacacacaatgcctccgaaaacgtcaccgtcatccctaaccaggtctaccagcctctgggcccatgtccgtgtaatctgaccgcgggtgcatgtgatgtgcgttgctgttgcgaccaggaatgctcttccaacctgactacactttttcggaggagctgctttaccggcgtgttcggaggcgatgtaaaccctccattcgaccagctgtgttccgcagggactaccacaagaggggtcccagattggttccctttcctttgtgttcagtcaccactggctaatacgccttttctcgggtacttctatcacggtgccgtgtcccccaaacaggatagctcttttgaagtctatgtggataccgacgccaaagactttgcggacttcggctacaaacagggcgaccccatcatgacggtaaaaaaggcctactttaccatcccacaggtgagcttagccggccagtgtatgcagaatgcaccagtcgccttcctccataacttcgacgttaaatgcgttaccaatctggaactatatcaggaaagggatgggattatcaatgccaagattaaaaatgttgccctcggcgggatagtgacacccaaagttatatacgaggaggcaactgacctcgataaatttatcaccaacaccgagaccccccttaacaacgggtctaccccccgcatcgtaaacgtggaggagcattatattttcaagtggaataacaacactataagcgaaatcaatgtgaagattttccgagctgagattaacgcgcaccagaaaggtatcatgacacagcgcttcgttgtgaagtttttgtcttacaatagtggtaacgaagaggagctgagcggcaatccgggataccagctcggtaagcccgtgcgcgcactgaatataaataggatgaataacgttactaccttgcacttgtggcagtccgcaggtcgcggcctatgcacatccgccactttcaaaccaatccttttcggcgaaaatgtgctgagcggttgcctgcttgaggtcggtatcaatgagaattgcacccagctacgcgagaacgccgtggagagattggactctctaatccaagccacacatgtcgctatgaggggaaatagcgattatgccgacctgagtgacgggtggctggagatcattcgtgtggacgcgcctgatccaggcgcagacccccttgctagcagtgtcaacgggatgtgcttggatatcccggcacacctgtcaattcgtatactgatctctgacgccggcgccgtggaggggatcacgcagcaggaaattttgggtgtggagactaggttctcctctgttaattggcaataccaatgcggactgacttgtgaacataaggctgacctccttccgatatccgccagcgtgcagtttattaagattccagcacagctgccacaccctttgactcggttccaaattaattacactgaatacgattgcaacagaaacgaggtctgctggccacagttactgtatccatggacacagtactaccagggcgaacttcattcacaatgcgtggcaaagggcctgcttttgctgctgtttcttacactggccctgttcttgtccaatccatggacgcggatctgtaaagcctacagttag

SEQ ID NO: 216935 - DNA, 2094 bp, Artificial Sequence
  derived and/or modified sequence
atgggctttcagcctcctgccgctctcctgcttcgcctctttttactgcaaggtattctgcgacttctgtggggagacttggcgttcatcccaccgttcattagaatgagcggccctgcagtcagtgcctccctggtaggggatactgagggcgtgacagtttcactcgcagtgctgcaggacgaggccggaatcttgcccattcctacctgcggtgtgctcaacaacgaaactgaggactggagcgtgaccgtgattcctggtgccaaagtgctggaggtcactgtgaggtggaaaagagggctggattggtgcagttctaacgaaactgactcattctcggagtccccctgtatcctccagacactgttggtgtccgccagtcacaactcaagctgctccgcccaccttctcattcaagtggaaatctatgccaactcaagtctgacacataacgcgagcgagaacgttaccgttatccctaaccaggtataccaaccactgggcccttgtccgtgtaatctcacggctggcgcatgcgacgtgcggtgctgctgtgaccaggagtgttcttcaaatctgactacacttttcagacggtcatgttttactggggtttttggtggagacgtcaacccaccttttgatcaactgtgcagtgctgggacaaccacccggggtgtgcctgattggttccccttcctttgcgtgcagagtcctttggcaaacaccccctttctcggctacttttaccatggggctgtgagcccaaaacaagacagtagcttcgaagtctacgttgacaccgacgccaaagacttcgccgacttcggctacaaacagggtgaccctataatgaccgtcaagaaagcatactttactatcccccaagtgagcttagcgggtcagtgcatgcagaacgccccagtcgccttcctgcataactttgacgtcaagtgtgtgactaacttagagctataccaggaaagagatggtattatcaacgccaagatcaaaaatgtcgccctcggaggcattgttacaccaaaggtgatttacgaagaggccactgacctagataaattcattactaacaccgaaacaccccttaacaacggttctacaccgaggattgtgaatgttgaagagcattacattttcaagtggaacaacaatactataagcgaaattaacgtgaaaattttccgggcagagatcaatgcccatcagaagggaattatgacacaaagattcgtggtgaaattcttatcttacaacagcggcaatgaagaggagctttccggcaatccgggataccaacttggcaagcctgttcgagcactcaatattaaccgcatgaacaatgtaacaaccttacacctctggcagtccgccggtaggggcctgtgtactagcgccacttttaagcctatattatttggagaaaatgtacttagcggctgccttctggaggtgggaattaatgaaaattgtacccagctgcgcgaaaatgccgtggagcgattagacagtctgatccaggcaacacacgtggctatgcgagggaattctgactatgccgacttatctgatgggtggctcgagattatccgagtggacgcccctgaccctggggctgatcctcttgcatcatctgtgaatggcatgtgccttgatatccctgcgcatttaagtatccgcatcctgatcagcgatgccggagccgtagagggaataacacagcaggaaatactgggcgtcgaaacacggttcagctcagtgaactggcagtaccaatgcgggctgacctgtgagcacaaggccgaccttcttcctatttctgcctctgtgcagttcatcaaaattccagcgcagttaccacaccccctaactagatttcagattaactatactgagtatgattgcaaccgaaacgaagtgtgttggccacaactcctgtacccctggacacagtactaccaaggtgagcttcactcacaatgcgtggcgaaaggcctgttgctccttctgttccttactttggccttattcctctccaatccatggaccaggatttgcaaggcatacagttag

SEQ ID NO: 216936 - DNA, 2910 bp, Artificial Sequence
  derived and/or modified sequence
atagctccgggcgttcgcttgcaagatggcggcggcggggcagtggctgctgcgttttcgtgtctgagtccttcctgggttctaatgagggcgcggttctgctgtgcccggcccgcgaggtctaaggcatgggcttccagcctccggccgctcttcttttgaggcttttccttctgcagggcatcctgaggcttctgtggggggacctggctttcatccctccttttatccgaatgtccggccctgcggtcagcgcgtccctggtcggagacaccgagggtgtgaccgtgtccctggcagtgctgcaggacgaggcgggaatattgccaattccgacgtgtggagtgctgaacaatgagacggaagactggagcgtgactgtgatccccggtgcgaaggtgttggaagtgacagtgaggtggaagagaggtctggactggtgttcctccaatgagacagattccttctcagagtccccctgtatcctccagacccttctggtttcagcatctcataattcatcctgttcagcacatctactcattcaagtggaaatttatgccaactcttctctgacccataatgcctcagagaacgtgactgtcattcctaaccaggtgtatcagccccttggcccttgtccttgtaatttaacagctggagcctgtgatgttcgctgctgctgtgaccaggaatgctcatcaaatttaacaacgctgttcagacggtcctgcttcaccggcgtgtttggaggagacgtcaatcctccttttgatcagctctgctctgctgggacgacgacacgtggtgtccccgattggtttccctttctgtgtgtgcagtccccccttgccaacacacccttccttggttacttctatcatggtgctgtttcccccaaacaggactcttcctttgaagtatatgtggatactgacgcaaaagactttgcagactttggttacaaacaaggagatcccattatgactgtaaagaaggcatattttactattccgcaggtgtccctggctgggcagtgtatgcagaacgccccagtggcatttcttcacaattttgatgttaaatgcgttactaatttggaactataccaagaacgagatggtattatcaatgcgaagataaagaatgttgccttaggaggcatagttacaccaaaagtgatctatgaggaagcaactgacctagacaaattcatcaccaatacagaaactcctttaaataacggatcaacccctagaattgtgaatgtggaagaacattatattttcaaatggaataataataccatcagtgaaataaatgttaaaatttttagggcagagattaatgcccaccagaaagggataatgacacagagatttgtagtaaaatttttaagctataatagtggtaatgaagaagaattatctggaaatccaggttaccaacttggcaagcctgtccgagctctaaatatcaacaggatgaataatgtcacgactttacatctttggcaatcggctggaaggggtctgtgtacatcagcaactttcaaacccattttatttggagaaaatgtactctctggatgcctgttagaagtcgggattaatgaaaattgtactcagctcagggagaatgctgttgaaagacttgattcattaatacaagcgactcacgttgcaatgagaggcaactccgattacgctgatcttagtgatggctggctcgaaataatacgtgtagatgcccctgatccaggtgcagacccgctggctagcagtgtgaacggcatgtgcctggatattcctgctcacctgagcatccgcatcctcatctcggatgctggcgcggtggaagggattactcagcaggagatactcggtgtagagacaaggttctcctcagtgaactggcagtaccagtgtgggcttacctgtgagcacaaggccgaccttctccctatcagtgcatccgtccagtttattaaaattcctgcacagttaccccaccccctgacaagattccagatcaattatacagagtatgactgcaacagaaatgaggtgtgttggccgcagcttctatatccatggactcagtattatcaaggggagctgcattctcagtgtgttgctaagggcttactgttgctgttgttcctcacattggccttgttcctcagcaacccctggaccagaatatgcaaagcctatagttagacaaccacctggcttttatttttttgagatggagttttgctcttgttgcccaggctgaagtgatctcggctcaccacaacctcctcctcttgggttcaagcgattctcctgcctcagcctccggagaactgggattacaggcatgcaccaccacgcccggctaattttgtatttttagtagagacagggttccaccgtattggccaggctgctctcgaactcctgacctcatgatccgcccatcttggcctcccaaagtgctgagattacaggcatgagccaccgcacccggcctttttttttttttttttttttttgaggcggggtctctgtcacccaggctggagtgcagtgcacaatctcggctcactgcaatctctgcctcccaagcaatcctcccacctcagcctctggtgtagctgggaccacagatgctccaccatgcctggctgtatttttggtaaagacggggtttcgccttgttgcccagggtggtctgtaactcctgagctcagatgatctgcccacctcggcctcccaaagtgctgggatcacagacgtgagccactgcgtccggtccatctgacttctcaaagactttagaccttgacttcagtgatttgttgtagtcttgtatgcttctctataaaattttaataaatgaaatgtcttatttttgtagaaaatt

SEQ ID NO: 216937 - protein, 514 aa, Artificial Sequence
  derived and/or modified sequence
MGRPESAGGGSRGPFEGGGRARRAGGIFLTLSILRTRDLPSGAMSEGVDLIDIYADEEFNQDPEFNNTDQIDLYDDVLTATSQPSDDRSSSTEPPPPVRQEPSPKPNNKTPAILYTYSGLRNRRAAVYVGSFSWWTTDQQLIQVIRSIGVYDVVELKFAENRANGQSKGYAEVVVASENSVHKLLELLPGKVLNGEKVDVRPATRQNLSQFEAQARKRECVRVPRGGIPPRAHSRDSSDSADGRATPSENLVPSSARVDKPPSVLPYFNRPPSALPLMGLPPPPIPPPPPLSSSFGVPPPPPGIHYQHLMPPPPRLPPHLAVPPPGAIPPALHLNPAFFPPPNATVGPPPDTYMKASAPYNHHGSRDSGPPPSTVSEAEFEDIMKRNRAISSSAISKAVSGASAGDYSDAIETLLTAIAVIKQSRVANDERCRVLISSLKDCLHGIEAKSYSVGASGSSSRKRHRSRERSPSRSRESSRRHRDLLHNEDRHDDYFQERNREHERHRDRERDRHH

SEQ ID NO: 216938 - protein, 471 aa, Artificial Sequence
  derived and/or modified sequence
MSEGVDLIDIYADEEFNQDPEFNNTDQIDLYDDVLTATSQPSDDRSSSTEPPPPVRQEPSPKPNNKTPAILYTYSGLRNRRAAVYVGSFSWWTTDQQLIQVIRSIGVYDVVELKFAENRANGQSKGYAEVVVASENSVHKLLELLPGKVLNGEKVDVRPATRQNLSQFEAQARKRECVRVPRGGIPPRAHSRDSSDSADGRATPSENLVPSSARVDKPPSVLPYFNRPPSALPLMGLPPPPIPPPPPLSSSFGVPPPPPGIHYQHLMPPPPRLPPHLAVPPPGAIPPALHLNPAFFPPPNATVGPPPDTYMKASAPYNHHGSRDSGPPPSTVSEAEFEDIMKRNRAISSSAISKAVSGASAGDYSDAIETLLTAIAVIKQSRVANDERCRVLISSLKDCLHGIEAKSYSVGASGSSSRKRHRSRERSPSRSRESSRRHRDLLHNEDRHDDYFQERNREHERHRDRERDRHH

SEQ ID NO: 216939 - DNA, 1545 bp, Artificial Sequence
  derived and/or modified sequence
atgggtcgacccgaaagtgcggggggaggaagtagaggcccattcgaaggaggagggcgtgccagacgagcaggtgggatttttctcactctgagtattttgcggacccgagacctgccatcaggggcaatgtcggagggggtcgatctgatcgacatctacgccgatgaggaattcaaccaagatcccgagttcaataatacagaccagatagacctgtacgacgacgtgcttacagccacttcacaaccaagcgacgacaggtccagcagcactgagcctccgcctcctgtccggcaggagccctcccctaaacccaataataagacgcccgcgattctgtatacctacagtggacttaggaaccggagagcagctgtttacgtcgggagcttttcatggtggaccaccgaccagcaacttatccaagtgatcaggtcaattggagtttacgacgttgtggagttgaaattcgctgaaaacagggctaacggacagtctaaagggtacgctgaagtggtcgtagcatccgagaacagcgttcataagctactagaactactgcccggcaaggtactgaacggcgagaaggtagatgttagaccggccacaagacagaatctgtctcagttcgaggcccaagcacgtaagcgggaatgtgtcagagtgcccagaggcggtatacctccacgtgcccactcaagagattcctccgattccgcagatggcagggctacgccctctgagaacctggttccatcgtctgcccgggtcgataagccacccagcgtccttccatacttcaacagaccgcctagtgctctcccacttatgggtttaccgccaccccccatcccccccccccctccgctatccagctcatttggcgtcccccccccgcctcctgggattcattaccaacatctgatgccccccccacctaggctcccgccacacctcgctgtgcccccgcccggcgccattccacccgccctgcacttgaatcctgctttctttcctccccctaacgccaccgtagggcctcctcctgatacatatatgaaagcgagcgcgccttacaatcatcatggcagccgggacagcgggccacccccttcaacagtctcagaagcagaattcgaggatattatgaaacgcaacagggcgatctcatccagcgccatttccaaggccgtatctggagctagcgccggggattatagcgatgccatcgagactcttctgaccgccatcgcggttatcaagcagtccagggtggcaaatgatgagcggtgccgagtgctgattagttccctcaaggattgtcttcacgggattgaggccaaaagctactccgtcggtgcgtcagggtctagctctaggaagcggcatcggagccgcgaaagatcaccatcaagaagccgggaatcttctcgacgccaccgggatctccttcacaacgaggatcgccatgatgactatttccaagaaaggaacagagagcatgaacggcacagggaccgggagagagacaggcatcattag

SEQ ID NO: 216940 - DNA, 1545 bp, Artificial Sequence
  derived and/or modified sequence
atgggccggcctgagagcgctgggggcggcagccggggcccctttgaaggaggcggccgggcccggcgggccggcggcatcttcctgaccctgagcatcctgcggacccgggacctgcccagcggggccatgtctgaaggagtggacctgattgacatctatgcagatgaggagttcaaccaggaccctgagttcaacaacacagaccagattgacctgtatgatgatgtgctgacagccaccagccagcccagtgatgacaggagcagcagcacagagcccccacctcctgtgcggcaggagcccagccccaagcccaacaacaagaccccagccatcctgtacacctacagcggcctgaggaacagaagagctgctgtgtatgtgggcagcttctcctggtggaccacagaccagcagctgatccaggtgatccgcagcattggagtgtatgatgtggtggagctgaagtttgctgagaacagagccaacggccagagcaagggctatgcagaggtggtggtggccagcgagaacagcgtgcacaagctgctggagctgctgcccgggaaggtgctgaatggagagaaggtggatgtgcggcctgccacccggcagaacctgagccagtttgaggcccaggccaggaagagagaatgtgtgcgggtgccccggggcggcatccccccccgggcccacagccgggacagcagtgacagcgcagatggccgggccacccccagcgagaacctggtgcccagcagcgcccgggtggacaagcccccatctgtgctgccctacttcaacagacctccttctgccctgcccctgatgggcctgcccccaccacccatccccccacctccacccctgagcagcagctttggagtgcccccacctcctcctggcatccactaccagcacctgatgcctcctccaccccggctgcccccccacctggccgtgcccccacctggggccatccccccagccctgcacctgaacccagccttcttccccccaccaaatgccaccgtgggccccccaccagacacctacatgaaggccagcgccccctacaaccaccacggcagccgggacagcggccccccacccagcacagtgtctgaggccgagtttgaggacatcatgaagaggaacagagccatcagcagcagcgccatcagcaaggctgtgtctggggccagcgctggggactacagtgatgccatcgagaccctgctgacagccatcgctgtgatcaagcagagccgggtggccaatgatgagcgctgccgggtgctgatcagcagcctgaaggactgcctgcacggcatcgaggccaagagctacagcgtgggcgccagcggcagcagcagcaggaagaggcacaggagccgggagaggagccccagccgcagccgggagagcagcagaagacaccgggacctgctgcacaatgaagatagacatgatgactacttccaggagaggaaccgggagcacgagcggcaccgggaccgggagcgggacagacaccactag

SEQ ID NO: 216941 - DNA, 1545 bp, Artificial Sequence
  derived and/or modified sequence
atgggccggcccgagagcgccggcggcggcagccggggccccttcgagggcggcggccgcgcacgtcgcgctgggggtatcttcttaaccctgtcgattctgagaactagggaccttccctcaggagcaatgagcgagggcgtcgatctgatcgatatctacgctgacgaggagtttaatcaggaccctgagttcaataatacggatcagattgatttgtacgatgacgttttgactgccacttctcagccatctgacgaccggtctagcagcactgagccacctccgcccgttagacaggagccctcccctaagccaaacaataagacaccagccatcctttatacctatagcggactccggaataggagggctgcagtgtacgttggtagcttctcctggtggactaccgatcaacagctgatacaggttattcggagcatcggggtttacgacgttgtggaactcaaatttgcagaaaaccgggcgaatggtcagagtaaagggtatgctgaagttgttgtggcgagcgaaaatagtgtccacaagctgcttgagctcctccccggtaaggttctcaatggggaaaaagtcgatgtgcgaccagccaccagacagaatttatctcagttcgaagcccaggcccgaaaaagggaatgtgttcgggtgccgcgcggcggaattcccccgcgcgcgcactcacgggattcctcggactccgccgacggccgtgctaccccttcggaaaaccttgtgccatcgagtgcaagggtggacaaacctccaagcgtgctgccatatttcaatcggccgccctcagctctaccattgatggggttacctcccccgcccatcccaccacctccccctctgtcttcaagttttggagttccaccgcccccacccggcatccactatcaacacttaatgcccccccccccgcgcctgcctcctcacctggcggttcctccccccggggccattcccccagcccttcatctcaacccagcttttttcccaccgccaaacgccaccgttgggccgccccctgatacttacatgaaggcaagcgccccttacaatcaccacggttcacgcgactccggaccacctcctagtaccgtgagcgaagctgagttcgaggatatcatgaagagaaacagagcaatctccagttcagccatctcaaaagccgtgtcaggcgctagcgccggcgactattcagatgcaatagaaactctgctcacggccattgccgtaattaagcagtcccgtgtagcaaatgacgaaagatgccgcgtcctgatctctagcctcaaagattgcctccacggtatcgaagctaaaagctatagcgtcggcgcatctggttcaagcagccggaaaaggcataggagcagggaaaggtcccctagccgaagtagggagtctagtaggcggcaccgggatctgctccataacgaggacaggcacgatgactacttccaagagcgtaaccgcgaacacgagcgccatcgagaccgtgaacgagacaggcaccattag

SEQ ID NO: 216942 - DNA, 1545 bp, Artificial Sequence
  derived and/or modified sequence
atgggccgtccagaaagtgctggaggtgggagccgcggaccgttcgagggaggagggcgtgctcgcagagccggaggtattttcctgacactcagcatcctgcgaacacgcgatttacctagcggagcaatgagtgagggggtcgacctgattgacatatacgccgacgaagagttcaaccaggatcctgagtttaataatacagaccagatcgacctctacgatgatgtattgacggccacctcccagccatctgatgatcggagttcaagcaccgagccgccaccacccgttcgtcaggagccaagtcccaagccaaataataagaccccggcaatattatatacctattctggactgagaaatcgcagagctgcagtttacgtcggatcattctcatggtggacaaccgaccagcagctcatacaggtgattaggtctattggggtgtatgacgtggtcgagcttaagttcgctgagaatagagctaacgggcagtcaaaggggtacgccgaagtagtggtcgcaagcgagaactccgttcacaagctcttggagctgttgcctggcaaggtccttaatggtgaaaaggttgatgtgcgtccagcaacaagacaaaatctgtctcagttcgaggcacaggcacgcaagagggaatgcgtgcgggtgcctagaggtggtatacccccacgggcacatagcagggattccagcgattccgcggatgggagggccaccccttccgaaaatctggtcccttcgtctgcaagagtggacaagcccccttctgtgctgccgtactttaatagacctccctccgcattgcctcttatgggtctccctccgccaccgatcccgccacctcccccattaagttcatccttcggggtacctccacccccacctgggatacattatcagcacctgatgcctccaccacccaggctcccacctcaccttgccgtgccaccccctggggctattcctccggcactgcaccttaacccagcattttttcctccgccaaatgccaccgtgggccctccgccagacacctatatgaaagcttctgcgccatataaccatcacgggtcgagagattctggccctccaccctccacagttagcgaagccgaattcgaagatatcatgaaaaggaatcgcgcaatctcctcctcggccatctcaaaagcggtttctggcgctagtgcaggagattactccgacgccattgaaactctcctcaccgccatagcggtcataaaacagagcagagttgcgaatgacgagcgatgtagagtgctgatttcaagcctgaaggattgcctgcacggaattgaagccaagtcctactccgtcggggcaagcggcagctcgagcagaaaacgccatcgctctagggaaaggtcacccagtaggagcagggagtcctcgagacggcatcgagatctgcttcacaatgaagataggcatgatgattatttccaggaaaggaaccgagagcatgaacggcacagagaccgcgagagagatcgacatcattag

SEQ ID NO: 216943 - DNA, 3687 bp, Artificial Sequence
  derived and/or modified sequence
aacgggggcgcgcggtcgggggcaggttgggccggaagaggggtccgggccggcactgaggcgggaagggggtcggttgagatgggacggccggagtctgcgggcggagggagtcgcgggccttttgagggaggaggcagagcgcgccgggccggtggcatcttccttactttgtccatcctccggactcgcgatcttccttccggagccatgtcagaaggagtggacttgattgatatatatgctgacgaggagttcaaccaggacccagagttcaacaatacagatcagattgacctgtatgatgatgtgctgacagccacctcacagccctcagatgacagaagcagcagcactgaaccacctcctcctgttcgccaggagccatctcccaagcccaacaacaagacccctgcaattctgtatacctacagtggcctgcgtaatagacgagctgccgtttatgtgggcagcttctcctggtggaccacagaccagcagctgatccaggttattcgctctataggagtctatgatgtggtggagttgaaatttgcagagaatcgagcaaatggccagtccaaagggtatgctgaggtggtggtagcctctgaaaactctgtccacaaattgttggaactcctaccagggaaagttcttaatggagaaaaagtggacgtgaggccggccacccggcagaacctgtcacagtttgaggcacaggctcggaaacgtgagtgtgtccgagtcccaagagggggaatacctccacgggcccattcccgagattctagtgattctgctgatggacgggccacaccctctgagaaccttgtaccctcatctgctcgtgtggataagccccccagtgtgctgccctacttcaatcgtcctccttcggcccttcccctgatgggtctgcccccaccaccaattccacccccaccacctctctcctcaagctttggggtccctcctcctcctcctggtatccactaccagcatctcatgcccccacctcctcgattacctcctcatcttgctgtacctccccctggggccatcccacctgcccttcacctcaatccagccttcttccccccaccaaacgctacagtggggcctccaccagatacttacatgaaggcctctgccccctataaccaccatggcagccgagattcgggccctccaccctctacagtgagtgaagccgaatttgaagatatcatgaagcgaaacagagcaatttccagcagtgccatttccaaagcagtatctggagccagtgcaggggattacagtgacgcaattgagacgctgctcacagccattgcggttatcaaacagtcccgggttgccaatgatgagcgttgccgtgtcctcatctcctctcttaaggactgtcttcatggcatcgaagccaagtcctacagtgtgggtgccagtgggagctcttccaggaaaagacatcgctcccgggaaaggtcacctagccggtcccgggagagcagcaggaggcaccgggatctgcttcataatgaagatcggcatgatgattatttccaagaaaggaaccgggagcatgagagacaccgggatagagaacgggaccggcaccactgagaaaggagtctggttggaagcaaatgtttttttaatggacttgcatctcctcaccttgatcaggactaaaggacggaggccgccccacccccttccctttcctccaaacccctaactccctccagacacccagggaataccctctgccccacaggattgaagactgcttggcagtcctcccaatcccacacctcctgtttgccaggggaaagaacctaaagacttcgtgtgattgggaggggtggcagacaggaagaaaacatgtccaggcccctggtctccatagagaatggtgctttgtccaagaaaacgtatgagtttctgattctccgggagccgttcaatggtgaggttgatgggaagacttccttcccaaagaaaatagatcctccatgcaggatctaggagagtgactgggtgtgccaaaatatgcccagggtcctgccctcagcactagatttaatggggccaagagggtccaaaccccttgctaacataccacttctttgtttaactcctttacctttccagccctttgaggagggaccatgagaacagaaattaccttatgaaaagctacttctgttcctgctttccctctcacgtattgacggtttatttctttgacctcccagagggctgaactctttcaactctgcgctgcccagccttctcagtggacttgcccctcctaagcagagaaggcctatgaggttgcttgctgctgggaagcctggcagagccaattaccaccctctgctgcttagtgcttgggtacctcttgcaataaccagctcttagttgttccctttccctggggcttttccatttaacacatggagcccttcccccagaaggctacttccttgttttagaggaaggtactgcccattgggagatggggacattgggacctcagcaatgaagaacccttgtgaagtaaccaggaggaatggggaaagaagcaagttgggcaggatatggcctacttccataggcttttcttttttcaggtttgatgtaagcatgggcttacatcccccaggtacatacttttacttattgtgggataacctggcactagtaggcaggtaaagtcacaaatttggtgtcttttcaccttttgactgttgacttaatagctcctctcactctgcctggagatacttcctgcctcagatgaggagccagaagaaacagagcccgacttgaatgaactcagctcagagttctaaggaccagcattctgggggccattttctctacaggcaaatggaattgcttttccataacatccaaattgtaatgtggttgctgctgaaggaggaggcagcagcgaggtcctgcggtacccatggggtgatgctacttctgcatgcatctacagggcatctgacacctaacatgagacgtggcatgtgagatgagacttggcatgtgagacatagggtcactagagacccttctgggtcagaggagagagactgaattggactaaacccgtcctctgttcccagcacgtttctcatatagccctcagtcactgagggagtcccccgcaggattggagaggcacattcccttgggacagaggctacaggttggagctttttttcccctgtcccccaaccccatccccacctccacttcagaacatggcaccccacccaactggccaagtgttaagtgatgtgcttattgagagcaactccgggtgtcttttaaaatgtagagaaaaggtgacagtttaaggaaaaatatatatagaataccagaaatgccgtttacccggagaatttttttctccccatttgttttgtttttactcaatgacaccatttttagttttatttcctgatagcaaaaggaaaaaaaacacccatccctcaaaaaggccaaggtcccgtccccctgttgtcggtgatttgtttgtctttctgataggttgaaaattgtgtaataaacttgatgacgctgtcaatcttttatactgcattgtatttttttccttttgtaacaaaatatttttaaataataaatggggtgtgagctgttttatgg

SEQ ID NO: 216944 - DNA, 3650 bp, Artificial Sequence
  derived and/or modified sequence
atgccggaagtggcggtgcgtgtgacgccggcggcggggggggcgggacctggggcggagagcggttcgcgcgcttcgggcctagtccggactcgccgccgccgccgccatattcccgtggcatcttccttactttgtccatcctccggactcgcgatcttccttccggagccatgtcagaaggagtggacttgattgatatatatgctgacgaggagttcaaccaggacccagagttcaacaatacagatcagattgacctgtatgatgatgtgctgacagccacctcacagccctcagatgacagaagcagcagcactgaaccacctcctcctgttcgccaggagccatctcccaagcccaacaacaagacccctgcaattctgtatacctacagtggcctgcgtaatagacgagctgccgtttatgtgggcagcttctcctggtggaccacagaccagcagctgatccaggttattcgctctataggagtctatgatgtggtggagttgaaatttgcagagaatcgagcaaatggccagtccaaagggtatgctgaggtggtggtagcctctgaaaactctgtccacaaattgttggaactcctaccagggaaagttcttaatggagaaaaagtggacgtgaggccggccacccggcagaacctgtcacagtttgaggcacaggctcggaaacgtgagtgtgtccgagtcccaagagggggaatacctccacgggcccattcccgagattctagtgattctgctgatggacgggccacaccctctgagaaccttgtaccctcatctgctcgtgtggataagccccccagtgtgctgccctacttcaatcgtcctccttcggcccttcccctgatgggtctgcccccaccaccaattccacccccaccacctctctcctcaagctttggggtccctcctcctcctcctggtatccactaccagcatctcatgcccccacctcctcgattacctcctcatcttgctgtacctccccctggggccatcccacctgcccttcacctcaatccagccttcttccccccaccaaacgctacagtggggcctccaccagatacttacatgaaggcctctgccccctataaccaccatggcagccgagattcgggccctccaccctctacagtgagtgaagccgaatttgaagatatcatgaagcgaaacagagcaatttccagcagtgccatttccaaagcagtatctggagccagtgcaggggattacagtgacgcaattgagacgctgctcacagccattgcggttatcaaacagtcccgggttgccaatgatgagcgttgccgtgtcctcatctcctctcttaaggactgtcttcatggcatcgaagccaagtcctacagtgtgggtgccagtgggagctcttccaggaaaagacatcgctcccgggaaaggtcacctagccggtcccgggagagcagcaggaggcaccgggatctgcttcataatgaagatcggcatgatgattatttccaagaaaggaaccgggagcatgagagacaccgggatagagaacgggaccggcaccactgagaaaggagtctggttggaagcaaatgtttttttaatggacttgcatctcctcaccttgatcaggactaaaggacggaggccgccccacccccttccctttcctccaaacccctaactccctccagacacccagggaataccctctgccccacaggattgaagactgcttggcagtcctcccaatcccacacctcctgtttgccaggggaaagaacctaaagacttcgtgtgattgggaggggtggcagacaggaagaaaacatgtccaggcccctggtctccatagagaatggtgctttgtccaagaaaacgtatgagtttctgattctccgggagccgttcaatggtgaggttgatgggaagacttccttcccaaagaaaatagatcctccatgcaggatctaggagagtgactgggtgtgccaaaatatgcccagggtcctgccctcagcactagatttaatggggccaagagggtccaaaccccttgctaacataccacttctttgtttaactcctttacctttccagccctttgaggagggaccatgagaacagaaattaccttatgaaaagctacttctgttcctgctttccctctcacgtattgacggtttatttctttgacctcccagagggctgaactctttcaactctgcgctgcccagccttctcagtggacttgcccctcctaagcagagaaggcctatgaggttgcttgctgctgggaagcctggcagagccaattaccaccctctgctgcttagtgcttgggtacctcttgcaataaccagctcttagttgttccctttccctggggcttttccatttaacacatggagcccttcccccagaaggctacttccttgttttagaggaaggtactgcccattgggagatggggacattgggacctcagcaatgaagaacccttgtgaagtaaccaggaggaatggggaaagaagcaagttgggcaggatatggcctacttccataggcttttcttttttcaggtttgatgtaagcatgggcttacatcccccaggtacatacttttacttattgtgggataacctggcactagtaggcaggtaaagtcacaaatttggtgtcttttcaccttttgactgttgacttaatagctcctctcactctgcctggagatacttcctgcctcagatgaggagccagaagaaacagagcccgacttgaatgaactcagctcagagttctaaggaccagcattctgggggccattttctctacaggcaaatggaattgcttttccataacatccaaattgtaatgtggttgctgctgaaggaggaggcagcagcgaggtcctgcggtacccatggggtgatgctacttctgcatgcatctacagggcatctgacacctaacatgagacgtggcatgtgagatgagacttggcatgtgagacatagggtcactagagacccttctgggtcagaggagagagactgaattggactaaacccgtcctctgttcccagcacgtttctcatatagccctcagtcactgagggagtcccccgcaggattggagaggcacattcccttgggacagaggctacaggttggagctttttttcccctgtcccccaaccccatccccacctccacttcagaacatggcaccccacccaactggccaagtgttaagtgatgtgcttattgagagcaactccgggtgtcttttaaaatgtagagaaaaggtgacagtttaaggaaaaatatatatagaataccagaaatgccgtttacccggagaatttttttctccccatttgttttgtttttactcaatgacaccatttttagttttatttcctgatagcaaaaggaaaaaaaacacccatccctcaaaaaggccaaggtcccgtccccctgttgtcggtgatttgtttgtctttctgataggttgaaaattgtgtaataaacttgatgacgctgtcaatcttttatactgcattgtatttttttccttttgtaacaaaatatttttaaataataaatggggtgtgagctgttttatgg

SEQ ID NO: 216945 - DNA, 1545 bp, Artificial Sequence
  derived and/or modified sequence
atgggcagacccgagagcgccggcggcggcagcagaggccccttcgagggcggcggcagagccagaagagccggcggcatcttcctgaccctgagcatcctgagaaccagagacctgcccagcggcgccatgagcgagggcgtggacctgatcgacatctacgccgacgaggagttcaaccaggaccccgagttcaacaacaccgaccagatcgacctgtacgacgacgtgctgaccgccaccagccagcccagcgacgacagaagcagcagcaccgagccccccccccccgtgagacaggagcccagccccaagcccaacaacaagacccccgccatcctgtacacctacagcggcctgagaaacagaagagccgccgtgtacgtgggcagcttcagctggtggaccaccgaccagcagctgatccaggtgatcagaagcatcggcgtgtacgacgtggtggagctgaagttcgccgagaacagagccaacggccagagcaagggctacgccgaggtggtggtggccagcgagaacagcgtgcacaagctgctggagctgctgcccggcaaggtgctgaacggcgagaaggtggacgtgagacccgccaccagacagaacctgagccagttcgaggcccaggccagaaagagagagtgcgtgagagtgcccagaggcggcatcccccccagagcccacagcagagacagcagcgacagcgccgacggcagagccacccccagcgagaacctggtgcccagcagcgccagagtggacaagccccccagcgtgctgccctacttcaacagaccccccagcgccctgcccctgatgggcctgccccccccccccatccccccccccccccccctgagcagcagcttcggcgtgcccccccccccccccggcatccactaccagcacctgatgccccccccccccagactgcccccccacctggccgtgcccccccccggcgccatcccccccgccctgcacctgaaccccgccttcttccccccccccaacgccaccgtgggccccccccccgacacctacatgaaggccagcgccccctacaaccaccacggcagcagagacagcggccccccccccagcaccgtgagcgaggccgagttcgaggacatcatgaagagaaacagagccatcagcagcagcgccatcagcaaggccgtgagcggcgccagcgccggcgactacagcgacgccatcgagaccctgctgaccgccatcgccgtgatcaagcagagcagagtggccaacgacgagagatgcagagtgctgatcagcagcctgaaggactgcctgcacggcatcgaggccaagagctacagcgtgggcgccagcggcagcagcagcagaaagagacacagaagcagagagagaagccccagcagaagcagagagagcagcagaagacacagagacctgctgcacaacgaggacagacacgacgactacttccaggagagaaacagagagcacgagagacacagagacagagagagagacagacaccactag

SEQ ID NO: 216946 - protein, 180 aa, Artificial Sequence
  derived and/or modified sequence
MGCGGSRADAIEPRYYESWTRETESTWLTYTDSDAPPSAAAPDSGPEAGGLHSVLEAEKSKIKAPTDSVSDEGLFSASKMAPLAVFSHGMLEDGLPSNGVPRSTAPGGIPNPEKKTNCETQCPNPQSLSSGPLTQKQNGLQTTEAKRDAKRMPAKEVTINVTDSIQQMDRSRRITKNCVN

SEQ ID NO: 216947 - protein, 145 aa, Artificial Sequence
  derived and/or modified sequence
MGCGGSRADAIEPRYYESWTRETESTWLTYTDSDAPPSAAAPDSGPEAGGLHSGMLEDGLPSNGVPRSTAPGGIPNPEKKTNCETQCPNPQSLSSGPLTQKQNGLQTTEAKRDAKRMPAKEVTINVTDSIQQMDRSRRITKNCVN

SEQ ID NO: 216948 - protein, 54 aa, Artificial Sequence
  derived and/or modified sequence
MGCGGSRADAIEPRYYESWTRETESTWLTYTDSDAPPSAAAPDSGPEAGGLHSG

SEQ ID NO: 216949 - DNA, 543 bp, Artificial Sequence
  derived and/or modified sequence
atgggctgtggcggatcccgggccgatgccatcgagcccaggtactacgaatcttggactcgggaaaccgaaagcacctggctgacctatactgacagtgatgcacctccttcggccgccgcgcctgattctggcccagaggcaggcggcctccactccgtacttgaggcagagaaatccaaaatcaaagcgcctacagacagcgttagtgatgaggggctgtttagtgcatccaagatggctcccctggccgttttctcgcacggtatgttggaggacggcctgcccagcaatggcgtaccaaggagtaccgcaccaggaggaatacctaatcccgagaagaaaaccaattgtgagacccagtgccctaacccccagagcctgtcatctggcccactaacgcagaagcaaaacggtctgcagaccacagaagctaagagagatgccaagagaatgccagctaaagaggtcaccattaatgtgacagactccatccagcaaatggatcgttcccgaaggattacaaaaaattgcgtcaattag

SEQ ID NO: 216950 - DNA, 438 bp, Artificial Sequence
  derived and/or modified sequence
atgggctgtggcggctctagagcagacgctattgaacctagatattatgaatcttggaccagagagacagagtctacctggttgacttatacagacagcgacgcccccccttccgccgctgcaccggacagcggccccgaggctggaggccttcacagtggaatgcttgaggatggactcccctctaacggcgtcccccgatcaaccgccccaggaggcattccaaaccccgaaaaaaagaccaactgtgagacgcagtgtccaaacccacagagcctatcgagcggcccactgactcagaaacagaacggacttcagacaacagaggccaaacgggacgcaaaacgcatgcctgccaaagaggtgaccattaacgtgaccgacagcatccagcagatggatagatcccggaggatcactaagaactgcgtgaactag

SEQ ID NO: 216951 - DNA, 543 bp, Artificial Sequence
  derived and/or modified sequence
atgggctgcggcggcagcagagcagatgccatcgagccccgctactatgagagctggacccgggagacagagagcacctggctgacctacacagacagtgatgccccacccagcgctgctgccccagacagcggccctgaggccggcggcctgcacagcgtgctggaggccgagaagagcaagatcaaggcccccacagacagcgtgtctgatgagggcctcttcagcgccagcaagatggcccccctggccgtgttcagccacggcatgctggaggatggcctgcccagcaatggagtgcccaggagcacagcccctgggggcatccccaaccctgagaagaagaccaactgtgagacccagtgccccaacccccagagcctgagcagcggccccctgacccagaagcagaatggcctgcagaccacagaggccaagagagatgccaagaggatgcctgccaaggaggtgaccatcaacgtgacagacagcatccagcagatggacaggagccgccgcatcaccaagaactgtgtgaactag

SEQ ID NO: 216952 - DNA, 438 bp, Artificial Sequence
  derived and/or modified sequence
atgggctgcggcggcagcagagcagatgccatcgagccccgctactatgagagctggacccgggagacagagagcacctggctgacctacacagacagtgatgccccacccagcgctgctgccccagacagcggccctgaggccggcggcctgcacagcggcatgctggaggatggcctgcccagcaatggagtgcccaggagcacagcccctgggggcatccccaaccctgagaagaagaccaactgtgagacccagtgccccaacccccagagcctgagcagcggccccctgacccagaagcagaatggcctgcagaccacagaggccaagagagatgccaagaggatgcctgccaaggaggtgaccatcaacgtgacagacagcatccagcagatggacaggagccgccgcatcaccaagaactgtgtgaactag

SEQ ID NO: 216953 - DNA, 543 bp, Artificial Sequence
  derived and/or modified sequence
atgggctgcggcggcagccgggccgacgccatcgagccccggtactatgaatcatggacacgagaaactgaatccacctggctgacctatacagactcagatgcaccaccatcggccgccgcacccgactcaggtcccgaagcggggggactccactccgtgctagaagcggaaaagagtaaaatcaaggctccaaccgacagcgtatctgacgaggggctgttctcagcaagcaagatggcaccactggccgtcttctcgcacggcatgcttgaggacggcctaccctctaacggagttccccgctcgactgcccccggaggtatccctaatcctgaaaagaagactaattgcgaaacccagtgcccgaacccccagtcactctcatcaggacctctcacccagaaacagaatggtttacaaacaacggaggccaaaagggacgccaagcggatgcctgccaaagaggtgacgatcaacgtcacagatagcatccagcaaatggacaggagtcgaaggattaccaagaactgcgtcaattag

SEQ ID NO: 216954 - DNA, 438 bp, Artificial Sequence
  derived and/or modified sequence
atgggctgcggcggcagccgggccgacgccatcgagccccggtactacgagagctggacaagagaaacagaatctacttggctgacttatactgatagcgatgcacccccaagcgctgccgcccctgattctggccccgaggcgggagggctgcatagcggcatgttggaggatggtctgccttcaaatggggttccacggtctactgcccctggcgggattcccaatcctgaaaagaagaccaattgcgagacccagtgtcccaaccctcaaagtttatctagcgggccactgacacagaagcagaacgggcttcagactacggaagccaagcgtgatgcaaagcgcatgcccgcaaaagaggtgacaatcaacgtgaccgactcgattcagcagatggatagatccaggcgaataacaaagaattgtgtgaattag

SEQ ID NO: 216955 - DNA, 543 bp, Artificial Sequence
  derived and/or modified sequence
atggggtgtggaggtagcagagcggacgcgattgaaccgagatactacgagtcctggacccgggaaaccgaatcgacctggttaacctatactgattcagacgctccccctagtgctgctgcaccagacagtggacctgaggccggtggattacactcggtgttggaagctgagaaatccaagattaaagcgccaacagactctgtgagcgatgaaggcctcttctccgcatccaagatggcgccactcgctgtgttctcacacggaatgctggaggacgggctccctagcaacggagtcccaagaagcacagccccaggcggtatcccaaaccctgaaaaaaagaccaactgcgaaacccagtgtcctaacccccagtctctctcctctggcccactgacccaaaaacagaacgggctgcaaacaactgaagcaaaacgcgacgccaagaggatgccagcaaaggaagttacgattaacgttaccgatagcattcaacagatggaccggtcacggaggataaccaaaaattgcgttaactag

SEQ ID NO: 216956 - DNA, 438 bp, Artificial Sequence
  derived and/or modified sequence
atggggtgcggaggtagtagagccgatgcaatagagccgcgatattatgagtcctggacgcgcgaaaccgagtctacatggctcacttataccgacagcgacgccccaccaagtgccgcagcgcctgacagcggtccagaggcgggagggttacatagtggcatgctggaagacggactgccttcaaacggcgtccccaggagtaccgcgccagggggaatccccaaccccgagaaaaaaaccaattgcgagactcagtgccctaacccacaaagcctgagttcaggtccgctcactcagaaacaaaacggactccagactaccgaggccaagcgggacgcgaagaggatgcctgccaaagaagtgactataaacgtaaccgattctatacaacaaatggatcgatccagacggatcactaagaattgtgtgaactag

SEQ ID NO: 216957 - DNA, 801 bp, Artificial Sequence
  derived and/or modified sequence
gcggctgcagcgcgggcgggagcggggacgcgatgtcgccgccgccgcctccttgcgggccggggctgcgcctccggggctgagccgccgccagagccgacagccgagcagccgctgggcgctcccgcggcgcaggaggatgggctgcggcgggagccgggcggatgccatcgagccccgctactacgagagctggacccgggagacagaatccacctggctcacctacaccgactcggacgcgccgcccagcgccgccgccccggacagcggccccgaagcgggcggcctgcactcggttctggaggctgagaagtccaagatcaaggcaccaacagattcagtgtctgatgaaggcttgttctctgcttcaaagatggcacctcttgctgtgttctcacatggcatgctggaagatggactgccctccaatggtgtgccccgatctacagccccaggtggaatacccaacccagagaagaagacgaactgtgagacccagtgcccaaatccccagagcctcagctcaggccctctgacccagaaacagaatggccttcagaccacagaggctaaaagagatgctaagagaatgcctgcaaaagaagtcaccattaatgtaacagatagcatccaacagatggacagaagtcgaagaatcacaaagaactgtgtcaactagcagagagtccaagcagaagggcagatggacttcttcagtgtccttcacggcactggatcccatcaaagaaccttgaagaagtggctgccccttgctggacctgaattctactgagtccc

SEQ ID NO: 216958 - DNA, 2831 bp, Artificial Sequence
  derived and/or modified sequence
gctgggagagggcccggactaggggcggcgggcaccgcaggagctccgcgcggctgcagcgcgggcgggagcggggacgcgatgtcgccgccgccgcctccttgcgggccggggctgcgcctccggggctgagccgccgccagagccgacagccgagcagccgctgggcgctcccgcggcgcaggaggatgggctgcggcgggagccgggcggatgccatcgagccccgctactacgagagctggacccgggagacagaatccacctggctcacctacaccgactcggacgcgccgcccagcgccgccgccccggacagcggccccgaagcgggcggcctgcactcgggcatgctggaagatggactgccctccaatggtgtgccccgatctacagccccaggtggaatacccaacccagagaagaagacgaactgtgagacccagtgcccaaatccccagagcctcagctcaggccctctgacccagaaacagaatggccttcagaccacagaggctaaaagagatgctaagagaatgcctgcaaaagaagtcaccattaatgtaacagatagcatccaacagatggacagaagtcgaagaatcacaaagaactgtgtcaactagcagagagtccaagcagaagggcagatggacttcttcagtgtccttcacggcactggatcccatcaaagaaccttgaagaagtggctgccccttgctggacctgaattctactgagtccctggcaagactgtcttacctggcagcaaactgctgcctgatttgttgggaccttctgagccttctacttatcatgtaaatgtattggcacagtgcttacatatgttaataaactgcaaatgtgcagttcagtttgtctctttgcaactcctgtaatacggtctggtgtaaaagtagtgagttaaagctacaggtcagtttatgaaacagaaaagtaggaatgcattttctgggtgaaagagtcacaccttagtgctataactctcctgcccatgatagtgtattctgtttcaggcaagcttattctttccttctttcattttaaatattgtcattacaaatcttaccaggttcacttaaaagctggctttcatccaactctaaacccacatattgaaaaaatcaaggtacaggaaaactccttgttatccttgtttccttagcttggtatgagacagatcggatccagtttcccatgcaccaacccactgcccatggcatgtctttgggaggtgtctgtgaagcagtcatacctgctcctcatctgcctggaaagtcctcctattccagtgtccatgttggcctccagtccttaatgtcaccatgcttgtggccaatgcatccaaataaggatacccctcagggctcagctagacattgcaattttgcatagctttccagttccctttgcttgtcttcttgactgtcttccctctctatcggggtcacttgcaattgttaatcaaagattgaacactgcgtaggagagggagatgatccagagacatgtggcagcaggcatggcttccccttggcctctctgtacactgccccaggactgtcattttggcatctgcaaaggaatcactttagaaagccagcacctggttgatgtgtattcatactgacattagattgatgtgcactgcattagaaatgaggtagctgacacagaaaaaggatgttttgataggaataattttctagtatgtcttgaaacatgttcatctggaagtattttcctccaaagtaatgtagcatgatttttcaaggattgttaacatgcctgggattgggaaagataggactaaagttgtgccaaactatatcaataaattccatgtttagcagaaataggcagcctattggtgttatgtttatgtaacatagtccagagaactgacatgcaggtcaaaagtcagatacgcaacctccttatctgctaactctgttattcttcaaacacaagtgggtagtgtcatttttccttccttccttccattggcagattgtatatttattcacaaaacattaaatgtccatcctgtgccaggtactatgcagatgttgagggatttggggtctggttagtcgtgactatctatcctgaatctaacagtgacttcataactaggagactgaattagacccttaaggtatagtgtgtgttgcaaatcactctgcaatggaaacttttatattcagggtaggtttgtgtcttaaactaggtgttctaatcaatgtacaagactttaccatacacgcaactatagtttttctaaaccttcatcattttgtgattctttgagaaagggcttttaggaactttatgttctaaaaaatgtttttaacaataataagataaaagaaaaacctgtgattcatatgtccccactggcattactcagcaggagcccccagctgccaaaggttggcagtgatcctgcaagttcaagggctctttctccctggggatgtgctttgtggcttctctttacagctttgtttctgcatcagttcactgctgcatgttgtttggaatttatcaccttaagaaagtgtctctgttttatatagaaacactttctcacttacaggggagaaggaaatgcagggcacatgatctggccctccccagaacaatctggatttcacggagacagcaaccagaagttaaaccatgtgactaaaaatgcatctggctactttttcatgtatgtatgagacagaaactaatccttactatcctattaggataccacttttcattgcaaagtttgtgtcaataaagtcattaattttaaacat

SEQ ID NO: 216959 - DNA, 543 bp, Artificial Sequence
  derived and/or modified sequence
atgggctgcggcggcagcagagccgacgccatcgagcccagatactacgagagctggaccagagagaccgagagcacctggctgacctacaccgacagcgacgccccccccagcgccgccgcccccgacagcggccccgaggccggcggcctgcacagcgtgctggaggccgagaagagcaagatcaaggcccccaccgacagcgtgagcgacgagggcctgttcagcgccagcaagatggcccccctggccgtgttcagccacggcatgctggaggacggcctgcccagcaacggcgtgcccagaagcaccgcccccggcggcatccccaaccccgagaagaagaccaactgcgagacccagtgccccaacccccagagcctgagcagcggccccctgacccagaagcagaacggcctgcagaccaccgaggccaagagagacgccaagagaatgcccgccaaggaggtgaccatcaacgtgaccgacagcatccagcagatggacagaagcagaagaatcaccaagaactgcgtgaactag

SEQ ID NO: 216960 - DNA, 438 bp, Artificial Sequence
  derived and/or modified sequence
atgggctgcggcggcagcagagccgacgccatcgagcccagatactacgagagctggaccagagagaccgagagcacctggctgacctacaccgacagcgacgccccccccagcgccgccgcccccgacagcggccccgaggccggcggcctgcacagcggcatgctggaggacggcctgcccagcaacggcgtgcccagaagcaccgcccccggcggcatccccaaccccgagaagaagaccaactgcgagacccagtgccccaacccccagagcctgagcagcggccccctgacccagaagcagaacggcctgcagaccaccgaggccaagagagacgccaagagaatgcccgccaaggaggtgaccatcaacgtgaccgacagcatccagcagatggacagaagcagaagaatcaccaagaactgcgtgaactag

SEQ ID NO: 216961 - protein, 491 aa, Artificial Sequence
  derived and/or modified sequence
MDHTDNELQGTNSSGSLGGLDVRRRIPIKLISKQANKAKPAPRTQRTINRMPAKAPPGDEEGFDYNEEERYDCKGGELFANQRRFPGHLFWDFQINILGEKDDTPVHFCDKCGLPIKIYGRMIPCKHVFCYDCAILHEKKGDKMCPGCSDPVQRIEQCTRGSLFMCSIVQGCKRTYLSQRDLQAHINHRHMRAGKPVTRASLENVHPPIAPPPTEIPERFIMPPDKHHMSHIPPKQHIMMPPPPLQHVPHEHYNQPHEDIRAPPAELSMAPPPPRSVSQETFRISTRKHSNLITVPIQDDSNSGAREPPPPAPAPAHHHPEYQGQPVVSHPHHIMPPQQHYAPPPPPPPPISHPMPHPPQAAGTPHLVYSQAPPPPMTSAPPPITPPPGHIIAQMPPYMNHPPPGPPPPQHGGPPVTAPPPHHYNPNSLPQFTEDQGTLSPPFTQPGGMSPGIWPAPRGPPPPPRLQGPPSQTPLPGPHHPDQTRYRPYYQ

SEQ ID NO: 216962 - protein, 370 aa, Artificial Sequence
  derived and/or modified sequence
MIPCKHVFCYDCAILHEKKGDKMCPGCSDPVQRIEQCTRGSLFMCSIVQGCKRTYLSQRDLQAHINHRHMRAGKPVTRASLENVHPPIAPPPTEIPERFIMPPDKHHMSHIPPKQHIMMPPPPLQHVPHEHYNQPHEDIRAPPAELSMAPPPPRSVSQETFRISTRKHSNLITVPIQDDSNSGAREPPPPAPAPAHHHPEYQGQPVVSHPHHIMPPQQHYAPPPPPPPPISHPMPHPPQAAGTPHLVYSQAPPPPMTSAPPPITPPPGHIIAQMPPYMNHPPPGPPPPQHGGPPVTAPPPHHYNPNSLPQFTEDQGTLSPPFTQPGGMSPGIWPAPRGPPPPPRLQGPPSQTPLPGPHHPDQTRYRPYYQ

SEQ ID NO: 216963 - DNA, 1476 bp, Artificial Sequence
  derived and/or modified sequence
atggatcacactgacaacgagttacagggaacgaacagttccggaagcctgggcggactggacgtgcggaggcgcattccgatcaaacttatttccaagcaagccaataaggccaaacctgcgcccaggactcagagaacgattaacaggatgcccgcgaaggcgccgccaggcgacgaagagggattcgattacaatgaagaagaaaggtacgattgtaagggaggagagttgttcgccaatcagcgccggtttcccgggcatttgttttgggactttcaaatcaatatactgggcgaaaaagatgatactcccgttcacttctgtgacaaatgcgggcttcctattaaaatttacgggcgcatgatcccctgcaagcatgtattctgctacgactgcgcaatactgcacgagaagaaaggcgacaagatgtgcccagggtgctccgacccggtccagagaatcgagcagtgcacccgcggttctttatttatgtgcagtatcgttcagggttgcaagcgtacctatttgagtcagcgagacctgcaagcacacataaatcaccggcacatgcgcgctggcaaacccgtgacgcgtgccagtctggagaatgtgcatccccccatcgcgccaccacctactgagattcccgagcgatttatcatgcctccagataaacaccatatgtctcacatcccgccaaagcagcatatcatgatgccccccccccctcttcagcatgtgccccacgaacattacaatcagccccacgaggatatccgcgccccgcccgctgaactgagcatggcaccccctccacccagatctgtttctcaagagaccttcagaatctctacccgcaagcacagcaatcttatcacggtccccatccaggatgattcgaactctggcgctcgggaaccccctccgcccgcaccagctcccgctcaccatcacccagagtaccagggccaacctgtcgtgagccatcctcaccacatcatgccacctcagcaacactacgctcccccccctcctcctccacctcctatttctcatcccatgcctcaccccccacaggctgccggaacaccacaccttgtgtacagtcaggcaccaccgcctcccatgacctcggctccaccaccaattacaccccctcctggtcatattattgcacagatgcctccctatatgaatcacccaccccctggaccccccccacctcaacacggcggtccccccgtcacggccccgcctcctcaccactataatcccaatagcctgcctcagttcaccgaggatcagggtactctctcgccaccattcacccaacctggcggaatgtcccccgggatctggcccgccccccgaggcccaccacctccccccagactgcagggcccacctagccagacacccctgccggggccccaccacccagatcagacccggtacagaccctattatcagtag

SEQ ID NO: 216964 - DNA, 1476 bp, Artificial Sequence
  derived and/or modified sequence
atggaccacacagacaatgagctgcagggcaccaacagcagcggcagcctgggcggcctggatgtgagaagacgcatccccatcaagctgatcagcaagcaggccaacaaggccaagccagcccccaggacccagaggaccatcaacaggatgcctgccaaggcccctcctggagatgaggagggctttgactacaatgaggaggagagatatgactgcaagggcggggagctgtttgccaaccagaggcgcttccctggccacctgttctgggacttccagatcaacatcctgggggagaaggatgacacccctgtgcacttctgtgacaagtgtggcctgcccatcaagatctacggccgcatgatcccctgcaagcacgtgttctgctatgactgtgccatcctgcacgagaagaagggggacaagatgtgccccggctgcagcgaccctgtgcagagaattgagcagtgcacccggggcagcctcttcatgtgcagcatcgtgcagggctgcaagaggacctacctgagccagagggacctgcaggcccacatcaaccaccgccacatgagagctgggaagcctgtgacccgggccagcctggagaatgtgcacccccccatcgcccccccacccacagagatccctgagcgcttcatcatgcccccagacaagcaccacatgagccacatcccccccaagcagcacatcatgatgcctcctccacccctgcagcacgtgccccatgagcactacaaccagccccatgaggacatccgggcccctcctgctgagctgtccatggcccctcctccacccaggtctgtgtcccaggagaccttccgcatcagcaccaggaagcacagcaacctgatcaccgtgcccatccaggatgacagcaacagcggggcccgggagcccccacctccagccccagccccagcccaccaccaccctgagtaccagggccagcctgtggtgagccacccccaccacatcatgccaccccagcagcactacgcccctcctcctcctcctcctccacccatcagccaccccatgccccaccccccccaggccgccggcaccccccacctggtgtacagccaggcccctcctccacccatgaccagcgcccccccacccatcaccccacctcctggccacatcatcgcccagatgccaccctacatgaaccaccccccacctggccccccaccaccccagcacggcggcccccctgtgacagcccccccaccccaccactacaaccccaacagcctgccccagttcacagaggaccagggcaccctgagcccccccttcacccagcccggcggcatgagccctggcatctggccagccccccggggccccccacctccaccccggctgcagggcccccccagccagacccccctgcccggcccccaccacccagaccagacccgctaccggccctactaccagtag

SEQ ID NO: 216965 - DNA, 1476 bp, Artificial Sequence
  derived and/or modified sequence
atggaccacaccgacaacgagctgcagggcaccaacagcagcggcagccttggcgggctagacgttcgtcgacgcatccccattaaacttataagcaagcaagccaataaagccaagcccgcaccccgcacccagagaaccatcaatcgaatgcccgctaaggcgcccccgggcgatgaggaggggttcgactacaacgaggaagagcgctatgattgtaagggaggtgaactgttcgctaatcaacggcgctttccaggtcacttattttgggactttcaaattaatattcttggcgagaaagacgacactccggtgcacttttgcgataagtgtggactcccaataaaaatatacggacgaatgatcccttgtaaacacgtgttctgctacgactgcgctatactccatgagaaaaagggggacaaaatgtgtcctggctgttctgatcccgttcagagaatcgagcagtgcacacgtggttcacttttcatgtgttctatcgtacagggatgcaaaaggacatatctgtcgcagcgcgacctgcaggcgcatattaaccataggcatatgcgtgctggaaaacccgtgacccgcgccagtcttgaaaatgttcatcctccaatcgcccctccacccaccgaaattccagaacggtttatcatgccccccgataagcaccatatgagccatatccccccaaagcagcacattatgatgccccccccacctttgcagcatgttccccatgaacattataaccagccgcatgaggacatacgtgcaccccccgcagagttgagtatggcacccccccctccaagaagtgtgagtcaagaaaccttcaggatctctactcggaagcattccaacctcattaccgtgccaatccaggacgatagtaatagcggcgccagagagcccccacctcctgcacccgcccccgctcaccaccatccagaataccagggccagcctgtggtgtcccacccccaccacattatgccacctcagcaacattacgcacccccacccccacctcctcctccgataagccatcccatgcctcaccctccccaagcagccgggactcctcatctcgtgtacagccaggcacctcctcctcccatgaccagtgcgcctccccccatcacgcctccccccggccacatcatagcccagatgcccccttacatgaaccatccaccccctggcccaccaccaccccagcacggcgggccccctgtgactgcaccgcctccacatcactacaaccccaattctctgccccagtttaccgaagatcaagggacactgagcccaccgttcacacagccaggtgggatgtctccgggaatctggcctgccccccgcggacccccacctcctcctagactgcagggcccaccgagccagacacccctgcctgggccacaccaccctgatcagacaagataccggccatactaccagtag

SEQ ID NO: 216966 - DNA, 1476 bp, Artificial Sequence
  derived and/or modified sequence
atggaccacaccgacaatgaattacaggggacaaattcgtcaggcagcttagggggattggacgttcgcaggaggatacccatcaaactgattagcaagcaagcaaataaagcgaaaccagcccctcggacgcagcgcaccataaatcgaatgcctgcaaaagctcccccaggtgatgaagaggggtttgactataatgaggaagagcgctatgattgtaagggcggagaattatttgcgaaccaacgcaggtttcccggacacctcttttgggactttcagattaacatcctgggggagaaggacgatacacctgttcatttctgcgacaagtgcgggctgcccattaagatatatgggaggatgattccgtgcaagcacgttttttgctacgactgtgcaattctccacgaaaaaaagggcgataagatgtgtcccggatgcagtgaccccgtgcagaggattgagcagtgcacgagaggctccctgttcatgtgctccatcgtgcaggggtgcaagaggacctatctgagccagagagatctccaggctcatataaaccacagacatatgagagccggaaaaccagtcactcgagcatccctcgagaatgtgcacccccctatagctccaccaccgacagaaattcccgagcggtttattatgccgccagataagcatcatatgagccatattcctcccaagcaacacattatgatgcctccgccacccttgcagcatgtaccacacgaacactataatcagccccacgaagatataagggctcccccagccgaattgtcaatggctcccccaccgccaagaagtgtgtcacaggaaacctttagaatttccacccggaagcactctaacttgatcacagttccgattcaagatgactctaacagcggcgctagggagccccctccacctgctcctgctcccgcacatcaccaccccgaataccagggccagccagtcgtttcgcacccccatcacattatgccacctcagcaacactacgctccacccccaccaccaccgccacctattagccaccccatgcctcaccctcctcaggccgcaggcacaccgcatttggtctacagccaggctcctcctcccccaatgaccagtgcccctccccctatcaccccaccaccagggcatatcatcgcacagatgcctccttatatgaaccatccaccaccaggtcctccccctccccagcacggagggccacccgtcacggcgcctccccctcatcattataaccccaattctttgccccagttcaccgaagatcaggggacactgtctccgccttttacacagcctgggggaatgtcccccggtatctggcctgccccaagaggcccacctcccccacccagactgcagggacctccaagccagaccccccttcctggaccacaccatcctgatcaaactagatatcgaccctactaccaatag

SEQ ID NO: 216967 - DNA, 2349 bp, Artificial Sequence
  derived and/or modified sequence
gttactccgcccgccggggtggggccagcgcaacggccgagcctgcgcagccagccggctccgggggccccgcgcactacaagtcccagaaggcagctctccgcggggcgggcagtcgccttatctgcttctggctcatttttaccactgctctccccttccccggtccccctggtgtcctttccacagttaaaggctactttctcttgaagcacatgaggagaagccttagcaacctcaataccgaagttcttcgcgcgctcgctctttctgcctccgcccgaactatgcctgagtccctcacaggagttggatagtagaggcgagagaaggaagtctttgcaggccaaaattgggacaacctgcttggacttccgcctcccggcctccggaaggcagtgcgcacgcgctcgctgcgactccggcgcggttgacttccgctcccactgtgctctgcgagccgaatcatggatcacactgacaatgagttacaaggcactaatagttctggatccttgggtggtcttgatgttcgcagacgaattcctataaagctcatctccaaacaagcaaacaaagcgaaacctgcaccgcgaactcaaagaactataaacaggatgcctgcaaaggctccacctggtgatgaagaaggatttgattataatgaagaagaacggtatgactgtaaagggggtgagctgtttgcaaatcagcgaagatttcctggacaccttttttgggactttcagataaacatcttaggtgaaaaggatgatacaccagttcatttctgtgacaagtgtggattgcctattaaaatctatgggagaatgattccatgcaagcatgttttttgctatgactgtgctattttacatgaaaaaaagggagataagatgtgtccaggctgtagtgatcctgtgcagcgaattgagcagtgtacacgaggttctctcttcatgtgtagcattgttcaagggtgcaagagaacatatttgtctcagagagacttacaggctcatatcaaccatcgccatatgagagctggaaaacctgttacccgtgcttcacttgaaaatgttcatcctcctattgccccaccaccaactgaaatccctgagcgttttataatgccaccagacaagcaccatatgagccatattccgccaaagcagcacatcatgatgccaccacctcctttgcaacatgtgccacatgagcactataatcagccacatgaggatattcgtgctcctccagcagaattgtccatggctccacctccacctcgatcggtcagtcaggaaacctttcgtatttcaacaagaaaacacagcaatttaataaccgtccctattcaggatgactcaaattcaggtgctagagaaccaccacctcctgccccagcacctgctcaccatcatcctgaatatcagggtcaaccagtggtatcgcaccctcatcatattatgcctccacagcaacattatgcaccacccccacctcctccaccaccaataagccatccaatgccacatcctccccaggctgcaggtactcctcacttggtatatagccaagctccacctccaccaatgacctctgctccaccaccaataacccctccccctggacatattattgcccagatgccaccttatatgaatcatcctcctccaggacctcccccacctcaacatggtggtccacctgtaactgcaccccctcctcaccattataatcctaactcattaccccagttcactgaagatcaaggaactctgagccctccatttacacaaccagggggaatgagtcctggtatatggcctgcaccaagagggccaccaccacctccacgattgcagggtccgccttctcaaaccccacttcctggaccacatcatccagatcagacaagatatagaccgtattaccaatgataatagtattttgaatggaagatatgagggggaaaaaaacttatgtgtagtcaatcttttaagctttgactgttttgggaaggaagagtacctcttatcgaggtagtataaaacacatagggtcttgtttcttaaaatggttttaaatcttgaccttaagattgatttcaagtaccatactgtagtacagataagtggctcagttgagcacagctatattttaacatctctttgttcccctagtttagtaaattgacccagaggtgaccatttgtaaaaaatttgaaaaaatttttcattgttttacttcaaaagtattgttttgttaaacccaacgtttagtttttcttgtgatacattttgttaacctgtgtaaaaggattaaatttcaatatggttgtaaaaa

SEQ ID NO: 216968 - DNA, 1476 bp, Artificial Sequence
  derived and/or modified sequence
atggaccacaccgacaacgagctgcagggcaccaacagcagcggcagcctgggcggcctggacgtgagaagaagaatccccatcaagctgatcagcaagcaggccaacaaggccaagcccgcccccagaacccagagaaccatcaacagaatgcccgccaaggccccccccggcgacgaggagggcttcgactacaacgaggaggagagatacgactgcaagggcggcgagctgttcgccaaccagagaagattccccggccacctgttctgggacttccagatcaacatcctgggcgagaaggacgacacccccgtgcacttctgcgacaagtgcggcctgcccatcaagatctacggcagaatgatcccctgcaagcacgtgttctgctacgactgcgccatcctgcacgagaagaagggcgacaagatgtgccccggctgcagcgaccccgtgcagagaatcgagcagtgcaccagaggcagcctgttcatgtgcagcatcgtgcagggctgcaagagaacctacctgagccagagagacctgcaggcccacatcaaccacagacacatgagagccggcaagcccgtgaccagagccagcctggagaacgtgcacccccccatcgcccccccccccaccgagatccccgagagattcatcatgccccccgacaagcaccacatgagccacatcccccccaagcagcacatcatgatgccccccccccccctgcagcacgtgccccacgagcactacaaccagccccacgaggacatcagagccccccccgccgagctgagcatggccccccccccccccagaagcgtgagccaggagaccttcagaatcagcaccagaaagcacagcaacctgatcaccgtgcccatccaggacgacagcaacagcggcgccagagagccccccccccccgcccccgcccccgcccaccaccaccccgagtaccagggccagcccgtggtgagccacccccaccacatcatgcccccccagcagcactacgccccccccccccccccccccccccccatcagccaccccatgccccaccccccccaggccgccggcaccccccacctggtgtacagccaggccccccccccccccatgaccagcgcccccccccccatcacccccccccccggccacatcatcgcccagatgcccccctacatgaaccaccccccccccggccccccccccccccagcacggcggcccccccgtgaccgccccccccccccaccactacaaccccaacagcctgccccagttcaccgaggaccagggcaccctgagcccccccttcacccagcccggcggcatgagccccggcatctggcccgcccccagaggccccccccccccccccagactgcagggcccccccagccagacccccctgcccggcccccaccaccccgaccagaccagatacagaccctactaccagtag

SEQ ID NO: 216969 - protein, 533 aa, Artificial Sequence
  derived and/or modified sequence
MAAAAPVAADDDERRRRPGAALEDSRSQEGANGEAESGELSRLRAELAGALAEMETMKAVAEVSESTKAEAVAAVQRQCQEEVASLQAILKDSISSYEAQITALKQERQQQQQDCEEKERELGRLKQLLSRAYPLDSLEKQMEKAHEDSEKLREIVLPMEKEIEELKAKLLRAEELIQEIQRRPRHAPSLHGSTELLPLSRDPSPPLEPLEELSGDGGPAAEAFAHNCDDSASISSFSLGGGVGSSSSLPQSRQGLSPEQEETASLVSTGTLVPEGIYLPPPGYQLVPDTQWEQLQTEMQVLLAQVQNSEQLLRTLQGTVSQAQERVQLQMAELVTTHKCLHHEVKRLNEENQGLRAEQLPSSAPQGSQQEQGEEESLPSSVPELQQLLCCTRQEARARLQAQEHGAERLRIEIVTLREALEEETVARASLEGQLRVQREETASLCSLRTEMERVQQEQSKAQLPDLLSEQRAKVLRLQAELETSEQVQRDFVRLSQALQVRLERIRQAETLEQVRSIMDEAPLTDVRDIKDT

SEQ ID NO: 216970 - protein, 569 aa, Artificial Sequence
  derived and/or modified sequence
MAAAAPVAADDDERRRRPGAALEDSRSQEGANGEAESGELSRLRAELAGALAEMETMKAVAEVSESTKAEAVAAVQRQCQEEVASLQAILKDSISSYEAQITALKQERQQQQQDCEEKERELGRLKQLLSRAYPLDSLEKQMEKAHEDSEKLREIVLPMEKEIEELKAKLLRAEELIQEIQRRPRHAPSLHGSTELLPLSRDPSPPLEPLEELSGDGGPAAEAFAHNCDDSASISSFSLGGGVGSSSSLPQSRQGLSPEQEETASLVSTGTLVPEGIYLPPPGYQLVPDTQWEQLQTEGRQLQKDLESVSRERDELQEGLRRSNEDCAKQMQVLLAQVQNSEQLLRTLQGTVSQAQERVQLQMAELVTTHKCLHHEVKRLNEENQGLRAEQLPSSAPQGSQQEQGEEESLPSSVPELQQLLCCTRQEARARLQAQEHGAERLRIEIVTLREALEEETVARASLEGQLRVQREETEVLEASLCSLRTEMERVQQEQSKAQLPDLLSEQRAKVLRLQAELETSEQVQRDFVRLSQALQVRLERIRQAETLEQVRSIMDEAPLTDVRDIKDT

SEQ ID NO: 216971 - protein, 498 aa, Artificial Sequence
  derived and/or modified sequence
MAAAAPVAADDDERRRRPGADSISSYEAQITALKQERQQQQQDCEEKERELGRLKQLLSRAYPLDSLEKQMEKAHEDSEKLREIVLPMEKEIEELKAKLLRAEELIQEIQRRPRHAPSLHGSTELLPLSRDPSPPLEPLEELSGDGGPAAEAFAHNCDDSASISSFSLGGGVGSSSSLPQSRQGLSPEQEETASLVSTGTLVPEGIYLPPPGYQLVPDTQWEQLQTEGRQLQKDLESVSRERDELQEGLRRSNEDCAKQMQVLLAQVQNSEQLLRTLQGTVSQAQERVQLQMAELVTTHKCLHHEVKRLNEENQGLRAEQLPSSAPQGSQQEQGEEESLPSSVPELQQLLCCTRQEARARLQAQEHGAERLRIEIVTLREALEEETVARASLEGQLRVQREETEVLEASLCSLRTEMERVQQEQSKAQLPDLLSEQRAKVLRLQAELETSEQVQRDFVRLSQALQVRLERIRQAETLEQVRSIMDEAPLTDVRDIKDT

SEQ ID NO: 216972 - DNA, 1602 bp, Artificial Sequence
  derived and/or modified sequence
atggccgccgcggcccctgtggcagccgatgatgacgagcgccggcggcggccaggagccgccctggaagactccagaagccaggaaggggctaatggagaggcagagtccggagagttgtctcgtctgagggccgaacttgcaggcgctcttgccgaaatggaaacaatgaaagcagtcgcagaagtgtctgagagcactaaggccgaggccgtggccgctgtgcagcgacagtgccaggaagaggttgccagtctgcaagccatcctgaaggactcgatcagctcttatgaagctcagatcaccgccttaaagcaggagcgccaacagcagcagcaggactgtgaagagaaggagcgggaactaggtagactaaagcagctcctctcacgcgcatatccacttgattctctcgaaaaacagatggagaaggcacacgaggactctgagaaattacgcgagatcgtgttacctatggagaaagagatcgaggagctgaaggcaaaacttctcagagctgaggaattgatccaggagatacagcgccggccccgtcacgctccttccctacacggtagcacggaactcttgcccttgagtagggacccaagtccccctcttgaacccctcgaggagctcagtggcgatgggggacccgccgccgaggcatttgcacacaattgcgatgacagcgccagcattagcagtttttctcttggcggtggtgtgggttcctcctcctccttgccgcagagcaggcaaggcctgtcccctgagcaggaggagactgcttccctagtgtcaacaggtacactagtgcctgaaggaatctatctgcctcctccaggctaccagctggtgccagacacccaatgggagcagttgcagaccgagatgcaggtcctattagcgcaggtccagaacagtgagcaactcctgagaaccctgcagggcacagtgtcacaggcccaggaaagggttcaacttcagatggccgagctagtgacaacccataagtgccttcatcacgaggtgaagcgacttaatgaagagaaccaaggcctccgcgcggaacaacttccaagctctgctccccagggctcgcagcaggagcaaggcgaggaggaatctctcccgagtagcgtccctgaactgcagcagctgttatgttgtaccaggcaggaagcaagggctcgcctacaagctcaggagcacggtgctgaaagattacggatcgagatcgtgactttacgcgaggctctcgaagaggaaacagtagctcgggcctctctggagggacagctccgcgtgcagagagaggaaacagcgtcgctatgttcactaagaacagagatggagagagtccagcaggaacagagtaaggctcagctgcctgatctgctttcagagcaacgcgccaaggtgttgcgcctgcaagccgaactcgaaacgagcgagcaggtccagcgtgattttgtccggctgagccaagcactccaggtccgtctggagagaattcgtcaggccgaaacactggagcaggttcggtctattatggatgaggcgccactgaccgatgtgagggatattaaagacacatag

SEQ ID NO: 216973 - DNA, 1710 bp, Artificial Sequence
  derived and/or modified sequence
atggcagccgccgcacctgtggctgcggacgacgacgagcggaggcgtaggcccggcgccgccctggaagactctcgcagtcaggaaggcgctaacggggaggccgaatcaggagagctgtcacgcctgcgtgctgaactggcgggagcactggccgaaatggagactatgaaggccgtcgcagaagtctcggaatccacaaaagccgaagccgtcgccgcagtgcagcggcagtgtcaagaagaggtggcctcactccaggccattctcaaggactcgatcagctcctatgaggcccagattactgctctgaagcaggagaggcaacagcagcagcaggattgcgaggagaaggagcgggaattaggtcggctgaagcagctgctgtcacgggcctatccactagactccctggagaagcaaatggagaaagcccacgaggactccgaaaagctccgcgagatagtattgccaatggaaaaggaaattgaggaactgaaggctaagctcctgagagccgaagagctgattcaagagatccagaggcggccaaggcatgctccctcgctgcacgggagtacagagctgctacccctttcaagggacccctctccacccctggagccgttagaagagctctctggagacggcgggcccgccgctgaagcgtttgcccacaactgcgacgatagcgcatccattagttccttctccctgggcggaggagtggggagctcctctagtctgccccaatcccggcaaggcctctcccccgagcaggaggaaacagcttccctagtctccaccgggaccctcgtgccggaaggaatatatctcccgccaccaggttaccagctggtcccagacacccagtgggaacagctgcagacagaggggaggcagctgcagaaggatctggagagcgtgtcccgagagagagatgaactgcaggaggggctcaggcgttctaacgaggactgcgccaaacagatgcaggtgctcttagcccaggtgcagaatagcgaacagctcctgcgtaccttacagggaacagtatcacaggcccaggaaagggtgcagctgcagatggctgagctggttacaacccataagtgtctgcatcatgaggttaaaaggttgaatgaggaaaaccaggggcttcgggctgagcaactcccgagcagtgcccctcagggttcacagcaggagcaaggcgaggaggagtccttgccaagttccgtaccagaactgcagcagctgctctgctgcacccgtcaggaagcccgcgcacgcttgcaggcgcaagagcatggcgccgagagactgagaatcgaaatcgtgacactgcgcgaggctctggaagaagagacagtcgccagagctagtctcgagggacaactccgagtccaacgagaggagactgaagtgctcgaggcctccctctgctctctcaggacggagatggagcgcgtgcagcaggagcagagcaaggctcagctccccgatctgttgtctgagcagagggcgaaagttctccgactgcaagcagaactggagactagtgagcaggtccagagagattttgtccgcttatcacaggccctgcaggtgagactcgagcgtatccgtcaggccgaaactctggagcaagtgcggagcattatggatgaagctcctctgaccgacgttagagatatcaaggacacatag

SEQ ID NO: 216974 - DNA, 1497 bp, Artificial Sequence
  derived and/or modified sequence
atggccgcagcagcccccgtggcggctgacgacgatgagagacgccgccggccgggggccgactccatcagcagctatgaggcccaaatcaccgcgttgaaacaggaaaggcaacaacagcagcaggattgtgaagagaaggagagagagctggggcggctgaagcagctgttgtcccgggcttatcctctggattcgctggaaaagcagatggaaaaagcccatgaagactcggagaagctgcgagaaattgtactaccaatggaaaaggaaattgaagagcttaaggccaagctcctccgcgcagaggagctgattcaggagattcagcggaggccaagacacgctccatctttacatggatccactgagctcctgccactatctcgggatccttccccccctctggagccgcttgaagaactatctggtgatggaggacccgctgccgaagcctttgcccataactgcgatgacagtgccagcatctcctcatttagcctgggaggcggagtcggcagctcatcctctctgccccaatcgaggcaggggctgtcgccagagcaggaggaaacagcctcactggtttcaaccggtacactggtccctgaaggtatatacctgcctcctccgggctatcagctcgtgcccgatactcagtgggagcagcttcagacagagggtcgccagctgcaaaaggatctagaatctgtgagtcgagaaagggacgagttgcaggaagggctgcggcggtcaaatgaagactgcgctaagcaaatgcaggtgctcttggctcaggtccagaattctgagcagctcttaaggaccctgcaaggtacagtttcacaggcccaggagcgagtacagctgcaaatggctgagttggtgaccacccataaatgtctacatcacgaggtcaaacgtttgaacgaggagaaccaaggtctgcgcgccgagcagctaccaagctcagcacctcaaggatcacagcaggagcagggggaggaagagtctctgcccagtagcgtgcccgaactgcagcagctgttgtgctgtacccgccaagaagctagggccagactgcaggcgcaggagcacggggcagaacgactgcgcattgagattgttactctgagagaggcattggaggaggagacggtggcgcgcgcctcactggaaggacagttaagagtgcagcgcgaggaaaccgaggtattggaagcttccctgtgtagcctccgaacagagatggagcgggtccaacaggagcagagtaaagcccagctgcctgatctcctgagcgagcagcgggccaaggtgctgcgcctccaagctgaactggaaacgtccgagcaggtgcagcgcgacttcgtgcgcctgagccaagccctgcaggtacgtttggaaagaatcagacaggccgagaccctggagcaggtcagaagcatcatggacgaagcccctcttactgatgtcagagatatcaaagatacttag

SEQ ID NO: 216975 - DNA, 1602 bp, Artificial Sequence
  derived and/or modified sequence
atggctgctgctgcccctgtggccgcagatgatgatgagaggagaagaagacctggggccgccctggaggacagccgcagccaggagggcgccaacggggaggccgagagcggggagctgagccggctgcgggcagagctggccggggccctggccgagatggagaccatgaaggctgtggccgaggtgtctgagagcaccaaggccgaggccgtggccgctgtgcagaggcagtgccaggaggaggtggccagcctgcaggccatcctgaaggacagcatcagcagctatgaggcccagatcacagccctgaagcaggagcggcagcagcagcagcaggactgtgaggagaaggagcgggagctgggccgcctgaagcagctgctgagccgggcctaccccctggacagcctggagaagcagatggagaaggcccatgaagattctgagaagctgcgggagatcgtgctgcccatggagaaggagattgaggagctgaaggccaagctgctgcgggcagaggagctgatccaggagatccagaggcggcccaggcatgcccccagcctgcacggcagcacagagctgctgcccctgagccgggaccccagcccccccctggagcccctggaggagctgtctggagatggcggccctgctgctgaggcctttgcccacaactgtgatgattctgccagcatcagcagcttcagcctgggcggcggcgtgggcagcagcagcagcctgccccagagccggcagggcctgagccctgagcaggaggagacagccagcctggtgtccacaggcaccctggtgcctgagggcatctacctgcccccacctggctaccagctggtgcctgacacccagtgggagcagctgcagacagagatgcaggtgctgctggcccaggtgcagaacagcgagcagctgctgcggaccctgcagggcaccgtgtcccaggcccaggagcgggtgcagctgcagatggccgagctggtgaccacccacaagtgcctgcaccacgaggtgaagaggctgaatgaggagaaccagggcctgcgggcagagcagctgcccagcagcgccccccagggcagccagcaggagcagggcgaggaggagagcctgcccagctctgtgcctgagctgcagcagctgctgtgctgcacccggcaggaggcccgggcccggctgcaggcccaggagcacggggctgagcggctgcgcatcgagatcgtgaccctgcgggaggccctggaggaggagaccgtggcccgggccagcctggagggccagctgcgggtgcagcgggaggagacagccagcctgtgcagcctgaggacagagatggagcgggtgcagcaggagcagagcaaggcccagctgcctgacctgctgtctgagcagagggccaaggtgctgcggctgcaggccgagctggagaccagcgagcaggtgcagagggactttgtgcggctgagccaggccctgcaggtgcggctggagcgcatccggcaggccgagaccctggagcaggtgcgcagcatcatggatgaggcccccctgacagatgtgcgggacatcaaggacacctag

SEQ ID NO: 216976 - DNA, 1710 bp, Artificial Sequence
  derived and/or modified sequence
atggctgctgctgcccctgtggccgcagatgatgatgagaggagaagaagacctggggccgccctggaggacagccgcagccaggagggcgccaacggggaggccgagagcggggagctgagccggctgcgggcagagctggccggggccctggccgagatggagaccatgaaggctgtggccgaggtgtctgagagcaccaaggccgaggccgtggccgctgtgcagaggcagtgccaggaggaggtggccagcctgcaggccatcctgaaggacagcatcagcagctatgaggcccagatcacagccctgaagcaggagcggcagcagcagcagcaggactgtgaggagaaggagcgggagctgggccgcctgaagcagctgctgagccgggcctaccccctggacagcctggagaagcagatggagaaggcccatgaagattctgagaagctgcgggagatcgtgctgcccatggagaaggagattgaggagctgaaggccaagctgctgcgggcagaggagctgatccaggagatccagaggcggcccaggcatgcccccagcctgcacggcagcacagagctgctgcccctgagccgggaccccagcccccccctggagcccctggaggagctgtctggagatggcggccctgctgctgaggcctttgcccacaactgtgatgattctgccagcatcagcagcttcagcctgggcggcggcgtgggcagcagcagcagcctgccccagagccggcagggcctgagccctgagcaggaggagacagccagcctggtgtccacaggcaccctggtgcctgagggcatctacctgcccccacctggctaccagctggtgcctgacacccagtgggagcagctgcagacagagggccggcagctgcagaaggacctggagagcgtgtcccgggagagagatgagctgcaggagggcctgcggcgcagcaatgaagactgtgccaagcagatgcaggtgctgctggcccaggtgcagaacagcgagcagctgctgcggaccctgcagggcaccgtgtcccaggcccaggagcgggtgcagctgcagatggccgagctggtgaccacccacaagtgcctgcaccacgaggtgaagaggctgaatgaggagaaccagggcctgcgggcagagcagctgcccagcagcgccccccagggcagccagcaggagcagggcgaggaggagagcctgcccagctctgtgcctgagctgcagcagctgctgtgctgcacccggcaggaggcccgggcccggctgcaggcccaggagcacggggctgagcggctgcgcatcgagatcgtgaccctgcgggaggccctggaggaggagaccgtggcccgggccagcctggagggccagctgcgggtgcagcgggaggagacagaggtgctggaggccagcctgtgcagcctgaggacagagatggagcgggtgcagcaggagcagagcaaggcccagctgcctgacctgctgtctgagcagagggccaaggtgctgcggctgcaggccgagctggagaccagcgagcaggtgcagagggactttgtgcggctgagccaggccctgcaggtgcggctggagcgcatccggcaggccgagaccctggagcaggtgcgcagcatcatggatgaggcccccctgacagatgtgcgggacatcaaggacacctag

SEQ ID NO: 216977 - DNA, 1497 bp, Artificial Sequence
  derived and/or modified sequence
atggctgctgctgcccctgtggccgcagatgatgatgagaggagaagaagacctggagctgacagcatcagcagctatgaggcccagatcacagccctgaagcaggagcggcagcagcagcagcaggactgtgaggagaaggagcgggagctgggccgcctgaagcagctgctgagccgggcctaccccctggacagcctggagaagcagatggagaaggcccacgaggacagcgagaagctgcgggagatcgtgctgcccatggagaaggagattgaggagctgaaggccaagctgctgcgggcagaggagctgatccaggagatccagaggcggcccaggcatgcccccagcctgcacggcagcacagagctgctgcccctgagccgggaccccagcccccccctggagcccctggaggagctgtctggagatggcggccctgctgctgaggcctttgcccacaactgtgatgacagcgccagcatcagcagcttcagcctgggcggcggcgtgggcagcagcagcagcctgccccagagccggcagggcctgagccctgagcaggaggagacagccagcctggtgtccacaggcaccctggtgcctgagggcatctacctgcccccacctggctaccagctggtgcctgacacccagtgggagcagctgcagacagagggccggcagctgcagaaggacctggagagcgtgtcccgggagagagatgagctgcaggagggcctgcggcgcagcaatgaagactgtgccaagcagatgcaggtgctgctggcccaggtgcagaacagcgagcagctgctgcggaccctgcagggcaccgtgtcccaggcccaggagcgggtgcagctgcagatggccgagctggtgaccacccacaagtgcctgcaccacgaggtgaagaggctgaatgaggagaaccagggcctgcgggcagagcagctgcccagcagcgccccccagggcagccagcaggagcagggcgaggaggagagcctgcccagctctgtgcctgagctgcagcagctgctgtgctgcacccggcaggaggcccgggcccggctgcaggcccaggagcacggggctgagcggctgagaattgaaattgtgaccctgcgggaggccctggaggaggagaccgtggcccgggccagcctggagggccagctgcgggtgcagcgggaggagacagaggtgctggaggccagcctgtgcagcctgaggacagagatggagcgggtgcagcaggagcagagcaaggcccagctgcctgacctgctgtctgagcagagggccaaggtgctgcggctgcaggccgagctggagaccagcgagcaggtgcagagggactttgtgcggctgagccaggccctgcaggtgcggctggagcgcatccggcaggccgagaccctggagcaggtgcgcagcatcatggatgaggcccccctgacagatgtgcgggacatcaaggacacctag

SEQ ID NO: 216978 - DNA, 1602 bp, Artificial Sequence
  derived and/or modified sequence
atggccgccgccgcccccgtggccgccgacgacgacgagcggcggcgtaggcctggggcagctttagaagactctcgctctcaagaaggcgccaatggggaggctgagtccggagagctttcaaggttgcgagcagaactggccggcgccctggctgagatggaaaccatgaaggcagtggcggaggtctccgagtctaccaaggcagaagccgtcgctgcagtgcagcggcagtgccaggaggaggttgcgtcccttcaggccatcctgaaggacagcatcagctcatacgaagcacagataactgctctgaaacaggagaggcaacagcagcagcaggactgcgaggagaaagaaagggagctcggccgtcttaagcagctgttatccagagcctatcctctcgattccctggagaaacagatggaaaaagctcatgaggattcggagaaactgagagagattgtgctgccgatggagaaagaaatcgaagagctaaaggcaaaactattacgagccgaagaactgatccaggaaatccaacgccgcccgaggcatgcccctagcttgcacggctccactgagctgctgcctcttagtagagacccatctccccctctggagccccttgaagagctcagcggcgatggcggcccggctgccgaggcgttcgcccataattgtgatgattccgcttcaatctcctctttctcgctgggcggcggcgtggggtcatcatcttccctgccccaaagcagacagggactttcccccgagcaagaagagactgcctccctcgtttccaccggcaccctcgtccccgagggaatctacctgccaccacctgggtaccagttggtcccagacacacaatgggaacagttacagaccgagatgcaggttctcctggcacaggtccagaactctgagcaacttctgcggacacttcaggggacagtgagccaggcccaggagcgggtgcaactgcagatggctgagctggtcaccacacacaagtgcctgcaccacgaagtcaagaggttaaacgaggagaaccaagggctcagggctgagcagctcccgtcaagtgctccgcagggttcccaacaggaacagggagaagaagaaagtctgccctccagtgttcctgagctccaacaattgttgtgctgtacccgccaggaggctagagctcgcctgcaggcacaggaacacggcgccgaacggttaaggatcgagatcgtgacactgcgtgaggccctggaggaagagaccgtggcccgcgccagccttgaaggccagcttcgggttcaacgagaggagaccgcttctttgtgttccctgaggacagagatggagagagttcagcaagagcaatctaaggcccagctcccagatctgctcagcgagcagagagctaaggtcctgaggctgcaggcagagctcgaaacctcagagcaagttcagagagactttgtgaggctgtcacaggcacttcaagtgagactggaaaggatccgacaagctgaaaccctggagcaggtaagatctatcatggacgaggcccccctgactgatgtgagagacatcaaagatacgtag

SEQ ID NO: 216979 - DNA, 1710 bp, Artificial Sequence
  derived and/or modified sequence
atggccgccgccgcccccgtggccgccgacgacgacgagcggcggcggaggcctggggcagcacttgaagattctagaagccaggagggagcaaatggcgaggctgagtccggggagctctctcgcttgcgagcagagctggctggggcactagctgagatggagacaatgaaggcggtggccgaggtgtccgagagcaccaaagctgaggccgtggccgccgtacagaggcaatgtcaggaggaagtggcaagcctccaggctatcttaaaggactctatttccagctacgaagcacagatcactgccttgaagcaggaaagacagcaacagcagcaagactgtgaagagaaagaacgcgagcttggacgcctgaagcaactgttatctcgcgcgtatcccttggatagtctggaaaagcagatggagaaggcccatgaggactcagaaaaactgcgggagattgtgctccccatggaaaaagaaatcgaagagctgaaagccaagctgctcagggcggaggagctcatacaggaaattcaacgcagaccaaggcatgctccaagcctgcacgggtccactgagctgctgcctctgagccgcgatccttctcctccgttggagccactcgaagaactttctggggacggaggacccgcagctgaggccttcgcccataactgcgacgacagtgcatccatcagctcctttagcctggggggcggtgtagggtcctcttctagcctgcctcaatcacgccagggtctgagccccgaacaggaagaaacagcttcattagtgtccaccggcaccctggtccccgagggcatttatcttcctccccctggctaccagttagtgcccgacactcagtgggagcagctgcagacagaaggaaggcaactgcagaaggacctggaaagcgtatctcgcgaacgggatgagctacaggagggattacgcagatcaaacgaagactgcgccaagcagatgcaagtgttgcttgcccaggtgcagaattcagaacagctgctcagaaccctacaggggacggtgtctcaggcacaggagcgtgttcaactgcaaatggcagagttggtgacgacccacaagtgtcttcaccacgaggttaagcggttgaacgaagaaaatcaaggccttagagcagagcagctaccctcatccgccccgcaggggagccagcaggaacagggcgaggaggaaagcctaccatccagcgtaccagagttgcagcagctgttgtgctgcacaagacaggaagctcgggccaggctgcaagcccaagaacacggagctgagaggctgcgaatcgagatcgttacattacgcgaagcattagaggaggagaccgtcgcaagagcctcacttgagggccagctccgggtccaacgagaagagaccgaggtgctggaagcctcattgtgctctctccggacagaaatggagcgagttcagcaggaacaaagcaaggcccagctaccggacctattgtcagagcagcgcgccaaggtgcttcgcctgcaagccgaactagagacttcagaacaggtgcagagagatttcgtgcggctatcccaggccctgcaagtgaggctggaacggatccgacaggcggaaactctggagcaggtacgtagcatcatggacgaagcaccactgactgacgtccgtgatattaaggatacctag

SEQ ID NO: 216980 - DNA, 1497 bp, Artificial Sequence
  derived and/or modified sequence
atggccgccgccgcccccgtggccgccgacgacgacgagcggcggcgcagacctggggctgattcgatttctagttacgaagcccagatcacagcccttaaacaggagagacagcaacaacagcaggactgcgaagagaaggaacgtgaactcgggcggctgaagcagctgctgtcacgggcatatccgttggattcccttgaaaagcagatggagaaggctcatgaggattcagaaaaactgagagagattgtgttacctatggagaaagagattgaagaactgaaagctaagctgctccgcgccgaggaactgattcaggagatccagagaagacctagacacgcaccaagcctacatgggtcaaccgagctcctccccctgtctagagacccgagcccaccgttggagcccctggaagagttgagcggagacgggggacctgctgccgaagcatttgcacacaactgtgatgactctgcctccatttcctccttctcacttggtggtggggtgggaagctcctctagcctacctcagtcgaggcagggcttatcaccagaacaggaggaaactgcctctctcgtcagcaccgggactctggtcccagaggggatatatctaccaccgcctggataccagttggttcccgatacacagtgggagcaattacagacagaagggaggcaattgcagaaggatctggagtcagtgtcccgcgaaagggacgagcttcaggagggtctccggagatctaatgaggattgcgctaaacaaatgcaggttttgctggcccaggtgcagaacagtgaacagctgttacgtacacttcagggcactgtcagccaggcacaggagcgcgtgcagctccagatggccgaactagtcaccacccacaaatgtttgcaccacgaagtgaagagactaaacgaggagaatcaaggcctccgggcggagcaactgccctcatccgcacctcaggggtctcagcaggagcagggtgaggaagaatcattaccgtcatctgttccagagcttcagcaactgctctgttgcacaaggcaggaggctcgggcgcgcttacaggcacaagaacatggcgctgagagactacggatcgaaattgtgacactcagagaggcccttgaggaggagaccgtggccagggctagcttggagggccagctcagggttcagcgcgaggagacggaggttttagaagcttccttgtgcagcctcagaacggaaatggagagggtccaacaagaacagtcgaaggcacagttgcctgatctgctcagcgagcagcgcgcaaaggtcctccggctgcaggcagagttggagacaagtgaacaggtacagcgcgatttcgtgagactttctcaggctctccaagtgcgcctagaaagaatacggcaggctgagaccctggagcaggtcaggtcgatcatggacgaagctcctctgaccgatgtgcgtgatattaaggacacctag

SEQ ID NO: 216981 - DNA, 1602 bp, Artificial Sequence
  derived and/or modified sequence
atggccgcagctgctccagtggctgctgacgatgatgagcgcaggcgcaggccgggagcagctctggaagattcgcgtagtcaggagggcgcaaatggcgaggccgagtccggggaactgtctaggctccgcgcagagttagcaggagccctggcggagatggaaacgatgaaagctgtggctgaggtctcagagtccactaaggccgaagcggtggccgctgtgcaacggcagtgtcaggaagaagtcgcttcgctacaggccatccttaaagactcaatttcctcttacgaggcgcaaatcaccgcactcaagcaggagaggcagcagcagcagcaagattgtgaggaaaaggagagagagttggggagactgaaacaactgctctccagagcctaccctctcgattccttggaaaaacaaatggagaaggcccatgaggacagcgagaagctacgcgagatcgtcctgccgatggagaaggagattgaggagcttaaggcaaaactgctgagggcagaggaactgattcaagagattcaacggcgtccgcgacacgctccaagtctgcacggaagcactgaactcttgcctttatctcgggacccttctccaccccttgaaccgctcgaagagctctcaggggacggaggtccagccgctgaagctttcgcacacaactgcgacgactccgcatctatatcctctttctcgctcggtgggggtgtcggcagcagtagttccctcccccaatcccgacagggactctctcccgagcaggaagagaccgcaagcctcgtgtcaacggggactctggtgcctgagggaatctacctgccccctcccggttatcagctggtcccagacacccagtgggagcagttacaaactgagatgcaggtattactggcccaagttcagaactccgagcagttacttagaacactgcaaggcactgtatcccaggcccaggagcgtgtgcagcttcagatggctgagctggtgactacgcacaagtgccttcaccatgaggtgaagagacttaatgaagagaatcaggggctgagagcagaacaactgccctcgtcggcacctcagggctctcagcaggagcaaggagaggaagaatcactgccttcatcagtacccgaacttcaacagctgctgtgctgtacgcgacaggaagccagggccaggctccaggcccaagagcacggagctgaacggcttcggatcgagatcgtgactctgcgagaagctctggaagaggaaacggtggccagggcgtccctggaaggacaactgcgagtgcaaagagaagagaccgctagtctctgtagcctgcgcaccgagatggaacgggtgcaacaggaacagtccaaagcccagttgcctgacctgctgagtgaacaaagagcgaaagtgctccggctgcaggcggaactggaaacaagtgagcaggtccagcgcgacttcgtgaggctgagtcaggcacttcaagttcggctggagagaattcgccaggcagaaacgctggaacaggtgagaagcatcatggacgaggctccacttacagacgtgagggacattaaagatacatag

SEQ ID NO: 216982 - DNA, 1710 bp, Artificial Sequence
  derived and/or modified sequence
atggcagccgcagctcccgtcgccgctgacgatgatgagcggagaagacggccaggtgctgctctcgaggatagccggagccaagagggcgcaaatggcgaggcagaatccggcgagctcagccgcctgcgggcagaattggcaggcgcattggctgagatggagacaatgaaagccgtcgcagaagtgtccgagagtacaaaagccgaggccgttgccgcagtgcagagacagtgtcaggaggaggtagcttcactccaggccatcctgaaggacagcatttcttcatatgaggcccagataaccgccttaaagcaggaacggcagcagcagcaacaagattgcgaggagaaggaaagagagctggggcgtctgaagcaacttttgagccgtgcttaccctttagattctctggaaaagcagatggagaaggcgcacgaagactcagaaaagctgagagagatcgtgctccctatggagaaggagatagaagaactgaaagcgaaactgctgagggcggaagagctgatccaggagatccagagaagacctaggcacgcccctagcctgcacggcagtacagagctacttcccctcagccgtgatccaagtccacccctggaacccctggaggagctttccggcgacggaggaccggctgccgaggccttcgcccacaactgcgacgattctgcgagtatatcttccttttcactgggcggaggagtgggcagttcctcaagcctcccccagtccaggcagggcctgagcccggagcaagaggagactgcctcgctcgtgtccacagggacacttgtcccagagggcatatatctgcctccacctggctatcagctggttcctgatacgcagtgggagcaactccagaccgaaggccgtcagctgcagaaagatctggagagcgtgtcccgtgaacgggacgaactccaagaggggcttcgcagatccaacgaagactgcgccaaacaaatgcaggttttgcttgcccaagttcagaactccgagcaactgctccgtacactgcaaggaacagtgtcacaagcccaagagcgcgtacaattgcaaatggcagagctggtgaccactcacaaatgtctgcatcacgaggttaagaggttgaacgaagagaatcagggccttcgagcggagcagctccccagttccgcacctcagggctcccagcaggagcagggtgaggaggagtccctccctagttctgtaccagagttgcaacagcttctgtgctgtacgagacaggaggctcgtgcgcgactgcaggctcaggaacacggagcagagcggcttcggatagaaattgtcacacttagagaggcattggaggaagagacagttgcacgggcatccttggagggccagctccgagtgcagagggaggaaacagaagtgctggaagcatccctgtgctctctgagaactgagatggagagggttcagcaagaacaatcaaaggctcagctccctgacctgctcagcgagcagcgcgctaaagtgctccgcttacaggcagaactggagacatcagagcaggtgcagcgcgattttgtacggttgagtcaggctctgcaggtgaggctggaacgcatccggcaggctgagacactggagcaggtgaggagcatcatggacgaagcccctctcacagacgtgcgggacataaaggacacatag

SEQ ID NO: 216983 - DNA, 1497 bp, Artificial Sequence
  derived and/or modified sequence
atggcagcagccgcacctgtagctgcggacgacgacgaacgccgaagaaggcccggagccgatagtatcagttcttacgaagcacagatcacagcactgaagcaggagcggcagcagcagcagcaggactgcgaggagaaagagcgggagttgggccgattgaaacagttgctgtcacgggcataccctctcgattctctcgagaaacagatggagaaagcacatgaagactctgagaaacttagagagatcgtgctgcccatggaaaaggagattgaagaactgaaggctaaacttttgagggccgaagagctaattcaagaaattcaacgtcgaccaagacacgctccaagtctgcatggatcaaccgagctgttaccactgtccagagatccatcaccacctctggagccgcttgaggagctgtcaggggacggtgggccagctgccgaggctttcgcacataactgcgatgattcagcatcaatcagttcattcagcttaggcggtggcgtgggctccagtagctcactgccccagtcaaggcagggtctgagccctgaacaagaggaaaccgcctcccttgtgtccaccggcacgctcgtaccagagggtatctatctgcccccacctggctaccagttggtgcctgacacacagtgggaacagttgcaaactgaggggaggcagcttcagaaggatcttgagtccgtttccagagagcgtgatgagctccaggaaggcctcagacgatctaatgaggattgcgcaaagcagatgcaggttctactggctcaggtccaaaactcagaacagctgctgcgcactctccagggtaccgtgtcacaggcacaggaacgcgtgcagcttcagatggccgaacttgtgacgactcataaatgcctccaccatgaagtgaagaggctgaacgaggagaaccagggacttagggccgagcaactccctagtagcgcaccccaaggatcacagcaagaacagggtgaggaagagtcgctgccttcgagtgtgcctgaactccagcagctgttatgctgtactcgccaggaagctcgagccaggctccaggctcaggagcacggcgcagagaggctgaggatagagattgtaaccttacgtgaggctctggaggaggagaccgtggctagggcttccctggaaggccagctcagagtgcagcgagaggagacagaggtcctcgaggcatccctttgctccctgcgaactgaaatggaaagggttcagcaggagcagtccaaggcccaactgcccgatttgctgtcggagcaacgcgctaaggtgctgcgtttgcaggcagaattggagacatcagaacaagtccagagagactttgtgaggctgagtcaggctctgcaggttcgtctggagagaattcggcaagcagaaacccttgaacaggttcggagcatcatggatgaagccccactgaccgacgtgagggacatcaaagacacttag

SEQ ID NO: 216984 - DNA, 2171 bp, Artificial Sequence
  derived and/or modified sequence
gcgctccgtcaccagggagtgcgggaatccgccgtttgcgctgaggcaatggcggcagctgcgccggtggccgcggacgacgatgagcggcggcggcggccgggggctgcactggaggactcccggtcccaggaaggggcaaatggtgaggccgagtcaggtgagctcagccggcttcgggctgagctggcaggcgccctggcagaaatggaaaccatgaaggctgtggcagaggtgagcgagagcacgaaggccgaggctgtggctgcggtgcagcggcagtgccaagaggaggtggcctcgctgcaggccatcctgaaagactccatcagcagctatgaagcccagatcaccgccctgaagcaggagcgacagcagcagcagcaggactgtgaggagaaggagcgggagctgggccgcctgaagcagctgctgtcccgggcctaccccctggactccctggagaagcagatggaaaaggcccacgaggactcggagaagctgcgggagatcgtactgcccatggaaaaggagatcgaggagctgaaggcgaagctgctgagggccgaggagctgattcaggagatccagagacgtccccggcatgccccttccctgcacggctccacggagttgctgcccctgtcccgggatccatcgcccccgctggagcctctggaggagctgagcggagatgggggtccagccgctgaggccttcgctcacaactgcgatgacagcgcctccatctcctccttctcccttggcggtggggtcggcagcagctcctccctgccccaaagccgccagggcctgagccctgaacaggaagagacggcctcgctggtgtctacgggcaccctggttcccgagggcatctacctgccccctcctggctaccagctcgtcccagacactcagtgggagcagctgcagacagagatgcaggtgctcctggcccaggtccagaactcagagcagctgctgcggaccctgcaagggaccgtgagccaggcccaggagcgggtgcagctgcagatggcggagctggtcaccacccacaagtgcctgcaccatgaggtaaagcggttgaatgaggaaaaccaagggctccgggccgagcagctgccatcctcagccccccagggctcgcagcaggagcagggcgaggaggaatcactgcccagctctgtgccagagctgcagcagctgctgtgctgcacgcggcaagaggcgagggcccggctgcaggcccaggagcacggggccgagcgcctgcggatcgagatcgtgacgctgcgggaggctctggaggaggagacagtggccagggccagcctggaggggcagctgagggtgcagcgggaggagacagcctccctgtgcagcctgaggacagagatggagcgggtgcagcaggaacagagcaaggcccagctcccagacctcctctcagaacagagggccaaggtgctgcggctgcaggcagagctggagaccagtgagcaggtgcagagggatttcgtgcgactgtcccaggccctgcaggtgcgcctagagcggatccgccaggctgagaccctggagcaagtgcgcagcatcatggatgaggcgccactcacggacgtcagggacatcaaggacacctgaggggtcaggatatccccacccccaccctgggaaagacgcctttccccactcctgaaccatgaggcctcgctctggggtcttggatggcttttccaccgtccctgagactggggttgaggggactgacgggggccaccaccgccccgccctccagcgcctcctcccagggtggctgggcctcctgttctcagggatcacacctgggtgaggggcccaagcccctcccggaaccaaaggtgcaggctcaggcctgcggctttctggctgctgtgctgcctcctgggctccagccctcccctgcccccagcccgtcccctgcccagggcacagcggagccatgggggctgggagtccccatcagaggcagtgaggtgggccccggccctgggacaggcagctgccttctggtctgcatgacactaagacgcttgtccacagcggcgacccaggcctccaagcttgcacagaggcaaggccagacttttccgtcgtttattttcaataaataagcagctcagcgc

SEQ ID NO: 216985 - DNA, 2820 bp, Artificial Sequence
  derived and/or modified sequence
aacaaaatgggggtggggacgtgcaagtttcagactccgactaactacgcggggactccgaggcgctcagaaaaatgaagccgacccggccctgccccgagggacgctccaagagggcggaggtgcagggagggccccgccacaattcgcggtaacgcaagccaggctcgggcggaagggcggccggagccgatcaaaggctggctccgggcaggggcagcgagggagcgagggggagctctccgcaggccggtgtcccggaggaggcataattggagcagggcttccaaggtcacggagagacgccgggcaagacctcttaaggatcctcttccgggcttgaaaggcaggcgtcctcccgaaccgcgcgacccagccaagaagagccggggcggggccggggccggggccgggggccgactcgggaatcttcggccgaggctcggcaatccccccatcctccgtccggggcctccagcccggggccgatccggaaacagccgagcggatccggaaacagccgagaggacccggaagcggtgcgctccgtcaccagggagtgcgggaatccgccgtttgcgctgaggcaatggcggcagctgcgccggtggccgcggacgacgatgagcggcggcggcggccgggggctgcactggaggactcccggtcccaggaaggggcaaatggtgaggccgagtcaggtgagctcagccggcttcgggctgagctggcaggcgccctggcagaaatggaaaccatgaaggctgtggcagaggtgagcgagagcacgaaggccgaggctgtggctgcggtgcagcggcagtgccaagaggaggtggcctcgctgcaggccatcctgaaagactccatcagcagctatgaagcccagatcaccgccctgaagcaggagcgacagcagcagcagcaggactgtgaggagaaggagcgggagctgggccgcctgaagcagctgctgtcccgggcctaccccctggactccctggagaagcagatggaaaaggcccacgaggactcggagaagctgcgggagatcgtactgcccatggaaaaggagatcgaggagctgaaggcgaagctgctgagggccgaggagctgattcaggagatccagagacgtccccggcatgccccttccctgcacggctccacggagttgctgcccctgtcccgggatccatcgcccccgctggagcctctggaggagctgagcggagatgggggtccagccgctgaggccttcgctcacaactgcgatgacagcgcctccatctcctccttctcccttggcggtggggtcggcagcagctcctccctgccccaaagccgccagggcctgagccctgaacaggaagagacggcctcgctggtgtctacgggcaccctggttcccgagggcatctacctgccccctcctggctaccagctcgtcccagacactcagtgggagcagctgcagacagagggccgacagctgcagaaggacctggagagcgtcagtcgcgagcgggacgagctccaagagggcctgagacggagcaatgaggactgtgccaagcagatgcaggtgctcctggcccaggtccagaactcagagcagctgctgcggaccctgcaagggaccgtgagccaggcccaggagcgggtgcagctgcagatggcggagctggtcaccacccacaagtgcctgcaccatgaggtaaagcggttgaatgaggaaaaccaagggctccgggccgagcagctgccatcctcagccccccagggctcgcagcaggagcagggcgaggaggaatcactgcccagctctgtgccagagctgcagcagctgctgtgctgcacgcggcaagaggcgagggcccggctgcaggcccaggagcacggggccgagcgcctgcggatcgagatcgtgacgctgcgggaggctctggaggaggagacagtggccagggccagcctggaggggcagctgagggtgcagcgggaggagacagaggtgctggaggcctccctgtgcagcctgaggacagagatggagcgggtgcagcaggaacagagcaaggcccagctcccagacctcctctcagaacagagggccaaggtgctgcggctgcaggcagagctggagaccagtgagcaggtgcagagggatttcgtgcgactgtcccaggccctgcaggtgcgcctagagcggatccgccaggctgagaccctggagcaagtgcgcagcatcatggatgaggcgccactcacggacgtcagggacatcaaggacacctgaggggtcaggatatccccacccccaccctgggaaagacgcctttccccactcctgaaccatgaggcctcgctctggggtcttggatggcttttccaccgtccctgagactggggttgaggggactgacgggggccaccaccgccccgccctccagcgcctcctcccagggtggctgggcctcctgttctcagggatcacacctgggtgaggggcccaagcccctcccggaaccaaaggtgcaggctcaggcctgcggctttctggctgctgtgctgcctcctgggctccagccctcccctgcccccagcccgtcccctgcccagggcacagcggagccatgggggctgggagtccccatcagaggcagtgaggtgggccccggccctgggacaggcagctgccttctggtctgcatgacactaagacgcttgtccacagcggcgacccaggcctccaagcttgcacagaggcaaggccagacttttccgtcgtttattttcaataaataagcagctcagcgc

SEQ ID NO: 216986 - DNA, 1645 bp, Artificial Sequence
  derived and/or modified sequence
ggagtgcgggaatccgccgtttgcgctgaggcaatggcggcagctgcgccggtggccgcggacgacgatgagcggcggcggcggccgggggctgactccatcagcagctatgaagcccagatcaccgccctgaagcaggagcgacagcagcagcagcaggactgtgaggagaaggagcgggagctgggccgcctgaagcagctgctgtcccgggcctaccccctggactccctggagaagcagatggaaaaggcccacgaggactcggagaagctgcgggagatcgtactgcccatggaaaaggagatcgaggagctgaaggcgaagctgctgagggccgaggagctgattcaggagatccagagacgtccccggcatgccccttccctgcacggctccacggagttgctgcccctgtcccgggatccatcgcccccgctggagcctctggaggagctgagcggagatgggggtccagccgctgaggccttcgctcacaactgcgatgacagcgcctccatctcctccttctcccttggcggtggggtcggcagcagctcctccctgccccaaagccgccagggcctgagccctgaacaggaagagacggcctcgctggtgtctacgggcaccctggttcccgagggcatctacctgccccctcctggctaccagctcgtcccagacactcagtgggagcagctgcagacagagggccgacagctgcagaaggacctggagagcgtcagtcgcgagcgggacgagctccaagagggcctgagacggagcaatgaggactgtgccaagcagatgcaggtgctcctggcccaggtccagaactcagagcagctgctgcggaccctgcaagggaccgtgagccaggcccaggagcgggtgcagctgcagatggcggagctggtcaccacccacaagtgcctgcaccatgaggtaaagcggttgaatgaggaaaaccaagggctccgggccgagcagctgccatcctcagccccccagggctcgcagcaggagcagggcgaggaggaatcactgcccagctctgtgccagagctgcagcagctgctgtgctgcacgcggcaagaggcgagggcccggctgcaggcccaggagcacggggccgagcgcctgcggatcgagatcgtgacgctgcgggaggctctggaggaggagacagtggccagggccagcctggaggggcagctgagggtgcagcgggaggagacagaggtgctggaggcctccctgtgcagcctgaggacagagatggagcgggtgcagcaggaacagagcaaggcccagctcccagacctcctctcagaacagagggccaaggtgctgcggctgcaggcagagctggagaccagtgagcaggtgcagagggatttcgtgcgactgtcccaggccctgcaggtgcgcctagagcggatccgccaggctgagaccctggagcaagtgcgcagcatcatggatgaggcgccactcacggacgtcagggacatcaaggacacctgaggggtcaggatatccccacccccaccctgggaaagacgcctttccccactcctgaaccatgaggcctcgctctggggtcttggatggcttttccaccgtccctgagactggggtt

SEQ ID NO: 216987 - DNA, 1602 bp, Artificial Sequence
  derived and/or modified sequence
atggccgccgccgcccccgtggccgccgacgacgacgagagaagaagaagacccggcgccgccctggaggacagcagaagccaggagggcgccaacggcgaggccgagagcggcgagctgagcagactgagagccgagctggccggcgccctggccgagatggagaccatgaaggccgtggccgaggtgagcgagagcaccaaggccgaggccgtggccgccgtgcagagacagtgccaggaggaggtggccagcctgcaggccatcctgaaggacagcatcagcagctacgaggcccagatcaccgccctgaagcaggagagacagcagcagcagcaggactgcgaggagaaggagagagagctgggcagactgaagcagctgctgagcagagcctaccccctggacagcctggagaagcagatggagaaggcccacgaggacagcgagaagctgagagagatcgtgctgcccatggagaaggagatcgaggagctgaaggccaagctgctgagagccgaggagctgatccaggagatccagagaagacccagacacgcccccagcctgcacggcagcaccgagctgctgcccctgagcagagaccccagcccccccctggagcccctggaggagctgagcggcgacggcggccccgccgccgaggccttcgcccacaactgcgacgacagcgccagcatcagcagcttcagcctgggcggcggcgtgggcagcagcagcagcctgccccagagcagacagggcctgagccccgagcaggaggagaccgccagcctggtgagcaccggcaccctggtgcccgagggcatctacctgcccccccccggctaccagctggtgcccgacacccagtgggagcagctgcagaccgagatgcaggtgctgctggcccaggtgcagaacagcgagcagctgctgagaaccctgcagggcaccgtgagccaggcccaggagagagtgcagctgcagatggccgagctggtgaccacccacaagtgcctgcaccacgaggtgaagagactgaacgaggagaaccagggcctgagagccgagcagctgcccagcagcgccccccagggcagccagcaggagcagggcgaggaggagagcctgcccagcagcgtgcccgagctgcagcagctgctgtgctgcaccagacaggaggccagagccagactgcaggcccaggagcacggcgccgagagactgagaatcgagatcgtgaccctgagagaggccctggaggaggagaccgtggccagagccagcctggagggccagctgagagtgcagagagaggagaccgccagcctgtgcagcctgagaaccgagatggagagagtgcagcaggagcagagcaaggcccagctgcccgacctgctgagcgagcagagagccaaggtgctgagactgcaggccgagctggagaccagcgagcaggtgcagagagacttcgtgagactgagccaggccctgcaggtgagactggagagaatcagacaggccgagaccctggagcaggtgagaagcatcatggacgaggcccccctgaccgacgtgagagacatcaaggacacctag

SEQ ID NO: 216988 - DNA, 1710 bp, Artificial Sequence
  derived and/or modified sequence
atggccgccgccgcccccgtggccgccgacgacgacgagagaagaagaagacccggcgccgccctggaggacagcagaagccaggagggcgccaacggcgaggccgagagcggcgagctgagcagactgagagccgagctggccggcgccctggccgagatggagaccatgaaggccgtggccgaggtgagcgagagcaccaaggccgaggccgtggccgccgtgcagagacagtgccaggaggaggtggccagcctgcaggccatcctgaaggacagcatcagcagctacgaggcccagatcaccgccctgaagcaggagagacagcagcagcagcaggactgcgaggagaaggagagagagctgggcagactgaagcagctgctgagcagagcctaccccctggacagcctggagaagcagatggagaaggcccacgaggacagcgagaagctgagagagatcgtgctgcccatggagaaggagatcgaggagctgaaggccaagctgctgagagccgaggagctgatccaggagatccagagaagacccagacacgcccccagcctgcacggcagcaccgagctgctgcccctgagcagagaccccagcccccccctggagcccctggaggagctgagcggcgacggcggccccgccgccgaggccttcgcccacaactgcgacgacagcgccagcatcagcagcttcagcctgggcggcggcgtgggcagcagcagcagcctgccccagagcagacagggcctgagccccgagcaggaggagaccgccagcctggtgagcaccggcaccctggtgcccgagggcatctacctgcccccccccggctaccagctggtgcccgacacccagtgggagcagctgcagaccgagggcagacagctgcagaaggacctggagagcgtgagcagagagagagacgagctgcaggagggcctgagaagaagcaacgaggactgcgccaagcagatgcaggtgctgctggcccaggtgcagaacagcgagcagctgctgagaaccctgcagggcaccgtgagccaggcccaggagagagtgcagctgcagatggccgagctggtgaccacccacaagtgcctgcaccacgaggtgaagagactgaacgaggagaaccagggcctgagagccgagcagctgcccagcagcgccccccagggcagccagcaggagcagggcgaggaggagagcctgcccagcagcgtgcccgagctgcagcagctgctgtgctgcaccagacaggaggccagagccagactgcaggcccaggagcacggcgccgagagactgagaatcgagatcgtgaccctgagagaggccctggaggaggagaccgtggccagagccagcctggagggccagctgagagtgcagagagaggagaccgaggtgctggaggccagcctgtgcagcctgagaaccgagatggagagagtgcagcaggagcagagcaaggcccagctgcccgacctgctgagcgagcagagagccaaggtgctgagactgcaggccgagctggagaccagcgagcaggtgcagagagacttcgtgagactgagccaggccctgcaggtgagactggagagaatcagacaggccgagaccctggagcaggtgagaagcatcatggacgaggcccccctgaccgacgtgagagacatcaaggacacctag

SEQ ID NO: 216989 - DNA, 1497 bp, Artificial Sequence
  derived and/or modified sequence
atggccgccgccgcccccgtggccgccgacgacgacgagagaagaagaagacccggcgccgacagcatcagcagctacgaggcccagatcaccgccctgaagcaggagagacagcagcagcagcaggactgcgaggagaaggagagagagctgggcagactgaagcagctgctgagcagagcctaccccctggacagcctggagaagcagatggagaaggcccacgaggacagcgagaagctgagagagatcgtgctgcccatggagaaggagatcgaggagctgaaggccaagctgctgagagccgaggagctgatccaggagatccagagaagacccagacacgcccccagcctgcacggcagcaccgagctgctgcccctgagcagagaccccagcccccccctggagcccctggaggagctgagcggcgacggcggccccgccgccgaggccttcgcccacaactgcgacgacagcgccagcatcagcagcttcagcctgggcggcggcgtgggcagcagcagcagcctgccccagagcagacagggcctgagccccgagcaggaggagaccgccagcctggtgagcaccggcaccctggtgcccgagggcatctacctgcccccccccggctaccagctggtgcccgacacccagtgggagcagctgcagaccgagggcagacagctgcagaaggacctggagagcgtgagcagagagagagacgagctgcaggagggcctgagaagaagcaacgaggactgcgccaagcagatgcaggtgctgctggcccaggtgcagaacagcgagcagctgctgagaaccctgcagggcaccgtgagccaggcccaggagagagtgcagctgcagatggccgagctggtgaccacccacaagtgcctgcaccacgaggtgaagagactgaacgaggagaaccagggcctgagagccgagcagctgcccagcagcgccccccagggcagccagcaggagcagggcgaggaggagagcctgcccagcagcgtgcccgagctgcagcagctgctgtgctgcaccagacaggaggccagagccagactgcaggcccaggagcacggcgccgagagactgagaatcgagatcgtgaccctgagagaggccctggaggaggagaccgtggccagagccagcctggagggccagctgagagtgcagagagaggagaccgaggtgctggaggccagcctgtgcagcctgagaaccgagatggagagagtgcagcaggagcagagcaaggcccagctgcccgacctgctgagcgagcagagagccaaggtgctgagactgcaggccgagctggagaccagcgagcaggtgcagagagacttcgtgagactgagccaggccctgcaggtgagactggagagaatcagacaggccgagaccctggagcaggtgagaagcatcatggacgaggcccccctgaccgacgtgagagacatcaaggacacctag

SEQ ID NO: 216990 - protein, 1018 aa, Artificial Sequence
  derived and/or modified sequence
MVSHFMGSLSVLCFLLLLGFQFVCPQPSTQHRKVPQRMAAEGAPEDDGGGGAPGVWGAWGPWSACSRSCSGGVMEQTRPCLPRSYRLRGGQRPGAPARAFADHVVSAVRTSVPLHRSRDETPALAGTDASRQGPTVLRGSRHPQPQGLEVTGDRRSRTRGTIGPGKYGYGKAPYILPLQTDTAHTPQRLRRQKLSSRHSRSQGASSARHGYSSPAHQVPQHGPLYQSDSGPRSGLQAAEAPIYQLPLTHDQGYPAASSLFHSPETSNNHGVGTHGATQSFSQPARSTAISCIGAYRQYKLCNTNVCPESSRSIREVQCASYNNKPFMGRFYEWEPFAEVKGNRKCELNCQAMGYRFYVRQAEKVIDGTPCDQNGTAICVSGQCKSIGCDDYLGSDKVVDKCGVCGGDNTGCQVVSGVFKHALTSLGYHRVVEIPEGATKINITEMYKSNNYLALRSRSGRSIINGNWAIDRPGKYEGGGTMFTYKRPNEISSTAGESFLAEGPTNEILDVYMIHQQPNPGVHYEYVIMGTNAISPQVPPHRRPGEPFNGQMVTEGRSQEEGEQKGRNEEKEDLRGEAPEMFTSESAQTFPVRHPDRFSPHRPDNLVPPAPQPPRRSRDHNWKQLGTTECSTTCGKGSQYPIFRCVHRSTHEEAPESYCDSSMKPTPEEEPCNIFPCPAFWDIGEWSECSKTCGLGMQHRQVLCRQVYANRSLTVQPYRCQHLEKPETTSTCQLKICSEWQIRTDWTSCSVPCGVGQRTRDVKCVSNIGDVVDDEECNMKLRPNDIENCDMGPCAKSWFLTEWSERCSAECGAGVRTRSVVCMTNHVSSLPLEGCGNNRPAEATPCDNGPCTGKVEWFAGSWSQCSIECGSGTQQREVICVRKNADTFEVLDPSECSFLEKPPSQQSCHLKPCGAKWFSTEWSMCSKSCQGGFRVREVRCLSDDMTLSNLCDPQLKPEERESCNPQDCVPEVDENCKDKYYNCNVVVQARLCVYNYYKTACCASCTRVANRQTGFLGSR

SEQ ID NO: 216991 - DNA, 3057 bp, Artificial Sequence
  derived and/or modified sequence
atggtgagccattttatggggtccctgagcgttctgtgctttttgttacttcttggatttcagtttgtgtgccctcaaccaagcacacagcatcgaaaggtgccccagcgcatggccgctgagggcgcaccagaggacgacggaggcggtggggctcccggtgtctggggagcgtggggtccgtggtctgcctgctctcgaagctgctcagggggagtcatggaacaaacccgaccatgtctccctcggtcctaccgccttcgcggaggtcagcggcctggcgctcccgctagggcgttcgccgaccacgtcgtcagcgcagtccggactagcgttccattgcataggagtcgggatgagaccccggcacttgctggcactgatgccagcagacaggggcctaccgtcctgcggggtagtcggcacccccagcctcaggggctggaagttaccggtgacaggcgttctcggacaagaggaacaattggaccagggaaatatggctacggaaaagccccttatatcttgcctttgcaaacagataccgctcacactccacaaagacttaggcggcagaagctcagctccaggcactccagatcccagggcgcttcatcagctagacatggctacagcagtccggctcatcaagtgccgcaacacggtcccctataccagagcgactctggaccacggagcgggcttcaggcggcagaggccccaatttaccagttacctctcactcacgaccaaggctatccagcggcaagcagtctgttccactcgccggagacctccaacaaccatggggtaggaacgcatggtgccactcagagcttctctcagccagcacggagtacagctattagttgtatcggggcataccgccagtacaagctatgtaatacaaatgtctgtcccgagtccagtcgctcaattcgggaggtccagtgtgcttcctacaataacaaaccattcatgggtaggttttatgagtgggaaccatttgccgaagtaaaagggaacaggaagtgcgaacttaactgccaggccatggggtaccgattctacgtcaggcaggcagagaaggttattgacggtacaccctgcgaccagaatggcactgctatctgcgttagcggtcagtgcaagagcattggatgcgacgattatctgggcagcgacaaggtggtggacaaatgtggggtgtgcgggggagacaatacagggtgccaggtggtttccggagtgtttaaacacgccctgaccagtctcggttaccaccgcgtcgtcgaaattccagagggagctacaaaaattaatattactgaaatgtataaatctaacaactaccttgcacttagatcacggtcaggccgttctataattaacgggaattgggcaatcgatcgacctggcaagtatgaagggggtggtacaatgttcacgtataagagacccaacgagatctcaagcacagcgggtgagagctttctggcggagggtcctactaatgaaattctggatgtctatatgattcatcagcaaccgaatcctggggtccactatgaatacgtgattatggggacaaatgccattagcccgcaagtccctccccatcgcagacctggcgagcccttcaacggtcagatggtgacagaaggccgttcccaggaagagggagagcagaagggaaggaatgaggaaaaggaagatctgagaggggaggcccctgaaatgttcactagtgagagcgcccagacatttcccgtacgccatccggatcggttcagtccccaccggccagataatctggtgcctccagcgccacagccaccaagaaggtcccgcgaccacaattggaaacagcttggtacgacagagtgctccaccacttgcggtaaaggctcacagtatccaattttccgctgtgtccatcgaagtactcacgaagaggctccagaaagttactgcgattcatctatgaagccaactccggaggaagagccctgcaatatcttcccatgtcccgcattctgggatattggtgaatggagcgaatgcagcaaaacgtgcggactgggtatgcagcacaggcaggtgttgtgtagacaagtgtacgccaaccgctccctcactgtgcaaccgtatagatgtcagcacctggaaaaaccagagacaaccagtacctgtcagctcaaaatttgcagcgagtggcagattcgtacagattggacttcctgcagcgtgccctgtggcgtcggacaacgaaccagggacgtgaagtgcgttagtaacatcggggatgtggtggacgatgaggaatgcaatatgaaactacgccctaatgatattgagaactgtgacatgggcccatgcgccaagagctggtttctgaccgagtggtcagaacgatgctctgccgaatgcggcgcaggagtgcgcacgaggtccgtagtttgcatgactaatcatgtctcttctcttccactggagggctgcggcaacaatcgtcccgcagaagccacaccatgcgacaacgggccttgtactgggaaggtcgaatggtttgccggatcatggtctcagtgctctatcgagtgtggctctgggacacagcagcgggaagtcatctgtgtgagaaaaaacgctgacacgtttgaggtgctggatccctcagagtgtagcttcctcgagaagccgccttcccagcagtcttgtcacctcaaaccatgtggggctaaatggttctcaactgagtggtccatgtgttctaaatcttgccaggggggattcagagtgcgagaggtgagatgcctgagtgatgatatgaccctcagcaacctgtgcgatccacaactgaagcccgaggagcgggagtcctgcaatccacaggattgtgtccctgaggtagatgaaaattgcaaggacaaatactataattgtaacgtggtcgtgcaggcccgtctttgtgtgtacaactactacaaaactgcatgttgcgcaagctgcaccagggttgctaacaggcaaacaggcttcttagggagccgctag

SEQ ID NO: 216992 - DNA, 3057 bp, Artificial Sequence
  derived and/or modified sequence
atggtgagccactttatggggagcttaagcgtgctgtgtttcctcctcttattgggcttccagtttgtatgtccacaaccctccactcagcacaggaaggtgcctcagagaatggccgctgagggcgcaccagaggatgacgggggagggggagcacctggcgtgtggggggcttgggggccatggagtgcctgtagcagaagctgttctggtggcgtgatggagcagacccgtccatgtttaccaagatcgtacaggctgagggggggtcagaggccaggggctccagccagagcttttgccgaccacgtggtgtccgcagtgcgcactagcgtgccgctgcaccgatcaagagatgagacccctgcccttgccggaaccgatgcctctcggcagggacctaccgtgctgcgcggatcccgacacccccagccacaaggcctggaggtaactggtgataggcgatcgcggacccgcggtaccattgggcctggtaaatatggctatggaaaggcgccttacattctgcctctccagaccgacactgcgcatacacctcagcgattacggcgacaaaagttgtcctctcggcatagcagaagccagggggcaagctctgcacgtcatggatatagctcccctgcccatcaggtaccgcagcacggtccgctgtaccagagcgattcagggcctaggtcggggcttcaggctgcggaagcgcctatttatcagctaccattaacccacgatcaggggtaccccgctgcttctagcctttttcacagccctgaaacctccaacaaccatggcgtgggtacgcacggagccacacagagcttcagccaacccgcacgaagtaccgcaataagctgtatcggagcctataggcagtataagctgtgcaacaccaatgtttgtccagagtcttcaaggagcatccgtgaggtgcagtgcgcatcctataataacaaacctttcatgggccgattttatgagtgggaaccatttgccgaggtgaagggcaataggaaatgcgagttgaactgccaagccatgggatacaggttctatgtcaggcaggcggagaaagtgatcgatggcactccatgcgatcagaatggaactgccatctgcgttagtggtcagtgcaagtccataggatgtgacgattatctgggtagcgacaaggtcgtagacaagtgcggagtgtgtggtggagataataccggttgtcaggttgtgtcaggagtatttaagcacgctttgactagcctcggataccatcgtgttgtcgaaatcccagaaggtgccacgaagataaatatcaccgagatgtacaagtcgaacaactatctggcactgcggagtagatcaggtcggtcaatcataaacggaaactgggcgattgaccgccctgggaaatatgaagggggtggtacaatgttcacatataaacgccctaacgagatctcgtctacagcaggagagagctttctggcggagggacccaccaatgagatccttgatgtgtacatgatccatcagcaacccaacccaggagtgcattacgaatatgtgatcatgggcacgaacgcaattagcccacaggtgccacctcatcggagacctggagagccttttaatggacagatggtaaccgaaggacggagccaggaggaaggcgagcagaagggcagaaacgaagagaaggaggacctccggggagaggctcccgaaatgttcaccagtgagagcgcccagactttccccgtcagacaccctgatcgcttcagtccacaccgccctgataatttggtccccccagcgccacaaccaccccgacggtctcgagaccacaattggaagcagctgggaactacggagtgcagcaccacctgcgggaagggaagccagtatcctattttccgatgtgtacatcgatccacgcacgaagaagctcccgagtcttattgtgatagctcaatgaagcccacaccagaagaggagccttgcaatatttttccctgcccagccttctgggacattggggagtggagcgaatgctccaagacttgcggtctaggcatgcaacacagacaggtgctgtgtcgccaggtgtatgcaaacaggagtctcaccgtgcagccctataggtgccagcacctggagaagccagaaacaacttccacgtgccagcttaaaatctgcagcgagtggcaaatcagaaccgactggacctcttgcagcgtcccatgcggagttggccagcgcacaagggatgtaaagtgcgtgagcaatatcggggacgtcgttgacgatgaggagtgtaatatgaaactccgcccaaacgacatcgagaattgtgacatgggaccttgtgcgaagtcctggtttctgacggagtggtctgagcgctgttccgccgaatgcggggctggtgtgcggactcgctcagtggtctgcatgacaaaccacgtctccagtctgccattggaagggtgtggcaacaaccgccctgcagaagcaacaccttgcgataatggaccgtgcaccggcaaagttgagtggttcgccggttcatggtctcaatgttctatagagtgtggatcgggcacccagcagcgagaagtgatatgcgtgcggaagaacgccgatacctttgaggtgctcgacccttccgagtgctcattcttagagaagcctccttctcagcagtcttgccatcttaagccgtgcggagcaaaatggttctccaccgaatggtcaatgtgttcaaaatcctgccagggtggcttccgagtgcgggaggtccgctgcctgtctgacgatatgactcttagcaatttatgcgaccctcagctaaaacccgaagaaagggagtcttgcaatcctcaggactgtgtgccggaggtagatgagaattgcaaagacaagtactacaattgtaatgtggtcgtgcaggccaggctctgcgtatacaattactacaaaacggcttgttgcgcaagctgtacccgcgttgctaataggcaaaccggcttcttgggctcccgctag

SEQ ID NO: 216993 - DNA, 3057 bp, Artificial Sequence
  derived and/or modified sequence
atggtgagccatttcatgggctctttatccgtcttatgctttctcctattacttggatttcagttcgtctgtcctcagccctctacacaacatcggaaggttccccagcggatggctgctgagggggcaccggaagatgacggcgggggcggtgccccaggtgtgtggggggcttggggtccttggtcggcctgtagtaggagttgttcagggggagttatggagcagactagaccctgtctgcccagatcctatcgcctgaggggcggacaacgacctggagcgcctgctcgcgcctttgcagatcatgtggtgagcgcagttcgcacctccgtgcccctgcaccgttcacgtgatgagacaccagcactggcaggcaccgacgcctctagacaaggaccaaccgtactgaggggctcccggcatcctcagccccaggggctagaagtgaccggtgatcgtcgatcccggacccgaggaaccattggcccaggtaagtacggctacggaaaggctccttatatactccccctgcagaccgacacagcccacacaccacagaggctccgtcgtcaaaagctctcctcacgacatagtcggagtcagggagcatcatctgcccggcacggatattcaagcccagcacatcaggtaccccagcacggacccctctatcagtccgacagtggtcctagatctggactgcaggcggcggaagcccccatttatcagctgccgctaacacacgatcaagggtacccagccgctagctccctgttccactcacctgagacctcaaataaccacggggtaggaacccatggtgccactcagtctttctcccaacctgctcgctctacagctatttcctgtatcggagcctatcggcaatacaaactctgcaacaccaacgtctgccccgaaagcagccgatcaatccgcgaagtgcagtgtgccagttacaataataaaccgttcatgggccgattctacgagtgggagccatttgccgaggtgaagggcaacagaaagtgcgaactgaattgccaggccatgggttatcgattctatgtcagacaggccgaaaaagttattgacggcactccctgcgaccagaacggcacggccatctgcgtgtcaggtcagtgtaagtcaattggctgtgatgactatcttggttctgataaggtggtggacaaatgtggggtatgtggaggagacaatactggttgtcaggtcgtgtccggcgtattcaaacatgccctaacatcactcggctaccacagggttgtggagatccccgagggcgctaccaaaataaacatcacagaaatgtataagtcaaataactacctcgccctgaggagtcggagcggcaggtctataatcaacggcaattgggcgattgaccggccggggaagtatgaaggcgggggcaccatgtttacttataagcgaccgaatgagatctctagcacagcgggcgaatctttcttggctgagggtcctacaaacgagattctcgacgtgtatatgattcatcagcagcctaatccaggagttcactacgaatacgttatcatggggactaacgccatttccccccaggtacctccccacagacgtccaggtgagccttttaacggccaaatggtgaccgaggggcggtcacaggaagagggcgagcagaaaggaaggaatgaagagaaggaggacctgcgtggggaagctcctgagatgtttacctccgaatccgcgcagacttttccagtgcgtcacccagaccgcttttcaccacaccgtcccgataatttagtcccgcccgcgcctcagccgccacgacgttcaagagaccataattggaaacaattgggaactaccgagtgttctaccacgtgcggtaaaggatcacagtatcctatttttagatgcgtccatcgatctactcatgaggaggccccggaatcttactgtgactctagtatgaagccgacacccgaggaagagccctgcaacatctttccctgtcccgccttttgggatatcggcgaatggtcagagtgctccaagacctgtggtctcgggatgcagcaccggcaggtactgtgccggcaagtttacgcgaatcggtcattaaccgtgcagccctatagatgtcagcacttagaaaagcccgaaactacaagtacctgccagctcaagatttgctctgagtggcagatccgcacagactggacctcgtgttccgtgccttgtggcgtgggtcaacgaactcgggatgtgaagtgtgtttccaatattggggacgttgtcgacgatgaggaatgcaacatgaaactccgccctaatgacattgaaaactgtgatatgggtccctgcgctaaaagctggtttttgaccgaatggagcgagcggtgctccgctgaatgcggtgctggggtgaggaccagatctgtagtttgcatgaccaatcatgtctcttcactacctttggagggatgcgggaacaaccgtcctgcagaggccaccccatgtgataatggcccttgtaccggtaaggttgagtggtttgccggctcctggtcccagtgcagcattgagtgtggctccggcacacagcagagagaagtcatctgtgttagaaaaaacgccgatacttttgaagtcttggacccatctgaatgttcatttctcgagaaacccccaagtcaacagtcctgccacttaaagccctgcggagcaaagtggttttctaccgagtggagtatgtgttccaaatcttgtcagggtggatttcgggttcgcgaggtccgctgtctgagtgatgatatgaccctctccaacttatgtgacccccagctcaaacccgaagagcgcgaatcttgtaatccacaggattgtgtacctgaggtcgacgagaattgtaaagataagtactacaactgtaatgtcgttgtccaggctcgcctgtgtgtttataactactacaagaccgcttgctgcgcttcatgtaccagagtcgcaaatcgacagacaggctttttaggcagcaggtag

SEQ ID NO: 216994 - DNA, 3057 bp, Artificial Sequence
  derived and/or modified sequence
atggtgtctcatttcatggggagtctcagtgtactttgtttcctgctgctgctcggattccagttcgtgtgcccacagccttcgacgcaacataggaaggtcccacagcgaatggctgctgaaggagctccagaagacgacggtgggggaggggcccccggtgtttggggggcctggggcccgtggtccgcctgctcacggtcctgcagcggaggggtgatggaacaaacgagaccgtgtttgcctcgctcttaccgtctaagagggggacagcggcccggcgcacccgccagagcatttgctgaccatgtcgtctctgcagtcaggacttcagtacctctccataggtcccgggatgagacccccgccctcgcgggcaccgacgcttcaaggcaaggcccgacagtactgaggggatcccggcacccacaacctcaggggctggaagtgaccggtgacagaagaagccggactcgtgggactatcggacctggaaaatacggatatggcaaagctccctacatactacctctgcagacggataccgcccacacacctcaaagacttagacgacagaagctatccagcaggcattctcgctctcagggggccagttccgctcggcatggttattcttccccggcccatcaggtcccacagcacggccccctgtatcaatcagattcaggtcctaggtctggcctgcaggccgccgaggctcccatatatcagctccccctaacccacgatcagggctacccagcggcatcaagcctcttccattcacccgagaccagcaataatcacggcgtcggcactcacggcgctacacaatcgttttcccagccagcccggtccactgcgatcagctgcatcggcgcctaccgtcagtataagctatgcaacaccaatgtgtgtccagagagcagccgttctatccgggaagttcaatgtgccagttataataacaagcctttcatgggtcgcttctacgagtgggagcccttcgccgaggtgaaagggaacaggaagtgtgaactgaactgtcaggccatggggtatcggttttacgtgcgccaggcggaaaaggtcattgacggaaccccttgcgatcagaacggcaccgccatctgcgtgagcgggcaatgtaagagcattggctgcgacgattatttagggtctgataaagtggtagacaagtgcggtgtatgcgggggagacaatactggctgtcaagttgttagcggagtgttcaaacatgctcttactagtctcggctatcaccgcgttgtcgaaatcccagagggagccaccaaaataaacatcacagaaatgtacaagtctaataactacttggccctccggtctcgcagtggccgcagcatcatcaacggaaactgggcaatcgatcggcctggaaagtacgaaggcggaggcaccatgttcacctataaaagacctaacgaaatatctagtaccgccggcgaatccttcctcgctgaggggcctaccaacgaaattcttgacgtctatatgatacaccagcaacctaatccaggagttcattacgagtacgtgatcatggggactaacgctatttcacctcaagtccccccccatcgaaggcctggcgagccgtttaatggtcagatggtaactgagggacgctcccaagaggagggcgagcaaaagggacgtaacgaagaaaaggaggacttacgcggcgaagcgcctgaaatgttcacaagcgagagcgctcaaacctttccagtcaggcatcccgatcgtttcagccctcaccggcccgacaacctcgtaccccccgcacctcagcccccacgcagatcccgtgaccataactggaagcagctgggcaccactgagtgctcaacgacttgtggtaaggggtcccagtacccaatattccgctgtgttcaccggtccactcacgaggaggccccagagagctattgtgatagttccatgaagccaaccccagaggaggaaccatgcaacatatttccttgccccgccttttgggacatcggagagtggagcgagtgcagcaagacctgcggcctcggcatgcagcatagacaggtgctttgtagacaggtgtatgccaatagatcactgacggtgcaaccctacaggtgccagcacctggagaagccagagaccacttccacatgccaactgaagatttgtagcgaatggcagatcagaacagattggacctcctgctccgttccttgtggtgtgggccagcgcactcgcgatgtgaagtgtgtttctaacatcggagacgtggtggacgatgaggaatgcaacatgaagttaaggcccaatgatattgagaactgtgacatgggcccatgcgctaaatcctggtttttaacagaatggtctgagcggtgctctgccgaatgcggagccggggtgcggacacgatccgtcgtttgcatgaccaatcacgtcagtagcctgccccttgaaggatgcggcaacaaccggcctgctgaagccaccccatgcgacaacgggccttgcacaggcaaagtggaatggtttgctggctcctggagtcaatgttcgatcgagtgtggctcagggactcagcagagggaggtgatctgtgtgagaaaaaatgctgacaccttcgaagttttagacccctcagagtgcagtttcttggagaaacctcccagccagcagtcttgtcatcttaaaccgtgcggtgctaaatggttctcaacggaatggtcaatgtgcagcaaaagctgtcagggcggatttcgtgtcagggaagtccgctgcttgtctgatgacatgaccctgtctaacctatgtgatccccagctcaagccagaagaacgtgagtcctgtaaccctcaggattgcgtgccggaggtggacgagaactgtaaagacaagtactacaattgtaatgtcgttgtgcaggccagactatgtgtttataattactacaagactgcgtgctgtgcatcctgcacaagggtagccaatcgtcaaaccggctttcttggcagtcgatag

SEQ ID NO: 216995 - DNA, 3057 bp, Artificial Sequence
  derived and/or modified sequence
atggtgagtcactttatgggcagcttgtctgtgctttgctttcttctactgttgggctttcaattcgtgtgtccccagccttctactcagcataggaaggttccacagcgcatggccgctgaaggcgccccagaggatgatggagggggcggtgcacccggagtttggggtgcgtgggggccatggtctgcgtgcagtcggtcatgcagcgggggggtaatggagcaaacccgtccatgcttgcctagatcttaccgtcttcgaggaggccaacgtcctggagcccctgcgagagcgtttgccgatcacgtcgtgagcgcggtaagaacttcagtgcccctccacagaagtagagacgagactcctgccctggctggcaccgatgcgtccaggcagggccccacagtgttgagaggttcgcgtcatccccagcctcaaggacttgaagtcacgggcgataggaggagccggactagagggacaattggccctggtaaatatggttatggcaaagccccctacatcctccctttacagacggacacggctcacacccctcaacggttacgtcgacagaaactttcttcacgccactctagaagccagggcgcctcctcagcccggcacggctattcctcgccagcacatcaagtccctcaacacggtccactgtaccaaagcgactccggcccacggtccggtctccaggccgccgaggctcctatctaccagctaccactcactcacgatcaaggatatccagcggcctcctctctgtttcacagcccggaaacatctaataatcacggcgttgggactcatggcgcaacacaatctttcagtcagccagctcgttcaactgcaatcagctgtatcggggcctacaggcagtataaattgtgtaataccaatgtgtgtcctgaatcatcccgaagcatcagagaagttcagtgcgcttcatataacaacaaaccatttatgggccggttttatgagtgggaaccatttgctgaggttaaaggaaacagaaaatgtgaattaaactgccaggccatgggctaccggttctatgttcggcaggctgaaaaggtaattgacggaaccccatgcgaccagaacggaacggccatttgcgtgtctggccagtgtaaaagcatcggatgcgacgattacttgggaagtgacaaggtggtagacaaatgtggggtgtgcggcggtgataacacaggatgtcaggtggtgagcggcgtttttaaacacgcactgacctcattgggctatcatcgagtagttgagataccagagggggccacgaaaattaatatcacagaaatgtataagagcaacaactacttggcgctgcggtcgaggagcggcaggagcatcattaacggcaattgggctatcgacaggcccggaaaatacgaagggggcggcaccatgtttacatacaaacggccaaacgagatttcgtccactgcaggggaatcattcctggctgaaggaccaactaacgaaatactcgacgtgtacatgatacaccaacaaccaaaccccggcgtgcattacgaatatgttattatgggcactaatgcgatctcaccacaagtgcctccccaccggcggccaggagaaccatttaacggacagatggtaacagagggacgatctcaagaggaaggcgagcaaaaagggaggaacgaagaaaaggaggacctaagaggggaagctcccgagatgtttacatcagagagcgctcagacctttcccgtccgacaccctgaccgcttctcccctcaccgtcccgacaacctcgtgccacccgcccctcaacctccacgacggagcagggatcacaactggaaacaacttggaaccaccgagtgctccactacctgcggtaagggatcacaatatccaatttttagatgcgtccaccggtctactcacgaagaagccccagagtcctactgtgatagttcaatgaaacctacacctgaagaagaaccttgtaatatcttcccctgcccagcattctgggatataggcgagtggtcagagtgcagcaagacgtgcggactgggcatgcagcacaggcaggtgttgtgcagacaggtctacgcaaaccgatccctcaccgttcagccctaccgatgccaacatctggaaaagcccgagaccacttcaacttgtcagctaaagatctgctcagagtggcagattcgtactgactggacgagttgctcagtaccatgcggcgttggtcaacgcacccgggacgtgaaatgtgtttctaacatcggagacgtggtcgacgacgaagaatgtaacatgaaactacgacctaacgacatcgagaactgcgacatgggcccttgcgcaaaatcctggtttttgacggagtggagtgaaagatgttctgccgaatgcggggctggagtgaggacacggtctgttgtttgcatgacaaaccacgtctcttctttacccctcgagggctgtgggaataatcgccctgctgaggcaacaccatgtgacaatggaccgtgcacaggcaaggtggagtggtttgcaggatcatggtctcagtgtagcattgagtgcgggagcgggacacaacaaagggaggtcatatgcgtgcgcaaaaacgccgatacattcgaagtgctggacccctctgagtgtagctttttggagaaacccccaagtcaacagtcctgccacttaaagccctgcggagcaaagtggttttctaccgagtggagtatgtgttccaaatcttgtcagggtggatttcgggttcgcgaggtccgctgtctgagtgatgatatgaccctctccaacttatgtgacccccagctcaaacccgaagagcgcgaatcttgtaatccacaggattgtgtacctgaggtcgacgagaattgtaaagataagtactacaactgtaatgtcgttgtccaggctcgcctgtgtgtttataactactacaagaccgcttgctgcgcctcttgcacccgtgtcgccaatcgccaaactggattccttggatctcgctag

SEQ ID NO: 216996 - DNA, 3057 bp, Artificial Sequence
  derived and/or modified sequence
atggtaagtcacttcatgggatcacttagtgtgctatgctttcttcttctgctcggtttccagttcgtgtgccctcagccatcaacacagcatagaaaggtcccacaacggatggcagccgaaggagctccagaagatgatggcggcgggggggctccaggtgtctggggagcatgggggccctggtccgcgtgttctcgctcatgtagtggcggggtgatggagcagactaggccctgcttgcctcgatcatacagactgcggggcggtcagcgaccgggtgctccggccagagcttttgccgaccacgttgtctcagccgttcggacctccgttccacttcacaggtctcgcgacgaaacaccagccctggcagggacagacgcatctagacagggccctaccgtgctccggggctcaagacatccccaaccccaaggccttgaagtcaccggcgacagacgctcacggacaaggggaaccatcggccccgggaagtatgggtatggcaaagccccgtatatcctgcccctacagaccgataccgcccacaccccacagcgactcagacgccaaaaattgtcctcgcgacacagtaggtcccagggagcgagttcagcacggcacgggtactcttcacccgcccatcaagtgcctcagcatggacccttatatcagagcgactcaggtccacggagtggtcttcaagccgcggaagcccctatttatcagctgcctctgacgcacgatcaaggttatccggctgcctcttccctcttccattccccagaaacaagcaataatcacggtgttgggactcacggtgccacccaatccttcagtcagcccgcccgcagcaccgcaatctcttgtatcggagcatacaggcagtacaaactttgtaacacgaacgtatgtccagagagcagtagaagcatacgcgaagtccagtgcgcctcctacaataacaaaccatttatggggcgattttatgaatgggaacctttcgccgaggtaaaggggaatagaaagtgtgaactcaactgtcaggccatgggctataggttttatgtgcgccaggcggagaaagtcatcgatgggaccccatgtgaccaaaacggtactgccatttgtgttagcggacagtgtaagagcatagggtgtgatgactacttaggtagcgataaggtggttgataagtgcggtgtgtgtggcggagacaacaccggctgtcaagtggtatccggcgtatttaaacatgccctgacaagtttaggctatcatagagtcgtggagattcccgaaggtgcaacaaaaatcaacattaccgaaatgtacaagtctaataattatctggctttgaggagccgaagcggacgtagcatcattaatggaaattgggcgatcgacagaccgggaaagtacgagggggggggaacaatgtttacatataaacgtcctaatgaaatcagctcgaccgctggagaaagcttcttggccgagggccccacgaacgagatactagacgtatacatgattcaccagcaaccaaaccccggcgtacattatgagtacgtgatcatgggaaccaacgcaatctctccacaggtaccccctcacagaaggccaggcgaaccctttaatggacagatggtgactgaaggaaggagccaggaagaaggcgagcagaaaggccgcaatgaagaaaaagaagacttgcgcggtgaggctcccgagatgttcaccagcgaatcagcacaaacatttcctgtgcgccaccccgaccgtttttctcctcaccgccctgataatctagtaccacccgctccacagccaccaaggaggtcgcgggatcataattggaagcagttagggacaaccgagtgttctactacctgcgggaagggaagccagtaccccatatttagatgcgttcatcgctcaactcatgaggaagccccagaatcatattgtgattcctcgatgaaacccacacccgaagaggagccctgtaacatttttccttgccccgcgttctgggatattggagagtggtccgagtgctcaaaaacatgtggtctgggcatgcaacatcgacaggttctttgccgacaagtgtatgccaataggtccttaaccgtgcagccttatagatgccagcacctggaaaaacccgaaaccacaagcacttgccaacttaaaatttgctccgagtggcagattagaacggactggacctcctgttcagtaccatgcggggtggggcaacgcacaagagacgtgaaatgcgtgagcaacatcggagatgtcgtagatgacgaggaatgcaatatgaaactgagacccaatgatattgagaattgcgacatgggaccctgcgcgaaatcatggttcttgactgagtggagtgagcggtgtagtgccgagtgcggagccggtgtgcgaacacggtccgtggtgtgtatgactaaccatgtctcttccttgcctctcgaggggtgcggaaacaaccgacccgccgaagctactccctgcgataacggcccctgtactggcaaggtcgaatggtttgcgggatcttggtctcaatgctccatcgagtgcggttccggtacacagcagcgcgaagtgatttgcgtgaggaagaatgccgatacattcgaggttctcgatccttctgaatgtagtttcttagagaaaccgccctcacaacaatcctgtcatctgaaaccatgcggcgctaagtggttttccactgaatggtctatgtgctccaaaagctgccagggaggatttagggtgagagaagttcgatgtctatctgacgatatgactctgtctaacctgtgtgacccacaactaaaaccagaggagagggagtcctgtaatccccaggattgtgtgcctgaggtcgatgagaattgcaaagacaaatattataattgtaacgttgtggtacaggcccgtctctgcgtctataactattacaaaactgcatgctgcgcttcatgcacccgagtagcaaaccggcagacagggtttctgggtagtcgttag

SEQ ID NO: 216997 - DNA, 9145 bp, Artificial Sequence
  derived and/or modified sequence
gacttgaacgcaactcccaattgcagaaaattggcaacgtctctgaagagcccttgcttttgcctggacccccagcatcatggtttcccatttcatggggtctctcagtgtcctgtgtttccttctgctgcttggattccagttcgtctgcccacagccctccactcaacacaggaaggtcccgcagcggatggcggcggagggcgcccccgaggacgacggcggcggcggcgccccgggagtgtggggcgcctggggcccctggtcggcctgctcgcgtagctgcagcggcggcgtgatggagcagacgcggccctgcctgccccgctcctaccgcctgcgcggcggccagcggcctggcgcccctgcgcgcgccttcgcggaccacgtggtgtcggcggtgcgcacgtcggtgccactgcaccggagccgcgacgagacgccagcgctggccggtacggacgccagccgccagggccccacggtgctgcgaggcagccggcacccacagccccagggcctcgaagtcactggggacagaaggagcaggacccgtggtaccattggccctggcaagtatggctatggtaaggccccatatatcttaccactgcagacagacactgcacacacgccacagaggctccggagacagaagctctcatcccgccattccaggtcccagggagcatcttctgctaggcatggctacagttcaccagcccaccaggtcccccaacatgggcctttgtaccaaagtgacagtggccctcgctctggactgcaggctgcggaggcccccatctaccagctacctttgacccatgatcaaggctaccctgcagcttcaagtctctttcacagcccagaaacaagcaacaaccacggtgtggggacccatggggcaactcagagcttctctcagcctgcccgatctacagcaatctcatgcatcggggcctatcggcagtacaagctgtgcaacaccaacgtatgtccagaaagcagtagaagtatccgggaggtacagtgtgcatcctacaacaacaagccattcatgggccggttttatgagtgggaaccatttgcagaagtaaaaggcaatcgcaaatgtgagttgaactgccaggcaatgggctaccgcttctatgtacggcaagctgagaaagtcatcgatggcaccccctgtgaccagaacggcacggccatctgtgtgtctgggcagtgcaagagcattggctgtgatgactacttaggctccgacaaagtcgtggacaaatgtggggtgtgtggaggagacaacacgggctgtcaggttgtgtcgggcgtgtttaagcatgccctcaccagcctgggctaccaccgcgtcgtggagattcccgagggagccacgaaaatcaacatcacggagatgtacaagagcaacaactatttggccctgagaagtcgttctggacgctccatcatcaatgggaactgggcaattgatcgaccaggaaaatacgagggcggagggaccatgttcacctacaagcgtccaaatgagatttcgagcactgccggagagtcctttttggcggaaggtcccaccaacgagatcttggatgtctacatgatacaccagcagccaaacccaggcgtgcactacgagtacgtgatcatggggaccaacgccatcagcccccaggtgccaccccacaggagaccaggggaacccttcaatggccagatggtgacagaaggcaggagccaggaggagggagaacagaaagggaggaacgaggagaaggaagacttgcgtggggaggcccctgagatgttcacctcagaatcggcacagaccttcccagtcaggcatccagacagattttctccccatcgaccggacaacttggtgccaccagcaccgcagcccccacggcgcagccgggatcacaactggaagcagcttgggacaacagaatgttccacgacctgtgggaaaggatcgcagtaccctattttccgctgtgtgcacagaagcactcatgaagaggctcctgagagttactgtgactccagcatgaagccgacccccgaggaggagccctgcaacatcttcccttgcccagccttctgggacatcggggagtggtctgagtgcagcaagacctgtggcctgggcatgcagcaccgccaggttctgtgccgccaggtgtacgccaaccgcagcctgacggtgcagccctaccgctgccagcacctggagaaacctgagaccaccagcacctgccaactcaagatctgcagcgagtggcagatccggaccgactggacctcgtgctcggtgccctgcggcgtgggacagaggacccgtgatgtgaagtgtgtgagcaacattggggatgtggttgacgatgaggaatgcaacatgaagctccggccgaatgacattgagaactgcgacatgggaccctgtgccaagagctggttcctcaccgagtggagcgaaaggtgctcagcggagtgtggggccggagtgcggacacgctcggtggtgtgcatgaccaaccatgtcagcagcctgcccctggagggctgtgggaacaaccggccggcagaggccaccccatgtgacaacggaccctgcacgggcaaggtggagtggtttgccgggagctggagtcagtgttccatcgagtgtgggagcgggacgcaacagagggaggtgatttgtgttagaaagaatgcagacacctttgaagtgttggacccctctgaatgttctttcctggagaaaccccccagccagcaatcctgccacctcaagccttgcggagccaaatggtttagcaccgaatggagcatgtgttccaagagctgccagggtggctttcgggtccgggaagtgcggtgtctgtctgatgacatgactctaagtaacctctgtgaccctcagttgaaaccagaagagagagaatcttgtaaccctcaggactgtgtccctgaagttgatgaaaactgcaaggacaagtactacaactgcaacgtggtggtccaggcaagactctgtgtctacaactactacaagaccgcctgctgtgcctcctgcacccgtgtggccaacaggcagacgggcttcctggggagcagataacactcctgcacccccatcagtagggcagcatcactgccttcccgggggcttcagcagtgcgcctggctggctgctgctccaccacgggccccctggcccaggcgctgccaaccaacttagtcaccacccctgcctccggtgaatgcaccccgtggtacccaggggctttttacacaagatgtttgaaagccacagtcagtcctttaagcatcaccatgtactgatgatcccctccttggacctggcatctgctaatggtgccctttgaaagtcaagcagtgggaagtacatggagctctcagccctgctcccatctggcaccttcaagtcagcagatgggccactgactgagcactgccccgtccctggtgctactggtctttctaaacttagcaccctggagagtccaaggaggcagcgcccccaacccagcgccccactaagccttgctgacacgcgtgcatccctctgtgacctcagcccagatgtgcctgttttcattctcaaagacattagactgttttcctgccctatgacacagatagctcacatgaatattgtgctttatttagcaggtgtactcacagatactagctccttagcagctcacaacatcccagaatgggaggcagggggtgactcattatccccattttactgacagggaaactgaggctcaacttaagtaattgacctgccaggtatattcacccatccagtggaagagctgagtccccgccccagtcatctaccagtatccagcctggggcctgtacttagatgtgaaaggtgctgcttcatttctgaccaagagactgagaagtttcccagaatgcaaacaaagcccaggcccctgaaatctttccggtcaagcctttatcccagcactcagttgttttggatgtctgttcctacttgcccttacccccaaagttacagatcctagttacaggactctgccagctttgttaaactgtccgtgagacaagaaagccattggggaaaccaggtgattgcctgaaattcttactccgttccaagtgctgttcctcccaggaaatcaaaggccagggtccttatggccgtggagccttcccgaccacagagccaacttgtgaagcacacagctctgcagcctgggctctgccctgcctcagccgcctcccccacgctcttcaccacgttcctggagagtccggccaacctgtcccagccgaaacactgctgtattagaaaaagtctctttctggtctttctggttttgtttatgaatttccctctgtggccacaaattcctcccctcccccatgactcacagtccatatggcccacccccagacttgagcaccaagctctgcattaatgcagttggcctgcgacaaggagctgtggacccttccccatctcttccaattcactttccccaactatccagttccagaggccgcaggcctggaaggatgcagtgcatattgaaaggtggaccctctgaaaacagttaagaggaatatatgtatgttttacccattaagaaaaaatggcaagctaaacaaatgttaaacttacagaaaatttgtcttatggtcctgagcatatttcccttttagagcaagcctggattcttagcaaagtgtttcccccatttgctcttttagctgacaaatctgccactgtgatgatggtttgcagcttttggaagcagtatggcaacctggcctgacatgctctttaggcttccactaacctggggctttcagaaattctatttggcctttctgtgggtagctttccagcttctcttctagggagccccaggcatcatttcccaaaagcatccccatctcctgattctcttggaactcctacagataagcatcctggcagaggcccaggctcccaaaccgacaaagtgaaaagagaccagagaggccaagcatattgactggtgctgttcagggcctgctcttttccactcaccacttgttttgctgcttgtcacgaggagagttgttcctgtatgtggctgctctcagatctttccaagcaagccagtcatttgaagaggttttcttttcatgctggagggcaggctaagatcaatgagtggaagagagaaaggctgttttagctcaagttaaaggaacaccttctagccatcaaagccgcccaacagaggcaagggccaccacacatgagagagcgctctgtccttaaagggaattctctgttgagtgggaggtgaacaccctggttcttccaactcaggaattctcgtggctgggctgggtcagtgatggctttgtctctttatgtctaaagtgccctatggctgctgaaggttacctaaccattctttaaaaggagaatgaccctccatgggaatggccagcctgccaactgtgcaattgaagaagacccgatggatcaaccccatgtctcccttggggagaaagtgcataaaccaggggtctctttttttttttcaacaaaccattgagctgttcttggagttcatctctggagaggttatacattattagaagtttgattattattatagtttgatcaatttatttgtcttagagatccaatttttactaattccctagttttttatttcagcatctgaatgtctttctccctagcacagtgcatacaatcagggccttgggtatttccagtgataactttccttggagaggatctaagaaaagcccagatttcggtagccatctccctccaaatatgtctctttctgctttcttagtgcccattatttccccctctcctttcttctgtcactgccatctccttcttggtcttcccattgttctttaactggccgtaatgtggaattgatatttacattttgatacggtttttttcttggcctgtgtacgggattgcctcatttcctgctctgaattttaaaattagatattaaagctgtcatatggtttcctcacaaaagtcaacaaagtccaaacaaaaatagtttgccgttttactttcatccattgaaaaaggaaattgtgcctcttgcagcctaggcaaaggacatttagtactatcgattctttccaccctcacgatgacttgcggttctctctgtagaaaagggatggcctaagaaatacaactaaaaaaacaaacaaaaacaccaaaagaaaaaaaaaagccatttaaagccagccactagagggagtcagttcagttccgtaaaggtatgctcagtgcccgctgcctgcaagctgttggggaccccagggagggcaaggcagcctgtccccgcccccagggaactagaacatgacaagaattctccgcactgtgcctacctgtccctttaccttacctctctggcccagagttcttggagggttttttctttattttcttatgtactcatctacttattctcaaagtatttagcattcaacactctttttgctttaaaaagaatggccttacaaagggacagaaaagagaagacacgagcttggtgtattttcatcaagttatgtggcagagaaatccagatattaccaggacctgtctaaacaaatgttgtgggttttcttttcattcggatagccactttatagttggaatatcaattctaatgaggaggaagacataaatataagtggtaaaaagaaacatgacttcccttaaaacaggctggataatctatatcagccttgtgggtggagactagtatttgatccttgccatataaaacattttaatatggtttacatgggaaaatatcgatggcttcctcacaaaatgtatgggtgacgtgaagttgaagagccaatggcttgggtgacacgtgctggatccaaaaagatcagggagactagaataaaacttggatgttaaaaattcaccaggaatccacataaagtactatatttgggctaaaatgaaaaactaaatacaaggtgggagagaggcaagaatttcagttgactaagctcagtgtgagtcaaagtgggatggaaccatgcaaaaacaaaacccacagacatgcaggctacgtgaggagaaaacagtggtgaggatcacatcacattgtgtttgcatttgccggaaccatactttaagaagaaaaccgatcatctataataacatcagtttatcaatgccccgtcctgatgaagtgtgcagactctcagaaacagcaggaaggacttcatgagaaccctcaggctggagaaggcactagggcacaaggagagctctcctaggaccaggaccaagaagctacaggcaggcacagtttagctcctgcagagacccagcttttcacaagttggagccttccagagatagagggactgtggtaggtggtgacccacccatcactggaggtggaagcagaggccgtttgccagggatgctggagaggggattcaagcatctggctgggcaacgtgatgctcagggccgtctccactcagggcttaggggagtctgtgagtagaagagctttaggtgatttgtttggtgggggaaggcaagtacacagctatgcactttccgtttctgacttttgccaccctgtcagccatggggagcccactgtgggactgaaaccctgagctgaatgcggcctcatgtctcagagaaacactggcaagttggtcagagccgccgtctgcatcgaggcgtagctgagcggcaggatggggggctgcctgcccagggtctctcaccgtggtgtaagcagagccatggcttgcctaggaccctatagataccatcactctttctcagctcgactggagtttctgcacctttgcaggggcaaagtaactccctgcaccctgaaccaccccccattcctgttcatttcagcagataatgatggagggggggggtgtccatcgtgctgagggtgtgaccgcaagagggtgaaaacttccagccaactttctcagtcctttctcttgcgagagggaagccacctgctatacaaactaataccccctgccttgaccccttccccacgactcagttgacagaaggatatactttgttataacttattattttgttctctgtaaatacaagatgtttataggaaatatgtattctgaactctatctgcagaatgagtcactacaccaaaatagttctattatttagaatgtgttaattttaaagggacctgataggtatttatttacatatgcgatccacatttgtgtgaaagcatgtgatcatactaacccagcctcctggaatgtcgctgtacgatgattgatgtctttttctcagtccatagttacaattgtttagtatgctaatcagtccagttccctgaggtttaagatcaaatataaattactctgcttttcgactcattcaggtagcattgtacctgaacctgattgctactttttcatcttaaatattatatttcctcatctaatctgccttcccctcatccacagacatttggagaaggaaatgggagggtgtctgttatccctttctctttgctttgtccccgttgttagactggcagcgtcagttgctcggtgggcttggttagagccgtgggtgaggcaggtggctggcggggacagggagaggctgagagggaagtggtggcatttactgctctgacacttccactgtccctgctggggatgctggggccaaggcctgtggggcctgtgaactgcacagccaggagcaaggaacccactaaatactccgtcacctccatgtcccctctacagtgttaaattattacataagcaggtgaaaggtagaaggcgaattatgtgagtaaatatggtctgttttctcttcagcaaaaatgactatttttgtgtgtgactaatttatttttattattgtaaagatacaataaaccggttgaaatatctgctttgttgacaagcgtgtgctttctctggccttattcgcgttctgttctcctgcaaatagcgccctctaaaaagaagagtcagacaataaactggttgaaatatc

SEQ ID NO: 216998 - DNA, 3057 bp, Artificial Sequence
  derived and/or modified sequence
atggtgagccacttcatgggcagcctgagcgtgctgtgcttcctgctgctgctgggcttccagttcgtgtgcccccagcccagcacccagcacagaaaggtgccccagagaatggccgccgagggcgcccccgaggacgacggcggcggcggcgcccccggcgtgtggggcgcctggggcccctggagcgcctgcagcagaagctgcagcggcggcgtgatggagcagaccagaccctgcctgcccagaagctacagactgagaggcggccagagacccggcgcccccgccagagccttcgccgaccacgtggtgagcgccgtgagaaccagcgtgcccctgcacagaagcagagacgagacccccgccctggccggcaccgacgccagcagacagggccccaccgtgctgagaggcagcagacacccccagccccagggcctggaggtgaccggcgacagaagaagcagaaccagaggcaccatcggccccggcaagtacggctacggcaaggccccctacatcctgcccctgcagaccgacaccgcccacaccccccagagactgagaagacagaagctgagcagcagacacagcagaagccagggcgccagcagcgccagacacggctacagcagccccgcccaccaggtgccccagcacggccccctgtaccagagcgacagcggccccagaagcggcctgcaggccgccgaggcccccatctaccagctgcccctgacccacgaccagggctaccccgccgccagcagcctgttccacagccccgagaccagcaacaaccacggcgtgggcacccacggcgccacccagagcttcagccagcccgccagaagcaccgccatcagctgcatcggcgcctacagacagtacaagctgtgcaacaccaacgtgtgccccgagagcagcagaagcatcagagaggtgcagtgcgccagctacaacaacaagcccttcatgggcagattctacgagtgggagcccttcgccgaggtgaagggcaacagaaagtgcgagctgaactgccaggccatgggctacagattctacgtgagacaggccgagaaggtgatcgacggcaccccctgcgaccagaacggcaccgccatctgcgtgagcggccagtgcaagagcatcggctgcgacgactacctgggcagcgacaaggtggtggacaagtgcggcgtgtgcggcggcgacaacaccggctgccaggtggtgagcggcgtgttcaagcacgccctgaccagcctgggctaccacagagtggtggagatccccgagggcgccaccaagatcaacatcaccgagatgtacaagagcaacaactacctggccctgagaagcagaagcggcagaagcatcatcaacggcaactgggccatcgacagacccggcaagtacgagggcggcggcaccatgttcacctacaagagacccaacgagatcagcagcaccgccggcgagagcttcctggccgagggccccaccaacgagatcctggacgtgtacatgatccaccagcagcccaaccccggcgtgcactacgagtacgtgatcatgggcaccaacgccatcagcccccaggtgcccccccacagaagacccggcgagcccttcaacggccagatggtgaccgagggcagaagccaggaggagggcgagcagaagggcagaaacgaggagaaggaggacctgagaggcgaggcccccgagatgttcaccagcgagagcgcccagaccttccccgtgagacaccccgacagattcagcccccacagacccgacaacctggtgccccccgccccccagccccccagaagaagcagagaccacaactggaagcagctgggcaccaccgagtgcagcaccacctgcggcaagggcagccagtaccccatcttcagatgcgtgcacagaagcacccacgaggaggcccccgagagctactgcgacagcagcatgaagcccacccccgaggaggagccctgcaacatcttcccctgccccgccttctgggacatcggcgagtggagcgagtgcagcaagacctgcggcctgggcatgcagcacagacaggtgctgtgcagacaggtgtacgccaacagaagcctgaccgtgcagccctacagatgccagcacctggagaagcccgagaccaccagcacctgccagctgaagatctgcagcgagtggcagatcagaaccgactggaccagctgcagcgtgccctgcggcgtgggccagagaaccagagacgtgaagtgcgtgagcaacatcggcgacgtggtggacgacgaggagtgcaacatgaagctgagacccaacgacatcgagaactgcgacatgggcccctgcgccaagagctggttcctgaccgagtggagcgagagatgcagcgccgagtgcggcgccggcgtgagaaccagaagcgtggtgtgcatgaccaaccacgtgagcagcctgcccctggagggctgcggcaacaacagacccgccgaggccaccccctgcgacaacggcccctgcaccggcaaggtggagtggttcgccggcagctggagccagtgcagcatcgagtgcggcagcggcacccagcagagagaggtgatctgcgtgagaaagaacgccgacaccttcgaggtgctggaccccagcgagtgcagcttcctggagaagccccccagccagcagagctgccacctgaagccctgcggcgccaagtggttcagcaccgagtggagcatgtgcagcaagagctgccagggcggcttcagagtgagagaggtgagatgcctgagcgacgacatgaccctgagcaacctgtgcgacccccagctgaagcccgaggagagagagagctgcaacccccaggactgcgtgcccgaggtggacgagaactgcaaggacaagtactacaactgcaacgtggtggtgcaggccagactgtgcgtgtacaactactacaagaccgcctgctgcgccagctgcaccagagtggccaacagacagaccggcttcctgggcagcagatag

SEQ ID NO: 216999 - DNA, 3057 bp, Artificial Sequence
  derived and/or modified sequence
atggtttcccactttatgggctcgctgagtgttctgtgctttctgctgctgctgggatttcaattcgtttgcccacagccatccacacagcatagaaaagttccacagaggatggcagcggagggcgcccctgaggatgacgggggcgggggggcgcctggggtgtggggtgcatggggcccctggtccgcttgctccaggtcatgtagcgggggtgtgatggagcagacccggccctgtctgcctaggagctatcgcctgaggggcgggcagcgaccaggcgctcctgcgagggccttcgctgaccacgttgtgtcagccgtcaggacctccgtgccgctccataggtcccgagacgagacacccgccttggctggaaccgacgcctctagacagggccccactgttctgcgtggctcccggcacccccagccgcaggggcttgaggtcaccggtgatagacgaagtaggacccgagggacaatcggtccagggaagtatggatatggcaaagcaccttacattctcccattgcaaacagataccgctcatacgccacagcgcttgaggcggcagaagctgtcatcacggcacagtagaagtcagggcgcgtcctcggcgagacacgggtactcctcccccgctcatcaagtgccccagcacggccctctttaccagtccgacagcggccctcggtctggtctgcaggcagcggaagcgccgatctatcagctgcctcttactcatgaccagggctatcctgccgcctcaagcctctttcactcccctgagaccagcaacaatcatggcgtagggacccacggtgccactcaatctttctctcagcccgccagatcaactgcgatttcttgcatcggcgcctataggcagtataaactgtgcaacactaacgtatgtccagagtcttctcgttccatcagagaggtacagtgcgcaagctataacaataagcctttcatgggtaggttctatgaatgggaaccttttgctgaggtgaaaggaaaccggaagtgcgagcttaattgtcaggccatggggtacaggttctacgttaggcaggccgagaaggtcattgacggcactccctgtgatcagaacggcaccgcaatttgcgtctcaggacagtgtaaatctatagggtgcgacgactacctgggatcagacaaggtggtagacaaatgcggcgtctgcgggggcgacaacaccggctgccaagttgtgtcgggggtcttcaaacatgcattgaccagcctggggtatcatcgcgttgtcgaaatccctgagggagccacaaagatcaacatcaccgaaatgtacaagagtaataactacctggcgctccggagcagatccggcagatcaatcatcaatgggaattgggcaatcgacaggcctgggaaatacgagggcggcggtaccatgttcacctacaagcgaccaaatgagattagttccacggcaggtgagagcttcctggctgaggggcctaccaatgaaattttggacgtttatatgatccaccagcaaccaaaccctggcgtacactacgagtacgtgatcatgggaactaatgccatttccccccaggtgccgccgcaccggagaccaggagaaccatttaatggacagatggtgaccgagggtcgcagtcaggaggaaggcgaacaaaaaggacgcaacgaggagaaagaggatttgcgcggcgaggccccagagatgtttacgagtgagtcggctcagacctttcccgtgcgacatcccgataggttcagccctcaccggcctgacaatctcgtgccaccagcacctcagccacctcggagatcccgtgatcataactggaaacagctcggaacaactgagtgttcaacgacatgcggcaaggggtcccaataccccattttccgctgcgtccatcgcagcacccatgaggaggcccctgagtcgtactgtgattcatccatgaagccaacaccagaggaagagccatgtaacatctttccgtgccctgcattctgggacatcggggagtggagcgaatgctctaaaacctgcgggttgggaatgcaacaccgccaggtactctgccggcaggtttatgccaatcgctctttaacagtccaaccttatcggtgccagcatctcgaaaagccggaaactactagtacttgtcagttaaagatctgtagtgagtggcagattcgcaccgattggacaagttgctcagtgccatgcggggttggccagcggacccgagacgttaaatgtgtgagtaatataggagacgtcgtggatgacgaggagtgcaatatgaagctgcggcctaatgacattgagaattgtgatatgggaccatgcgccaagagctggttcctcactgagtggtcagagcgttgttctgctgaatgcggagccggagtccgaacgaggagcgtggtttgcatgaccaaccatgtgtcgagcctcccactggaaggctgtgggaataacaggccagcggaggccactccttgcgacaacggcccatgtaccgggaaagtggagtggtttgccgggagttggagccagtgtagcatcgagtgcgggagcggaacacagcaaagagaagtgatctgtgtccgcaaaaatgccgataccttcgaggtgcttgacccatccgagtgcagcttcttagaaaaacccccttctcagcagtcatgtcatctaaaaccatgcggtgccaaatggttttccaccgagtggtctatgtgcagtaaaagctgtcagggaggatttcgagtaagggaggtgcgttgtttatcagatgatatgaccctgagtaacttatgtgatccacagcttaaacctgaggagcgcgagagctgtaatcctcaggattgcgtccccgaggtggacgaaaattgcaaagacaagtattataactgcaatgtggtcgtgcaagctaggttgtgtgtctacaattactacaagaccgcttgctgcgccagctgtacccgggttgccaatcgacagacagggttccttgggtcacggtag

SEQ ID NO: 217000 - DNA, 3057 bp, Artificial Sequence
  derived and/or modified sequence
atggtctcacacttcatgggatccctgtccgtcctttgtttccttcttctgctgggctttcagttcgtgtgtccccaaccatcaacccagcatcggaaagtgccgcagagaatggccgcagaaggggcacccgaagacgatgggggcgggggcgcgcctggcgtctggggtgcttggggaccgtggagcgcttgctccaggtcctgctccgggggggttatggaacagacccgcccgtgtctcccacgcagctatagacttcggggcgggcagcggcctggagcgcctgccagagccttcgctgatcacgtggtctctgcggtccggactagcgtgccactccatcgctcccgagatgagacgccggctctcgctgggaccgatgccagtagacaaggcccgactgttcttcgcgggtcgagacatccccagccccagggcttggaggttactggcgatcggagatccaggacccgcggaacaataggacctggaaagtatggatacgggaaagcaccctatatactgcccctccagacagataccgcccacacgccacagcgtttgaggagacagaaactcagctctcgccactcacgctcacagggagcctcgtcagctcgacatggatattcaagtcccgctcaccaggtccctcagcacggaccactttatcaatctgattcaggtcctcgttcgggccttcaagctgccgaggcacccatctaccagctgccacttacgcatgaccaggggtatcctgccgcttcgtcgctctttcattcccccgagacctccaacaaccatggcgtcgggacacatggggccacccagtccttttcacaacctgcacgctccacagccatctcgtgcatcggagcctacagacagtacaagttgtgtaatactaacgtgtgccctgagtccagccggtcaattcgtgaggtacagtgcgcctcatacaataacaaacccttcatggggaggttttatgaatgggagccattcgctgaagtgaagggcaaccgaaagtgtgagttaaattgccaggcgatgggatacaggttttatgttcggcaggccgagaaggtcattgatgggaccccatgcgatcaaaacggcacagccatttgcgtctccgggcaatgtaaaagtatcgggtgcgatgattacctcggatctgacaaggtggttgacaaatgcggcgtgtgtgggggggacaatacaggatgtcaggtcgtgtccggcgttttcaaacacgcgctaactagcctgggatatcacagggtggtggaaataccagagggagccaccaagattaacatcaccgagatgtacaagagtaacaattacttagcactcaggtctaggtccggtcgaagcatcatcaatggcaactgggcgatcgaccgcccgggaaaatatgaaggcggagggacgatgtttacttataaacgacccaacgaaatatcttccaccgccggtgagtctttcctggccgaaggacccactaatgaaatacttgacgtctacatgatccaccaacaaccgaatccaggcgttcactatgagtatgtgatcatggggacgaacgccattagccctcaagtaccaccacatcggcgaccaggcgaaccctttaatggccagatggtgaccgaaggcagaagtcaggaggaaggggagcagaaaggtcggaacgaggagaaggaggatcttcggggtgaggcacctgagatgtttacatcagaatccgcccagaccttccccgtgagacatccagaccgcttctctccacatcgcccggataatctggtgcccccggcaccccaacctccgcgccgttctcgcgaccacaattggaaacagctgggaaccaccgagtgctccacaacatgtggcaagggatcacaatatccaatctttcggtgtgtgcacagatccacgcatgaggaagctccagagagctattgcgacagcagcatgaaaccaaccccggaggaggagccgtgcaatatattcccctgtccggccttttgggatattggggagtggagcgagtgcagtaagacttgtgggctggggatgcagcacagacaggtgttatgcaggcaagtgtacgccaacaggtcgctcacagtccagccttatcggtgtcagcatctcgagaaaccagaaacaaccagcacgtgtcaactgaagatttgctcagagtggcagattcgcacagactggacatcctgctctgtgccctgcggggtcgggcaacgcaccagggatgtgaagtgcgtttctaatataggtgacgtcgtcgacgacgaggagtgtaatatgaaactgcgtcctaacgatattgaaaactgtgatatgggcccttgtgccaaatcttggtttttgaccgagtggagcgagcggtgttctgctgaatgtggcgcaggtgtccgcacccggagtgtggtgtgcatgaccaatcatgtttcgtcgcttcctctggagggatgcggcaataatagaccggctgaagcaacaccatgtgataacggcccctgcaccggtaaagtggagtggtttgccggctcatggtcccagtgtagtattgaatgtgggagcgggacccagcagcgcgaggttatttgcgtgcggaagaatgcagacaccttcgaggtcctggacccgagcgaatgcagtttcctggaaaagccccccagccagcagagctgccacctcaaaccgtgcggtgctaagtggtttagcactgaatggtctatgtgcagtaagtcatgccagggggggtttcgtgtccgagaagtgcggtgcttgtccgatgatatgaccctgtcaaacttgtgcgaccctcagctgaagcctgaggagcgcgagtcctgtaatccccaggactgcgtgccagaagtggatgaaaattgcaaggacaagtactataattgtaacgtcgttgtacaagccaggctgtgtgtatacaattactacaaaacagcctgctgtgcatcgtgcaccagggtggccaatcgccaaaccggcttcctgggcagccgatag

SEQ ID NO: 217001 - DNA, 9200 bp, Artificial Sequence
  derived and/or modified sequence
atcagaccaacgtgaattgaatcacagcagttcagaaagaggaaactggattcaggacttgaacgcaactcccaattgcagaaaattggcaacgtctctgaagagcccttgcttttgcctggacccccagcatcatggtttcccatttcatggggtctctcagtgtcctgtgtttccttctgctgcttggattccagttcgtctgcccacagccctccactcaacacaggaaggtcccgcagcggatggcggcggagggcgcccccgaggacgacggcggcggcggcgccccgggagtgtggggcgcctggggcccctggtcggcctgctcgcgtagctgcagcggcggcgtgatggagcagacgcggccctgcctgccccgctcctaccgcctgcgcggcggccagcggcctggcgcccctgcgcgcgccttcgcggaccacgtggtgtcggcggtgcgcacgtcggtgccactgcaccggagccgcgacgagacgccagcgctggccggtacggacgccagccgccagggccccacggtgctgcgaggcagccggcacccacagccccagggcctcgaagtcactggggacagaaggagcaggacccgtggtaccattggccctggcaagtatggctatggtaaggccccatatatcttaccactgcagacagacactgcacacacgccacagaggctccggagacagaagctctcatcccgccattccaggtcccagggagcatcttctgctaggcatggctacagttcaccagcccaccaggtcccccaacatgggcctttgtaccaaagtgacagtggccctcgctctggactgcaggctgcggaggcccccatctaccagctacctttgacccatgatcaaggctaccctgcagcttcaagtctctttcacagcccagaaacaagcaacaaccacggtgtggggacccatggggcaactcagagcttctctcagcctgcccgatctacagcaatctcatgcatcggggcctatcggcagtacaagctgtgcaacaccaacgtatgtccagaaagcagtagaagtatccgggaggtacagtgtgcatcctacaacaacaagccattcatgggccggttttatgagtgggaaccatttgcagaagtaaaaggcaatcgcaaatgtgagttgaactgccaggcaatgggctaccgcttctatgtacggcaagctgagaaagtcatcgatggcaccccctgtgaccagaacggcacggccatctgtgtgtctgggcagtgcaagagcattggctgtgatgactacttaggctccgacaaagtcgtggacaaatgtggggtgtgtggaggagacaacacgggctgtcaggttgtgtcgggcgtgtttaagcatgccctcaccagcctgggctaccaccgcgtcgtggagattcccgagggagccacgaaaatcaacatcacggagatgtacaagagcaacaactatttggccctgagaagtcgttctggacgctccatcatcaatgggaactgggcaattgatcgaccaggaaaatacgagggcggagggaccatgttcacctacaagcgtccaaatgagatttcgagcactgccggagagtcctttttggcggaaggtcccaccaacgagatcttggatgtctacatgatacaccagcagccaaacccaggcgtgcactacgagtacgtgatcatggggaccaacgccatcagcccccaggtgccaccccacaggagaccaggggaacccttcaatggccagatggtgacagaaggcaggagccaggaggagggagaacagaaagggaggaacgaggagaaggaagacttgcgtggggaggcccctgagatgttcacctcagaatcggcacagaccttcccagtcaggcatccagacagattttctccccatcgaccggacaacttggtgccaccagcaccgcagcccccacggcgcagccgggatcacaactggaagcagcttgggacaacagaatgttccacgacctgtgggaaaggatcgcagtaccctattttccgctgtgtgcacagaagcactcatgaagaggctcctgagagttactgtgactccagcatgaagccgacccccgaggaggagccctgcaacatcttcccttgcccagccttctgggacatcggggagtggtctgagtgcagcaagacctgtggcctgggcatgcagcaccgccaggttctgtgccgccaggtgtacgccaaccgcagcctgacggtgcagccctaccgctgccagcacctggagaaacctgagaccaccagcacctgccaactcaagatctgcagcgagtggcagatccggaccgactggacctcgtgctcggtgccctgcggcgtgggacagaggacccgtgatgtgaagtgtgtgagcaacattggggatgtggttgacgatgaggaatgcaacatgaagctccggccgaatgacattgagaactgcgacatgggaccctgtgccaagagctggttcctcaccgagtggagcgaaaggtgctcagcggagtgtggggccggagtgcggacacgctcggtggtgtgcatgaccaaccatgtcagcagcctgcccctggagggctgtgggaacaaccggccggcagaggccaccccatgtgacaacggaccctgcacgggcaaggtggagtggtttgccgggagctggagtcagtgttccatcgagtgtgggagcgggacgcaacagagggaggtgatttgtgttagaaagaatgcagacacctttgaagtgttggacccctctgaatgttctttcctggagaaaccccccagccagcaatcctgccacctcaagccttgcggagccaaatggtttagcaccgaatggagcatgtgttccaagagctgccagggtggctttcgggtccgggaagtgcggtgtctgtctgatgacatgactctaagtaacctctgtgaccctcagttgaaaccagaagagagagaatcttgtaaccctcaggactgtgtccctgaagttgatgaaaactgcaaggacaagtactacaactgcaacgtggtggtccaggcaagactctgtgtctacaactactacaagaccgcctgctgtgcctcctgcacccgtgtggccaacaggcagacgggcttcctggggagcagataacactcctgcacccccatcagtagggcagcatcactgccttcccgggggcttcagcagtgcgcctggctggctgctgctccaccacgggccccctggcccaggcgctgccaaccaacttagtcaccacccctgcctccggtgaatgcaccccgtggtacccaggggctttttacacaagatgtttgaaagccacagtcagtcctttaagcatcaccatgtactgatgatcccctccttggacctggcatctgctaatggtgccctttgaaagtcaagcagtgggaagtacatggagctctcagccctgctcccatctggcaccttcaagtcagcagatgggccactgactgagcactgccccgtccctggtgctactggtctttctaaacttagcaccctggagagtccaaggaggcagcgcccccaacccagcgccccactaagccttgctgacacgcgtgcatccctctgtgacctcagcccagatgtgcctgttttcattctcaaagacattagactgttttcctgccctatgacacagatagctcacatgaatattgtgctttatttagcaggtgtactcacagatactagctccttagcagctcacaacatcccagaatgggaggcagggggtgactcattatccccattttactgacagggaaactgaggctcaacttaagtaattgacctgccaggtatattcacccatccagtggaagagctgagtccccgccccagtcatctaccagtatccagcctggggcctgtacttagatgtgaaaggtgctgcttcatttctgaccaagagactgagaagtttcccagaatgcaaacaaagcccaggcccctgaaatctttccggtcaagcctttatcccagcactcagttgttttggatgtctgttcctacttgcccttacccccaaagttacagatcctagttacaggactctgccagctttgttaaactgtccgtgagacaagaaagccattggggaaaccaggtgattgcctgaaattcttactccgttccaagtgctgttcctcccaggaaatcaaaggccagggtccttatggccgtggagccttcccgaccacagagccaacttgtgaagcacacagctctgcagcctgggctctgccctgcctcagccgcctcccccacgctcttcaccacgttcctggagagtccggccaacctgtcccagccgaaacactgctgtattagaaaaagtctctttctggtctttctggttttgtttatgaatttccctctgtggccacaaattcctcccctcccccatgactcacagtccatatggcccacccccagacttgagcaccaagctctgcattaatgcagttggcctgcgacaaggagctgtggacccttccccatctcttccaattcactttccccaactatccagttccagaggccgcaggcctggaaggatgcagtgcatattgaaaggtggaccctctgaaaacagttaagaggaatatatgtatgttttacccattaagaaaaaatggcaagctaaacaaatgttaaacttacagaaaatttgtcttatggtcctgagcatatttcccttttagagcaagcctggattcttagcaaagtgtttcccccatttgctcttttagctgacaaatctgccactgtgatgatggtttgcagcttttggaagcagtatggcaacctggcctgacatgctctttaggcttccactaacctggggctttcagaaattctatttggcctttctgtgggtagctttccagcttctcttctagggagccccaggcatcatttcccaaaagcatccccatctcctgattctcttggaactcctacagataagcatcctggcagaggcccaggctcccaaaccgacaaagtgaaaagagaccagagaggccaagcatattgactggtgctgttcagggcctgctcttttccactcaccacttgttttgctgcttgtcacgaggagagttgttcctgtatgtggctgctctcagatctttccaagcaagccagtcatttgaagaggttttcttttcatgctggagggcaggctaagatcaatgagtggaagagagaaaggctgttttagctcaagttaaaggaacaccttctagccatcaaagccgcccaacagaggcaagggccaccacacatgagagagcgctctgtccttaaagggaattctctgttgagtgggaggtgaacaccctggttcttccaactcaggaattctcgtggctgggctgggtcagtgatggctttgtctctttatgtctaaagtgccctatggctgctgaaggttacctaaccattctttaaaaggagaatgaccctccatgggaatggccagcctgccaactgtgcaattgaagaagacccgatggatcaaccccatgtctcccttggggagaaagtgcataaaccaggggtctctttttttttttcaacaaaccattgagctgttcttggagttcatctctggagaggttatacattattagaagtttgattattattatagtttgatcaatttatttgtcttagagatccaatttttactaattccctagttttttatttcagcatctgaatgtctttctccctagcacagtgcatacaatcagggccttgggtatttccagtgataactttccttggagaggatctaagaaaagcccagatttcggtagccatctccctccaaatatgtctctttctgctttcttagtgcccattatttccccctctcctttcttctgtcactgccatctccttcttggtcttcccattgttctttaactggccgtaatgtggaattgatatttacattttgatacggtttttttcttggcctgtgtacgggattgcctcatttcctgctctgaattttaaaattagatattaaagctgtcatatggtttcctcacaaaagtcaacaaagtccaaacaaaaatagtttgccgttttactttcatccattgaaaaaggaaattgtgcctcttgcagcctaggcaaaggacatttagtactatcgattctttccaccctcacgatgacttgcggttctctctgtagaaaagggatggcctaagaaatacaactaaaaaaacaaacaaaaacaccaaaagaaaaaaaaaagccatttaaagccagccactagagggagtcagttcagttccgtaaaggtatgctcagtgcccgctgcctgcaagctgttggggaccccagggagggcaaggcagcctgtccccgcccccagggaactagaacatgacaagaattctccgcactgtgcctacctgtccctttaccttacctctctggcccagagttcttggagggttttttctttattttcttatgtactcatctacttattctcaaagtatttagcattcaacactctttttgctttaaaaagaatggccttacaaagggacagaaaagagaagacacgagcttggtgtattttcatcaagttatgtggcagagaaatccagatattaccaggacctgtctaaacaaatgttgtgggttttcttttcattcggatagccactttatagttggaatatcaattctaatgaggaggaagacataaatataagtggtaaaaagaaacatgacttcccttaaaacaggctggataatctatatcagccttgtgggtggagactagtatttgatccttgccatataaaacattttaatatggtttacatgggaaaatatcgatggcttcctcacaaaatgtatgggtgacgtgaagttgaagagccaatggcttgggtgacacgtgctggatccaaaaagatcagggagactagaataaaacttggatgttaaaaattcaccaggaatccacataaagtactatatttgggctaaaatgaaaaactaaatacaaggtgggagagaggcaagaatttcagttgactaagctcagtgtgagtcaaagtgggatggaaccatgcaaaaacaaaacccacagacatgcaggctacgtgaggagaaaacagtggtgaggatcacatcacattgtgtttgcatttgccggaaccatactttaagaagaaaaccgatcatctataataacatcagtttatcaatgccccgtcctgatgaagtgtgcagactctcagaaacagcaggaaggacttcatgagaaccctcaggctggagaaggcactagggcacaaggagagctctcctaggaccaggaccaagaagctacaggcaggcacagtttagctcctgcagagacccagcttttcacaagttggagccttccagagatagagggactgtggtaggtggtgacccacccatcactggaggtggaagcagaggccgtttgccagggatgctggagaggggattcaagcatctggctgggcaacgtgatgctcagggccgtctccactcagggcttaggggagtctgtgagtagaagagctttaggtgatttgtttggtgggggaaggcaagtacacagctatgcactttccgtttctgacttttgccaccctgtcagccatggggagcccactgtgggactgaaaccctgagctgaatgcggcctcatgtctcagagaaacactggcaagttggtcagagccgccgtctgcatcgaggcgtagctgagcggcaggatggggggctgcctgcccagggtctctcaccgtggtgtaagcagagccatggcttgcctaggaccctatagataccatcactctttctcagctcgactggagtttctgcacctttgcaggggcaaagtaactccctgcaccctgaaccaccccccattcctgttcatttcagcagataatgatggagggggggggtgtccatcgtgctgagggtgtgaccgcaagagggtgaaaacttccagccaactttctcagtcctttctcttgcgagagggaagccacctgctatacaaactaataccccctgccttgaccccttccccacgactcagttgacagaaggatatactttgttataacttattattttgttctctgtaaatacaagatgtttataggaaatatgtattctgaactctatctgcagaatgagtcactacaccaaaatagttctattatttagaatgtgttaattttaaagggacctgataggtatttatttacatatgcgatccacatttgtgtgaaagcatgtgatcatactaacccagcctcctggaatgtcgctgtacgatgattgatgtctttttctcagtccatagttacaattgtttagtatgctaatcagtccagttccctgaggtttaagatcaaatataaattactctgcttttcgactcattcaggtagcattgtacctgaacctgattgctactttttcatcttaaatattatatttcctcatctaatctgccttcccctcatccacagacatttggagaaggaaatgggagggtgtctgttatccctttctctttgctttgtccccgttgttagactggcagcgtcagttgctcggtgggcttggttagagccgtgggtgaggcaggtggctggcggggacagggagaggctgagagggaagtggtggcatttactgctctgacacttccactgtccctgctggggatgctggggccaaggcctgtggggcctgtgaactgcacagccaggagcaaggaacccactaaatactccgtcacctccatgtcccctctacagtgttaaattattacataagcaggtgaaaggtagaaggcgaattatgtgagtaaatatggtctgttttctcttcagcaaaaatgactatttttgtgtgtgactaatttatttttattattgtaaagatacaataaaccggttgaaatatctgctttgttgacaagcgtgtgctttctctggccttattcgcgttctgttctcctgcaaatagcgccctctaaaaagaagagtcagacaataaactggttgaaatatc

SEQ ID NO: 217002 - DNA, 3057 bp, Artificial Sequence
  derived and/or modified sequence
atggtgagccacttcatgggcagcctgtctgtgctgtgcttcctgctgctgctgggcttccagtttgtgtgcccccagcccagcacccagcacaggaaggtgccccagaggatggctgctgagggcgccccagaagatgatggcggcggcggggcccctggggtgtggggcgcctggggcccctggagcgcctgcagccgcagctgcagcggcggcgtgatggagcagacccggccctgcctgcccaggagctaccgcctgcggggcggccagaggcctggggccccagcccgggcctttgctgaccacgtggtgtctgctgtgaggacctctgtgcccctgcacaggagcagagatgagaccccagccctggccggcacagatgccagccggcagggccccaccgtgctgcggggcagccgccacccccagccccagggcctggaggtgactggagaccggcgcagcaggacccggggcaccatcggccctgggaagtatggctacggcaaggccccctacatcctgcccctgcagacagacacagcccacaccccccagaggctgcggcggcagaagctgagcagccgccacagccgcagccagggcgccagcagcgcccggcacggctacagcagccctgcccaccaggtgccccagcacggccccctgtaccagagcgacagcggccccaggagcggcctgcaggccgctgaggcccccatctaccagctgcccctgacccatgaccagggctacccagctgccagcagcctcttccacagccctgagaccagcaacaaccacggcgtgggcacccacggggccacccagagcttcagccagcctgcccggagcacagccatcagctgcatcggggcctaccggcagtacaagctgtgcaacaccaacgtgtgcccagagagcagccgcagcatccgggaggtgcagtgtgccagctacaacaacaagcccttcatgggccgcttctatgagtgggagccctttgctgaggtgaagggcaacagaaaatgtgagctgaactgccaggccatgggctaccgcttctacgtgcggcaggccgagaaggtgattgatggcaccccctgtgaccagaatggaacagccatctgtgtgtctggccagtgcaagagcatcggctgtgatgactacctgggcagtgacaaggtggtggacaagtgtggggtgtgtggcggggacaacacaggctgccaggtggtgtctggagtcttcaagcacgccctgaccagcctgggctaccaccgggtggtggagatccctgagggcgccaccaagatcaacatcacagagatgtacaagagcaacaactacctggccctgcggagccgcagcggccgcagcatcatcaatggaaactgggccatcgacaggcctgggaagtatgaaggaggcggcaccatgttcacctacaagaggcccaatgagatcagcagcacagctggggagagcttcctggccgagggccccaccaatgagatcctggatgtgtacatgatccaccagcagcccaaccctggggtgcactatgaatatgtgatcatgggcaccaatgccatcagcccccaggtgcccccccacagaagacctggagagcccttcaacggccagatggtgacagagggccgcagccaggaggagggggagcagaagggcagaaatgaggagaaggaggacctgcggggggaggcccctgagatgttcaccagcgagagcgcccagaccttccctgtgcgccacccagaccgcttcagcccccacaggccagacaacctggtgcccccagccccccagcccccccggcgcagccgggaccacaactggaagcagctgggcaccacagagtgcagcaccacctgtgggaagggcagccagtaccccatcttccgctgtgtgcacaggagcacccatgaggaggcccctgagagctactgtgacagctccatgaagcccaccccagaggaggagccctgcaacatcttcccctgcccagccttctgggacatcggggagtggagcgaatgttccaagacctgtggcctgggcatgcagcaccggcaggtgctgtgccggcaggtgtatgccaacagaagcctgactgtgcagccctaccgctgccagcacctggagaagccagagaccaccagcacctgccagctgaagatctgcagcgagtggcagatcagaacagactggaccagctgcagcgtgccctgtggggtgggccagaggaccagagatgtgaagtgtgtgagcaacattggagatgtggtggatgatgaggagtgcaacatgaagctgcggcccaatgacatcgagaactgtgacatgggcccctgtgccaagtcctggttcctgacagagtggagcgagcgctgcagcgcagaatgtggggccggcgtgaggaccaggtctgtggtgtgcatgaccaaccacgtgagcagcctgcccctggagggctgcggcaacaacagacctgctgaggccaccccctgtgacaatggcccctgcaccgggaaggtggagtggtttgctggctcctggagccagtgcagcattgaatgtggcagcggcacccagcagcgggaggtgatctgtgtgaggaagaatgctgacacctttgaggtgctggaccccagcgagtgcagcttcctggagaagccacccagccagcagagctgccacctgaagccctgtggggccaagtggttcagcacagagtggagcatgtgcagcaagagctgccagggcggcttccgggtgcgggaggtgcgctgcctgagtgatgacatgaccctgagcaacctgtgtgacccccagctgaagccagaggagcgggagagctgcaacccccaggactgtgtgcctgaggtggatgagaactgcaaggacaagtactacaactgcaatgtggtggtgcaggcccggctgtgtgtgtacaactactacaagacagcctgctgtgccagctgcaccagggtggccaaccggcagacaggcttcctgggcagcaggtag

SEQ ID NO: 217003 - DNA, 3057 bp, Artificial Sequence
  derived and/or modified sequence
atggtgagccacttcatgggcagcctgagcgtgctgtgcttcctgctgctcctcggatttcagtttgtgtgtcctcagccatctacgcagcatcgcaaagtgccacagcgcatggctgcagagggggctcctgaagacgatggcggtgggggggctcccggtgtgtggggagcttggggaccatggagcgcttgttcccgaagctgttccggtggagttatggaacagacacgtccctgtctaccaagatcctacagactcagggggggacagagacccggggccccagctcgggccttcgcggatcacgttgtgtctgccgttcgaacttcggtgcccctgcataggagccgcgacgagacacctgccctggcaggcaccgacgcctcacgccaggggcccacagtcctcagagggtcacgacacccccagccccagggccttgaggtaactggcgatagacgctctcgcacccggggtaccattgggccaggcaaatacggttatggcaaagcaccatatatattgcctctccagacggatacggcgcacacgccccaacgcctgagaaggcagaaactatccagcaggcacagtaggagccagggggcttccagcgcccgccacggttactccagcccagcgcaccaagtgccccaacacggtcctctctatcagagcgattccggccctcggtccggtctgcaggctgcggaggcgcccatctatcagctgcccttaacacacgaccagggctaccctgcggccagcagtctgttccattccccagagacgagcaacaaccatggcgtgggtacccacggggcaacccagagttttagccagccggcacgcagcaccgccatctcatgtattggcgcgtatcggcaatataagttgtgtaacactaacgtctgccccgagtcttctcggtccatacgggaggtccagtgtgcctcatacaataacaagccctttatgggtcgcttttatgaatgggagccgtttgctgaagtcaagggcaaccggaagtgcgaattaaattgccaggccatggggtaccgattttatgtgcgccaagcagagaaggtcatcgacgggacaccctgcgatcagaacggtaccgccatctgtgtgagcggacagtgtaagtccatcgggtgtgatgattatttagggagtgataaagtagttgacaagtgtggagtgtgtggaggcgacaacacaggttgtcaggtcgtgtcaggtgtttttaaacacgccttaaccagtttaggctatcaccgtgtggtggaaattcccgaaggggctacaaagatcaacataactgagatgtacaagagcaacaactacctggcgctccggtcccgctcgggacggagcatcattaacggaaattgggctatcgataggcccgggaaatatgaggggggagggacaatgttcacctacaaacggcccaacgagattagttcgacagccggggagtcctttctagctgagggccctacgaacgagatcctggacgtctacatgatccatcaacaacctaacccaggcgtccattatgagtatgtgattatgggtacgaacgccatatctcctcaggtgcccccccaccgcaggcctggagagcctttcaacggtcaaatggttactgagggccgaagtcaggaggagggtgaacagaaaggtcggaatgaagaaaaggaagacctccgcggggaagcaccagaaatgtttacatcggagagcgcacaaaccttcccagtgcgtcatcccgacagattctctccgcatcgccctgataatctagtacctccggcccctcaacctccccggcgctctagagatcacaattggaaacagctaggtaccaccgaatgctcaacgacttgcggcaagggtagccagtaccccattttccgttgtgttcacaggagcacacatgaagaagcccccgagagttactgcgattcatctatgaagcccacgcccgaggaagaaccttgcaatatttttccttgcccagcattttgggatatcggtgagtggtctgagtgcagtaaaacctgcgggctcgggatgcagcataggcaagtattgtgtcgacaggtttatgcgaatcggtccctcaccgtacagccataccgctgccaacacttggaaaagcctgaaactacctctacgtgccagctgaaaatatgcagcgagtggcagataagaacagactggacttcatgtagtgtaccctgcggtgttggccagcggacacgggatgttaaatgtgtgtcaaacatcggggatgtggtggacgatgaagaatgtaacatgaagcttcgtcccaacgacatcgagaattgtgatatgggtccttgcgccaaatcatggttcctgactgaatggtcagagcgttgtagtgctgaatgcggtgccggcgtcaggactaggagcgtggtgtgtatgaccaaccatgtctcatccttacctctcgagggttgtggaaacaataggcccgctgaagccacgccctgcgataatggaccatgtacagggaaggtggaatggttcgccggctcgtggagtcagtgctctatagaatgtggttctggaactcagcagagggaagtaatctgtgtcaggaagaatgcagatactttcgaggtgcttgacccttctgaatgtagctttcttgaaaaacctccttcgcagcaaagttgtcaccttaagccatgcggtgcgaaatggttttccacagagtggagcatgtgctcgaaatcttgccagggagggtttcgcgttagagaggtgaggtgccttagcgatgacatgacgttgtcaaatctctgcgaccctcagctgaagcctgaagaaagggagagttgcaatccccaagattgcgttcctgaagttgatgagaactgcaaggataaatactataactgtaatgtcgttgttcaggctaggctttgcgtctacaattactataaaaccgcgtgctgcgcctcctgcacaagggttgccaatcgacagaccggctttttgggcagccgatag

SEQ ID NO: 217004 - DNA, 3057 bp, Artificial Sequence
  derived and/or modified sequence
atggtgagccacttcatgggcagcctgagcgtgctgtgcttcctgctgcttctcgggtttcagttcgtctgcccacaaccatcaactcagcaccgcaaggttcctcagagaatggccgctgagggcgctcctgaagacgacggggggggcggggccccaggtgtgtggggcgcctggggaccttggagtgcctgctcccggtcctgtagcggcggagtgatggagcagacccggccctgtctgccccggagctatcgtcttagaggcggccagaggcccggcgcacccgctagagcctttgccgatcacgtcgtgtctgcggttaggacatccgtccctctccaccggagtcgggatgagacccccgccctggctggcactgacgctagtcgtcaaggacccactgtcctaagggggagtcggcatccccaaccacagggactggaggtcaccggtgacaggcggtcacgtactaggggaacaatcggcccagggaagtatggttatggaaaagctccttacatcctacccctccagacggacacagcacacacccctcaaaggttacgccgccagaaactgagcagccgacactctagatcccagggggcctcaagcgcgaggcatggatatagctcccctgcacaccaggtgccacagcacggaccgctgtaccagagcgactccggtcctcgttccggactgcaggccgccgaagctccaatctatcagctacctttgacacacgatcagggttaccctgccgcgagcagtctgttccactctcctgagacgtccaacaaccacggcgtggggacgcatggcgccactcagtcattcagccagccagccagaagcacagcaatcagctgcatcggcgcctaccggcagtacaaattgtgcaatacaaacgtgtgccccgaatcctcacgcagcatccgcgaggtccagtgtgcttcttataacaacaaaccttttatgggccgtttttacgaatgggagccgtttgcggaggttaagggcaaccggaaatgtgagttaaattgccaggctatgggataccgattctatgtccgccaggcagagaaggttatcgatgggactccatgtgaccaaaatggaactgccatctgcgtgagtgggcagtgcaagtccatcgggtgtgatgactacctgggatctgacaaggtcgttgataaatgcggtgtctgtggtggggacaacactggctgccaggtggtctccggcgtctttaaacatgcactgacttctcttggctaccaccgcgtagtcgagattcccgaaggagctacaaagatcaatatcaccgagatgtacaagtccaataattacctcgctcttaggagtcgaagtggaaggtcaatcattaacggaaattgggctattgatcgccccgggaagtatgaggggggagggaccatgttcacctacaagcgcccaaatgagattagctcaacggccggtgagagcttcctagcggaaggaccaactaatgagattttggacgtctacatgattcatcagcaacccaaccctggcgttcattacgaatacgtaatcatgggcacgaatgcaatcagccctcaggtcccccctcatcgcagacccggagagccattcaacggacagatggtcacggaggggcggagtcaggaggaaggggaacagaagggaaggaatgaggaaaaagaggatctgcgcggagaggccccggagatgttcacaagcgagagtgcacagacttttccagtgcgtcatccagatcgcttcagtcctcatcgacccgataatcttgtaccccccgccccacagccacctagacgtagtcgggaccacaactggaaacaactggggacaaccgaatgctcaacaacttgcggcaaaggaagtcagtaccccatattcaggtgcgtgcatcggagcacccatgaggaggcacctgagagctactgcgacagcagcatgaaacccacacctgaagaggaaccttgtaatatttttccttgcccggctttctgggatatcggagaatggagcgagtgttccaagacatgtgggcttggaatgcagcaccggcaggtcttgtgccgtcaagtgtacgcaaatagaagcttgacagtgcaaccctataggtgtcagcacctggagaagccagaaactactagcacctgtcagctgaagatatgcagcgaatggcagatacggacagactggacttcttgcagcgtgccatgtggagttggccagagaacccgcgatgtgaagtgtgtaagtaatatcggagatgtggtggatgacgaagaatgtaacatgaaactgcgtccaaacgacatcgaaaattgcgatatgggaccttgtgcaaaaagctggtttctcaccgagtggtctgagagatgtagtgcagagtgcggggcaggcgtgaggacaaggtccgttgtttgtatgaccaaccatgtgtccagtctgccattggaaggctgtggtaacaatagacccgctgaagctactccctgcgacaacggcccatgtacgggaaaagtggaatggtttgccggaagttggagccagtgctctattgagtgcggcagcgggacccaacagagagaggttatctgcgtccgcaagaatgccgacacatttgaagtgctcgacccatctgagtgctctttcttggagaaacccccttcccaacaaagctgccatctaaaaccctgcggggctaaatggttctcaaccgaatggtccatgtgctctaaaagttgccaggggggatttcgcgtgagagaggtccggtgtctttctgatgacatgactctctccaacctctgcgatccccaactcaaaccagaggaacgggaatcctgcaatccccaagactgtgtgcctgaggtggacgagaattgtaaagataagtactacaattgcaatgtggtggttcaggcgcgactgtgtgtctataattattataagaccgcctgttgtgcgagctgtactcgcgttgccaatagacagacaggatttcttggcagccgttag

SEQ ID NO: 217005 - RNA, 3057 nt, Artificial Sequence
  derived and/or modified sequence
auggugagccauuucaugggcucuuuauccgucuuaugcuuucuccuauuacuuggauuucaguucgucuguccucagcccucuacacaacaucggaagguuccccagcggauggcugcugagggggcaccggaagaugacggcgggggcggugccccagguguguggggggcuugggguccuuggucggccuguaguaggaguuguucagggggaguuauggagcagacuagacccugucugcccagauccuaucgccugaggggcggacaacgaccuggagcgccugcucgcgccuuugcagaucauguggugagcgcaguucgcaccuccgugccccugcaccguucacgugaugagacaccagcacuggcaggcaccgacgccucuagacaaggaccaaccguacugaggggcucccggcauccucagccccaggggcuagaagugaccggugaucgucgaucccggacccgaggaaccauuggcccagguaaguacggcuacggaaaggcuccuuauauacucccccugcagaccgacacagcccacacaccacagaggcuccgucgucaaaagcucuccucacgacauagucggagucagggagcaucaucugcccggcacggauauucaagcccagcacaucagguaccccagcacggaccccucuaucaguccgacagugguccuagaucuggacugcaggcggcggaagcccccauuuaucagcugccgcuaacacacgaucaaggguacccagccgcuagcucccuguuccacucaccugagaccucaaauaaccacgggguaggaacccauggugccacucagucuuucucccaaccugcucgcucuacagcuauuuccuguaucggagccuaucggcaauacaaacucugcaacaccaacgucugccccgaaagcagccgaucaauccgcgaagugcagugugccaguuacaauaauaaaccguucaugggccgauucuacgagugggagccauuugccgaggugaagggcaacagaaagugcgaacugaauugccaggccauggguuaucgauucuaugucagacaggccgaaaaaguuauugacggcacucccugcgaccagaacggcacggccaucugcgugucaggucaguguaagucaauuggcugugaugacuaucuugguucugauaaggugguggacaaaugugggguauguggaggagacaauacugguugucaggucguguccggcguauucaaacaugcccuaacaucacucggcuaccacaggguuguggagauccccgagggcgcuaccaaaauaaacaucacagaaauguauaagucaaauaacuaccucgcccugaggagucggagcggcaggucuauaaucaacggcaauugggcgauugaccggccggggaaguaugaaggcgggggcaccauguuuacuuauaagcgaccgaaugagaucucuagcacagcgggcgaaucuuucuuggcugaggguccuacaaacgagauucucgacguguauaugauucaucagcagccuaauccaggaguucacuacgaauacguuaucauggggacuaacgccauuuccccccagguaccuccccacagacguccaggugagccuuuuaacggccaaauggugaccgaggggcggucacaggaagagggcgagcagaaaggaaggaaugaagagaaggaggaccugcguggggaagcuccugagauguuuaccuccgaauccgcgcagacuuuuccagugcgucacccagaccgcuuuucaccacaccgucccgauaauuuagucccgcccgcgccucagccgccacgacguucaagagaccauaauuggaaacaauugggaacuaccgaguguucuaccacgugcgguaaaggaucacaguauccuauuuuuagaugcguccaucgaucuacucaugaggaggccccggaaucuuacugugacucuaguaugaagccgacacccgaggaagagcccugcaacaucuuucccugucccgccuuuugggauaucggcgaauggucagagugcuccaagaccuguggucucgggaugcagcaccggcagguacugugccggcaaguuuacgcgaaucggucauuaaccgugcagcccuauagaugucagcacuuagaaaagcccgaaacuacaaguaccugccagcucaagauuugcucugaguggcagauccgcacagacuggaccucguguuccgugccuuguggcgugggucaacgaacucgggaugugaaguguguuuccaauauuggggacguugucgacgaugaggaaugcaacaugaaacuccgcccuaaugacauugaaaacugugauaugggucccugcgcuaaaagcugguuuuugaccgaauggagcgagcggugcuccgcugaaugcggugcuggggugaggaccagaucuguaguuugcaugaccaaucaugucucuucacuaccuuuggagggaugcgggaacaaccguccugcagaggccaccccaugugauaauggcccuuguaccgguaagguugagugguuugccggcuccuggucccagugcagcauugaguguggcuccggcacacagcagagagaagucaucuguguuagaaaaaacgccgauacuuuugaagucuuggacccaucugaauguucauuucucgagaaacccccaagucaacaguccugccacuuaaagcccugcggagcaaagugguuuucuaccgaguggaguauguguuccaaaucuugucaggguggauuucggguucgcgagguccgcugucugagugaugauaugacccucuccaacuuaugugacccccagcucaaacccgaagagcgcgaaucuuguaauccacaggauuguguaccugaggucgacgagaauuguaaagauaaguacuacaacuguaaugucguuguccaggcucgccuguguguuuauaacuacuacaagaccgcuugcugcgcuucauguaccagagucgcaaaucgacagacaggcuuuuuaggcagcagguag

SEQ ID NO: 217006 - RNA, 3057 nt, Artificial Sequence
  derived and/or modified sequence
auggugucucauuucauggggagucucaguguacuuuguuuccugcugcugcucggauuccaguucgugugcccacagccuucgacgcaacauaggaaggucccacagcgaauggcugcugaaggagcuccagaagacgacggugggggaggggcccccgguguuuggggggccuggggcccgugguccgccugcucacgguccugcagcggaggggugauggaacaaacgagaccguguuugccucgcucuuaccgucuaagagggggacagcggcccggcgcacccgccagagcauuugcugaccaugucgucucugcagucaggacuucaguaccucuccauaggucccgggaugagacccccgcccucgcgggcaccgacgcuucaaggcaaggcccgacaguacugaggggaucccggcacccacaaccucaggggcuggaagugaccggugacagaagaagccggacucgugggacuaucggaccuggaaaauacggauauggcaaagcucccuacauacuaccucugcagacggauaccgcccacacaccucaaagacuuagacgacagaagcuauccagcaggcauucucgcucucagggggccaguuccgcucggcaugguuauucuuccccggcccaucaggucccacagcacggcccccuguaucaaucagauucagguccuaggucuggccugcaggccgccgaggcucccauauaucagcucccccuaacccacgaucagggcuacccagcggcaucaagccucuuccauucacccgagaccagcaauaaucacggcgucggcacucacggcgcuacacaaucguuuucccagccagcccgguccacugcgaucagcugcaucggcgccuaccgucaguauaagcuaugcaacaccaauguguguccagagagcagccguucuauccgggaaguucaaugugccaguuauaauaacaagccuuucaugggucgcuucuacgagugggagcccuucgccgaggugaaagggaacaggaagugugaacugaacugucaggccaugggguaucgguuuuacgugcgccaggcggaaaaggucauugacggaaccccuugcgaucagaacggcaccgccaucugcgugagcgggcaauguaagagcauuggcugcgacgauuauuuagggucugauaaagugguagacaagugcgguguaugcgggggagacaauacuggcugucaaguuguuagcggaguguucaaacaugcucuuacuagucucggcuaucaccgcguugucgaaaucccagagggagccaccaaaauaaacaucacagaaauguacaagucuaauaacuacuuggcccuccggucucgcaguggccgcagcaucaucaacggaaacugggcaaucgaucggccuggaaaguacgaaggcggaggcaccauguucaccuauaaaagaccuaacgaaauaucuaguaccgccggcgaauccuuccucgcugaggggccuaccaacgaaauucuugacgucuauaugauacaccagcaaccuaauccaggaguucauuacgaguacgugaucauggggacuaacgcuauuucaccucaaguccccccccaucgaaggccuggcgagccguuuaauggucagaugguaacugagggacgcucccaagaggagggcgagcaaaagggacguaacgaagaaaaggaggacuuacgcggcgaagcgccugaaauguucacaagcgagagcgcucaaaccuuuccagucaggcaucccgaucguuucagcccucaccggcccgacaaccucguaccccccgcaccucagcccccacgcagaucccgugaccauaacuggaagcagcugggcaccacugagugcucaacgacuugugguaaggggucccaguacccaauauuccgcuguguucaccgguccacucacgaggaggccccagagagcuauugugauaguuccaugaagccaaccccagaggaggaaccaugcaacauauuuccuugccccgccuuuugggacaucggagaguggagcgagugcagcaagaccugcggccucggcaugcagcauagacaggugcuuuguagacagguguaugccaauagaucacugacggugcaacccuacaggugccagcaccuggagaagccagagaccacuuccacaugccaacugaagauuuguagcgaauggcagaucagaacagauuggaccuccugcuccguuccuuguggugugggccagcgcacucgcgaugugaaguguguuucuaacaucggagacgugguggacgaugaggaaugcaacaugaaguuaaggcccaaugauauugagaacugugacaugggcccaugcgcuaaauccugguuuuuaacagaauggucugagcggugcucugccgaaugcggagccggggugcggacacgauccgucguuugcaugaccaaucacgucaguagccugccccuugaaggaugcggcaacaaccggccugcugaagccaccccaugcgacaacgggccuugcacaggcaaaguggaaugguuugcuggcuccuggagucaauguucgaucgaguguggcucagggacucagcagagggaggugaucugugugagaaaaaaugcugacaccuucgaaguuuuagaccccucagagugcaguuucuuggagaaaccucccagccagcagucuugucaucuuaaaccgugcggugcuaaaugguucucaacggaauggucaaugugcagcaaaagcugucagggcggauuucgugucagggaaguccgcugcuugucugaugacaugacccugucuaaccuaugugauccccagcucaagccagaagaacgugaguccuguaacccucaggauugcgugccggagguggacgagaacuguaaagacaaguacuacaauuguaaugucguugugcaggccagacuauguguuuauaauuacuacaagacugcgugcugugcauccugcacaaggguagccaaucgucaaaccggcuuucuuggcagucgauag

SEQ ID NO: 217007 - RNA, 3057 nt, Artificial Sequence
  derived and/or modified sequence
auggugagucacuuuaugggcagcuugucugugcuuugcuuucuucuacuguugggcuuucaauucguguguccccagccuucuacucagcauaggaagguuccacagcgcauggccgcugaaggcgccccagaggaugauggagggggcggugcacccggaguuuggggugcgugggggccauggucugcgugcagucggucaugcagcggggggguaauggagcaaacccguccaugcuugccuagaucuuaccgucuucgaggaggccaacguccuggagccccugcgagagcguuugccgaucacgucgugagcgcgguaagaacuucagugccccuccacagaaguagagacgagacuccugcccuggcuggcaccgaugcguccaggcagggccccacaguguugagagguucgcgucauccccagccucaaggacuugaagucacgggcgauaggaggagccggacuagagggacaauuggcccugguaaauaugguuauggcaaagcccccuacauccucccuuuacagacggacacggcucacaccccucaacgguuacgucgacagaaacuuucuucacgccacucuagaagccagggcgccuccucagcccggcacggcuauuccucgccagcacaucaagucccucaacacgguccacuguaccaaagcgacuccggcccacgguccggucuccaggccgccgaggcuccuaucuaccagcuaccacucacucacgaucaaggauauccagcggccuccucucuguuucacagcccggaaacaucuaauaaucacggcguugggacucauggcgcaacacaaucuuucagucagccagcucguucaacugcaaucagcuguaucggggccuacaggcaguauaaauuguguaauaccaauguguguccugaaucaucccgaagcaucagagaaguucagugcgcuucauauaacaacaaaccauuuaugggccgguuuuaugagugggaaccauuugcugagguuaaaggaaacagaaaaugugaauuaaacugccaggccaugggcuaccgguucuauguucggcaggcugaaaagguaauugacggaaccccaugcgaccagaacggaacggccauuugcgugucuggccaguguaaaagcaucggaugcgacgauuacuugggaagugacaaggugguagacaaauguggggugugcggcggugauaacacaggaugucagguggugagcggcguuuuuaaacacgcacugaccucauugggcuaucaucgaguaguugagauaccagagggggccacgaaaauuaauaucacagaaauguauaagagcaacaacuacuuggcgcugcggucgaggagcggcaggagcaucauuaacggcaauugggcuaucgacaggcccggaaaauacgaagggggcggcaccauguuuacauacaaacggccaaacgagauuucguccacugcaggggaaucauuccuggcugaaggaccaacuaacgaaauacucgacguguacaugauacaccaacaaccaaaccccggcgugcauuacgaauauguuauuaugggcacuaaugcgaucucaccacaagugccuccccaccggcggccaggagaaccauuuaacggacagaugguaacagagggacgaucucaagaggaaggcgagcaaaaagggaggaacgaagaaaaggaggaccuaagaggggaagcucccgagauguuuacaucagagagcgcucagaccuuucccguccgacacccugaccgcuucuccccucaccgucccgacaaccucgugccacccgccccucaaccuccacgacggagcagggaucacaacuggaaacaacuuggaaccaccgagugcuccacuaccugcgguaagggaucacaauauccaauuuuuagaugcguccaccggucuacucacgaagaagccccagaguccuacugugauaguucaaugaaaccuacaccugaagaagaaccuuguaauaucuuccccugcccagcauucugggauauaggcgaguggucagagugcagcaagacgugcggacugggcaugcagcacaggcagguguugugcagacaggucuacgcaaaccgaucccucaccguucagcccuaccgaugccaacaucuggaaaagcccgagaccacuucaacuugucagcuaaagaucugcucagaguggcagauucguacugacuggacgaguugcucaguaccaugcggcguuggucaacgcacccgggacgugaaauguguuucuaacaucggagacguggucgacgacgaagaauguaacaugaaacuacgaccuaacgacaucgagaacugcgacaugggcccuugcgcaaaauccugguuuuugacggaguggagugaaagauguucugccgaaugcggggcuggagugaggacacggucuguuguuugcaugacaaaccacgucucuucuuuaccccucgagggcugugggaauaaucgcccugcugaggcaacaccaugugacaauggaccgugcacaggcaagguggagugguuugcaggaucauggucucaguguagcauugagugcgggagcgggacacaacaaagggaggucauaugcgugcgcaaaaacgccgauacauucgaagugcuggaccccucugaguguagcuuuuuggagaaacccccaagucaacaguccugccacuuaaagcccugcggagcaaagugguuuucuaccgaguggaguauguguuccaaaucuugucaggguggauuucggguucgcgagguccgcugucugagugaugauaugacccucuccaacuuaugugacccccagcucaaacccgaagagcgcgaaucuuguaauccacaggauuguguaccugaggucgacgagaauuguaaagauaaguacuacaacuguaaugucguuguccaggcucgccuguguguuuauaacuacuacaagaccgcuugcugcgccucuugcacccgugucgccaaucgccaaacuggauuccuuggaucucgcuag

SEQ ID NO: 217008 - RNA, 3057 nt, Artificial Sequence
  derived and/or modified sequence
augguaagucacuucaugggaucacuuagugugcuaugcuuucuucuucugcucgguuuccaguucgugugcccucagccaucaacacagcauagaaaggucccacaacggauggcagccgaaggagcuccagaagaugauggcggcgggggggcuccaggugucuggggagcaugggggcccugguccgcguguucucgcucauguaguggcggggugauggagcagacuaggcccugcuugccucgaucauacagacugcggggcggucagcgaccgggugcuccggccagagcuuuugccgaccacguugucucagccguucggaccuccguuccacuucacaggucucgcgacgaaacaccagcccuggcagggacagacgcaucuagacagggcccuaccgugcuccggggcucaagacauccccaaccccaaggccuugaagucaccggcgacagacgcucacggacaaggggaaccaucggccccgggaaguauggguauggcaaagccccguauauccugccccuacagaccgauaccgcccacaccccacagcgacucagacgccaaaaauuguccucgcgacacaguaggucccagggagcgaguucagcacggcacggguacucuucacccgcccaucaagugccucagcauggacccuuauaucagagcgacucagguccacggaguggucuucaagccgcggaagccccuauuuaucagcugccucugacgcacgaucaagguuauccggcugccucuucccucuuccauuccccagaaacaagcaauaaucacgguguugggacucacggugccacccaauccuucagucagcccgcccgcagcaccgcaaucucuuguaucggagcauacaggcaguacaaacuuuguaacacgaacguauguccagagagcaguagaagcauacgcgaaguccagugcgccuccuacaauaacaaaccauuuauggggcgauuuuaugaaugggaaccuuucgccgagguaaaggggaauagaaagugugaacucaacugucaggccaugggcuauagguuuuaugugcgccaggcggagaaagucaucgaugggaccccaugugaccaaaacgguacugccauuuguguuagcggacaguguaagagcauagggugugaugacuacuuagguagcgauaaggugguugauaagugcgguguguguggcggagacaacaccggcugucaagugguauccggcguauuuaaacaugcccugacaaguuuaggcuaucauagagucguggagauucccgaaggugcaacaaaaaucaacauuaccgaaauguacaagucuaauaauuaucuggcuuugaggagccgaagcggacguagcaucauuaauggaaauugggcgaucgacagaccgggaaaguacgagggggggggaacaauguuuacauauaaacguccuaaugaaaucagcucgaccgcuggagaaagcuucuuggccgagggccccacgaacgagauacuagacguauacaugauucaccagcaaccaaaccccggcguacauuaugaguacgugaucaugggaaccaacgcaaucucuccacagguacccccucacagaaggccaggcgaacccuuuaauggacagauggugacugaaggaaggagccaggaagaaggcgagcagaaaggccgcaaugaagaaaaagaagacuugcgcggugaggcucccgagauguucaccagcgaaucagcacaaacauuuccugugcgccaccccgaccguuuuucuccucaccgcccugauaaucuaguaccacccgcuccacagccaccaaggaggucgcgggaucauaauuggaagcaguuagggacaaccgaguguucuacuaccugcgggaagggaagccaguaccccauauuuagaugcguucaucgcucaacucaugaggaagccccagaaucauauugugauuccucgaugaaacccacacccgaagaggagcccuguaacauuuuuccuugccccgcguucugggauauuggagagugguccgagugcucaaaaacauguggucugggcaugcaacaucgacagguucuuugccgacaaguguaugccaauagguccuuaaccgugcagccuuauagaugccagcaccuggaaaaacccgaaaccacaagcacuugccaacuuaaaauuugcuccgaguggcagauuagaacggacuggaccuccuguucaguaccaugcgggguggggcaacgcacaagagacgugaaaugcgugagcaacaucggagaugucguagaugacgaggaaugcaauaugaaacugagacccaaugauauugagaauugcgacaugggacccugcgcgaaaucaugguucuugacugaguggagugagcgguguagugccgagugcggagccggugugcgaacacgguccgugguguguaugacuaaccaugucucuuccuugccucucgaggggugcggaaacaaccgacccgccgaagcuacucccugcgauaacggccccuguacuggcaaggucgaaugguuugcgggaucuuggucucaaugcuccaucgagugcgguuccgguacacagcagcgcgaagugauuugcgugaggaagaaugccgauacauucgagguucucgauccuucugaauguaguuucuuagagaaaccgcccucacaacaauccugucaucugaaaccaugcggcgcuaagugguuuuccacugaauggucuaugugcuccaaaagcugccagggaggauuuagggugagagaaguucgaugucuaucugacgauaugacucugucuaaccugugugacccacaacuaaaaccagaggagagggaguccuguaauccccaggauugugugccugaggucgaugagaauugcaaagacaaauauuauaauuguaacguugugguacaggcccgucucugcgucuauaacuauuacaaaacugcaugcugcgcuucaugcacccgaguagcaaaccggcagacaggguuucuggguagucguuag

SEQ ID NO: 217009 - protein, 559 aa, Artificial Sequence
  derived and/or modified sequence
MGSRIKQNPETTFEVYVEVAYPRTGGTLSDPEVQRQFPEDYSDQEVLQTLTKFCFPFYVDSLTVSQVGQNFTFVLTDIDSKQRFGFCRLSSGAKSCFCILSYLPWFEVFYKLLNILADYTTKRQENQWNELLETLHKLPIPDPGVSVHLSVHSYFTVPDTRELPSIPENRNLTEYFVAVDVNNMLHLYASMLYERRILIICSKLSTLTACIHGSAAMLYPMYWQHVYIPVLPPHLLDYCCAPMPYLIGIHLSLMEKVRNMALDDVVILNVDTNTLETPFDDLQSLPNDVISSLKNRLKKVSTTTGDGVARAFLKAQAAFFGSYRNALKIEPEEPITFCEEAFVSHYRSGAMRQFLQNATQLQLFKQFIDGRLDLLNSGEGFSDVFEEEINMGEYAGSDKLYHQWLSTVRKGSGAILNTVKTKANPAMKTVYKFAKDHAKMGIKEVKNRLKQKDIAENGCAPTPEEQLPKTAPSPLVEAKDPKLREDRRPITVHFGQVRPPRPHVVKRPKSNIAVEGRRTSVPSPEQNTIATPATLHILQKSITHFAAKFPTRGWTSSSH

SEQ ID NO: 217010 - DNA, 1680 bp, Artificial Sequence
  derived and/or modified sequence
atgggcagccgtataaagcagaaccctgaaacaaccttcgaagtctacgtggaggtagcctaccccaggacaggcgggacgctctccgacccagaggtacagcggcaattccccgaggattacagcgatcaagaagtcctgcagactctgaccaaattttgttttccattctacgtggacagcctgacagtcagtcaggtgggacagaacttcacatttgtgctgacagacattgacagcaaacaaagattcggcttctgccgtctcagctctggcgctaaatcatgcttttgtatcctctcatatctcccatggttcgaagtgttttacaaactgctgaacattttagccgactacacaactaaaagacaggagaaccagtggaatgagttgctggaaacattacacaagttgccaattcctgaccccggagtttctgttcatcttagcgtgcactcatattttacagtccccgacactagggaactgccaagcatcccagaaaatcggaacctgacagagtatttcgttgcagttgatgtgaacaacatgctacacctatatgcttcaatgttgtatgaacgcaggattcttataatttgttctaaactaagcacattaacagcctgtattcatgggtccgctgcaatgctttaccccatgtattggcaacatgtctatattccagtgttacctcctcatttactggattactgttgtgccccgatgccttaccttatcggaatacacctgtcactcatggagaaggtcagaaacatggccctagacgacgtggtgattttgaacgtagacactaacactttggaaactccatttgacgacctgcaatctctcccaaatgatgtcattagcagcctgaagaaccggctgaaaaaggtatcaacaacaactggagacggcgtagccagggccttccttaaggcccaggctgctttttttggatcgtatcggaatgccctgaaaatcgagccagaagagcctattactttctgcgaggaggcatttgtgtcccattaccggtcgggggccatgcgacaattccttcagaatgctacacaactgcagttgttcaagcagttcatagatggcagattggacctgctgaatagcggcgaagggttctccgatgtattcgaggaagaaatcaatatgggtgaatacgccggaagcgataagctttatcaccagtggttgtcaacagttcgaaagggctcgggggctatcctcaacacggtgaaaaccaaagccaaccccgccatgaaaacagtatacaaattcgccaaagaccacgcgaagatgggaatcaaagaggtgaagaacagactcaagcaaaaagacatcgccgagaacgggtgtgcccctacaccagaggagcagctcccaaagacagctccctcccctcttgtcgaggcaaaggaccctaagctacgggaagacaggaggcctatcactgtgcacttcgggcaagtccgccccccacggcctcatgtggtcaagcgtcccaagagcaatatagccgtggaaggcaggcgcacatctgtgcctagtcccgaacagaacaccatagcaactccagccacgttacacattctacagaagagcattacccattttgctgccaaattcccaacacgtggttggacatccagctctcattag

SEQ ID NO: 217011 - DNA, 1680 bp, Artificial Sequence
  derived and/or modified sequence
atgggcagccgcatcaagcagaaccctgagaccacctttgaggtgtatgtggaggtggcctaccccaggactggaggcaccctgagtgaccctgaggtgcagaggcagtttcctgaggactacagcgaccaggaggtgctgcagaccctgaccaagttctgcttccccttctacgtggacagcctgactgtgtcccaggtgggccagaacttcacctttgtgctgacagacatcgacagcaagcagcgcttcggcttctgccgcctgagcagcggggccaagagctgcttctgcatcctgagctacctgccctggtttgaggtgttctacaagctgctgaacatcctggccgactacaccaccaagaggcaggagaaccagtggaatgagctgctggagaccctgcacaagctgcccatcccagaccccggggtgtctgtgcacctgtctgtgcacagctacttcaccgtgcctgacacccgggagctgcccagcatccctgagaacagaaacctgacagagtactttgtggccgtggatgtgaacaacatgctgcacctgtatgcctccatgctgtatgaaagacgcatcctgatcatctgcagcaagctgagcaccctgacagcctgcatccacggcagcgctgccatgctgtaccccatgtactggcagcacgtgtacatccctgtgctgcccccccacctgctggactactgctgtgcccccatgccctacctgattggcatccacctgagcctgatggagaaggtgaggaacatggccctggatgatgtggtgatcctgaatgtggacaccaacaccctggagaccccatttgatgacctgcagagcctgcccaatgatgtgatcagcagcctgaagaaccggctgaagaaggtgtccaccaccactggagatggagtggcccgggccttcctgaaggcccaggccgccttcttcggcagctacagaaatgccctgaagattgagcctgaggagcccatcaccttctgtgaggaggcctttgtgagccactaccgcagcggggccatgaggcagttcctgcagaatgccacccagctgcagctgttcaagcagttcattgatggccgcctggacctgctgaacagcggggagggcttcagtgatgtgtttgaggaggagatcaacatgggagaatatgccggcagtgacaagctgtaccaccagtggctgagcacagtgaggaagggcagcggggccatcctgaacacagtgaagaccaaggccaacccagccatgaagacagtgtacaagtttgccaaggaccacgccaagatgggcatcaaggaggtgaagaaccggctgaagcagaaggacattgctgaaaatggctgtgcccccaccccagaggagcagctgcccaagacagcccccagccccctggtggaggccaaggaccccaagctgagagaagatagaagacccatcaccgtgcacttcggccaggtgcggcccccccggccccacgtggtgaagaggcccaagagcaacattgctgtggagggccgccgcacctctgtgcccagccctgagcagaacaccatcgccaccccagccaccctgcacatcctgcagaagagcatcacccactttgctgccaagttccccacccggggctggaccagcagcagccactag

SEQ ID NO: 217012 - DNA, 1680 bp, Artificial Sequence
  derived and/or modified sequence
atgggcagccggatcaagcagaaccccgagaccaccttcgaggtgtacgttgaggtggcctatccccgaaccgggggaactctatccgaccccgaggtccagcgccagtttcccgaagactacagcgaccaggaggtgcttcagacactgaccaaattctgcttccccttttacgttgatagtcttaccgtgtcccaggtgggacaaaacttcacttttgtcctcacagacatcgactccaagcaacgcttcgggttctgtcgactgagtagtggtgccaagagttgcttttgtatactcagctacttgccttggttcgaggttttttataaacttttaaacatactcgccgactatactactaagagacaggaaaatcagtggaacgaactgctggaaactctccacaaactccctattcccgatcccggtgtgtcagtgcatctcagcgttcattcttactttacagtgcctgatactagggaactgccaagcatcccagagaaccgtaatcttacagaatacttcgttgctgtcgacgttaataacatgctgcacttgtacgcatcgatgctatacgagaggaggattctgatcatttgcagcaagctgtccaccctcaccgcgtgcattcacggctcagccgccatgctttatcccatgtactggcagcacgtgtacatccccgtgctgccaccccacttactggactattgctgtgcccccatgccttacctgataggcatccacttaagcttgatggagaaggtgcgtaacatggccttagacgacgttgtgattttgaatgtcgacactaatacccttgagaccccctttgacgacctccagagtctccctaatgacgtgatctccagcctcaagaaccggctgaagaaggtgtctaccactactggagatggagttgcccgcgcttttctgaaggctcaagcagcatttttcggatcgtatcgtaacgctctcaagatcgagcctgaagagccgatcacattttgtgaggaagcattcgtctctcactacagatctggtgcaatgaggcaatttctgcagaatgccactcagctgcagctcttcaaacagttcattgatggccgcctcgatctgctcaactcgggcgaggggtttagtgatgtgtttgaggaagaaatcaacatgggagagtatgccggctccgacaaattgtaccaccaatggctgagcactgtccggaaagggagcggtgccatcttgaataccgttaagacgaaagccaacccagccatgaagaccgtctacaaattcgccaaggaccacgctaagatggggataaaagaagtgaagaacagattgaagcagaaagacatagcggagaatggatgcgccccgaccccagaggagcagctgcccaagacagccccctccccgctggtcgaagctaaagacccaaagctgagggaagaccgcaggcccattaccgtacatttcggacaagtccgccctccacggccccacgttgtgaagagacccaaaagtaatattgcagtggagggacgtcgcacctccgtcccgtcaccagaacaaaataccattgcaacccctgcgaccctgcatatcctgcaaaagagcatcactcacttcgcagctaaatttcccaccagaggctggacctctagcagccactag

SEQ ID NO: 217013 - DNA, 1680 bp, Artificial Sequence
  derived and/or modified sequence
atgggaagccgcattaagcaaaatcctgagacaacttttgaggtttatgtcgaagtcgcatacccccgtaccggcggaacactatcagaccccgaggtccagcgccagtttccagaggattattctgatcaggaagtgctccagacgttgaccaaattttgttttcccttctatgtcgattcacttactgtcagtcaggtcggtcaaaactttaccttcgttctcacggacatcgacagcaagcagcgttttgggttctgtcgactatcatctggcgctaaaagctgcttttgtatattgtcctatttgccgtggttcgaggtattttacaaacttctgaacatcctggcagattacactaccaagaggcaagagaaccagtggaacgaactgctggagaccctccataaattacccatccctgatcccggagtgtccgtgcacttgtccgtccatagttactttaccgttcctgacactcgcgagcttccctcaattcccgagaatcgaaacctgaccgaatatttcgtagcggtagacgtcaacaatatgttacacctttatgctagtatgctgtacgaacgaagaatcctcatcatttgctcgaaactctcaactttgactgcctgcatccacggttcagcagcaatgttgtatcctatgtactggcagcacgtgtacattccggtgctaccaccacatctgctggattactgctgtgcgcctatgccgtacctgatcggcatccacttgagccttatggaaaaagtaagaaacatggcgctggatgacgttgttattctcaatgtcgatactaacacgctggaaacccctttcgatgatctgcagtccctgccgaacgacgttatatcatctttgaagaatcgactgaaaaaggttagtacaacaactggcgacggggtggcccgtgcatttttgaaggcacaggctgccttctttggcagctatcggaacgcactgaagattgagcctgaggagcctattactttttgtgaggaagcatttgtatcccactacaggagtggggcaatgagacaatttctgcagaacgccacacaactccaactcttcaagcagtttatcgatggacgcctggacctcctgaacagcggagagggctttagtgatgtgtttgaagaggagatcaacatgggggaatacgcgggttctgacaaactttaccatcagtggctctccaccgtgcgtaagggtagcggggctattcttaatacagtcaagactaaggctaatcccgcaatgaagactgtttataagtttgctaaagatcatgctaagatgggtatcaaggaagtcaagaacagactgaagcagaaggacatcgcagaaaatggctgtgcccctacgcccgaagagcagttgcccaagaccgcgccttccccccttgtcgaagcaaaagaccccaaactgcgagaggacagaagacctatcacagttcactttggccaagttcgccctccacgcccacatgtcgtgaagaggcctaaatcaaacatagctgtcgaaggaaggcggaccagcgtacccagcccagagcaaaacaccatcgcaacacccgctacacttcacatcctgcaaaaaagcataacgcacttcgccgctaaatttcctacaagaggatggactagcagttcccattag

SEQ ID NO: 217014 - DNA, 1680 bp, Artificial Sequence
  derived and/or modified sequence
atgggcagcagaatcaagcagaaccccgagaccaccttcgaggtgtacgtggaggtggcctaccccagaaccggcggcaccctgagcgaccccgaggtgcagagacagttccccgaggactacagcgaccaggaggtgctgcagaccctgaccaagttctgcttccccttctacgtggacagcctgaccgtgagccaggtgggccagaacttcaccttcgtgctgaccgacatcgacagcaagcagagattcggcttctgcagactgagcagcggcgccaagagctgcttctgcatcctgagctacctgccctggttcgaggtgttctacaagctgctgaacatcctggccgactacaccaccaagagacaggagaaccagtggaacgagctgctggagaccctgcacaagctgcccatccccgaccccggcgtgagcgtgcacctgagcgtgcacagctacttcaccgtgcccgacaccagagagctgcccagcatccccgagaacagaaacctgaccgagtacttcgtggccgtggacgtgaacaacatgctgcacctgtacgccagcatgctgtacgagagaagaatcctgatcatctgcagcaagctgagcaccctgaccgcctgcatccacggcagcgccgccatgctgtaccccatgtactggcagcacgtgtacatccccgtgctgcccccccacctgctggactactgctgcgcccccatgccctacctgatcggcatccacctgagcctgatggagaaggtgagaaacatggccctggacgacgtggtgatcctgaacgtggacaccaacaccctggagacccccttcgacgacctgcagagcctgcccaacgacgtgatcagcagcctgaagaacagactgaagaaggtgagcaccaccaccggcgacggcgtggccagagccttcctgaaggcccaggccgccttcttcggcagctacagaaacgccctgaagatcgagcccgaggagcccatcaccttctgcgaggaggccttcgtgagccactacagaagcggcgccatgagacagttcctgcagaacgccacccagctgcagctgttcaagcagttcatcgacggcagactggacctgctgaacagcggcgagggcttcagcgacgtgttcgaggaggagatcaacatgggcgagtacgccggcagcgacaagctgtaccaccagtggctgagcaccgtgagaaagggcagcggcgccatcctgaacaccgtgaagaccaaggccaaccccgccatgaagaccgtgtacaagttcgccaaggaccacgccaagatgggcatcaaggaggtgaagaacagactgaagcagaaggacatcgccgagaacggctgcgcccccacccccgaggagcagctgcccaagaccgcccccagccccctggtggaggccaaggaccccaagctgagagaggacagaagacccatcaccgtgcacttcggccaggtgagaccccccagaccccacgtggtgaagagacccaagagcaacatcgccgtggagggcagaagaaccagcgtgcccagccccgagcagaacaccatcgccacccccgccaccctgcacatcctgcagaagagcatcacccacttcgccgccaagttccccaccagaggctggaccagcagcagccactag

SEQ ID NO: 217015 - DNA, 3612 bp, Artificial Sequence
  derived and/or modified sequence
acgcgcgccggcgaccatggcgttcgccgggctggagcgagtacattaacccctggaggcggcggcggcggcgagggagcgagcctcgagcgggcgggccccagcctgagggaagggaggaaggggcggggagagcgccagagggaggccggtcggccgcgggcgggcgggcagcgcagcgccgagcggggcccgcgggcccatgaggaggcctggggaccatgggctccaggatcaagcagaatccagagaccacatttgaagtatatgttgaagtggcctatcccaggacaggtggcactctttcagatcctgaggtgcagaggcaattcccggaggactacagtgaccaggaagttctacagactttgaccaagttttgtttccccttctatgtggacagcctcacagttagccaagttggccagaacttcacattcgtgctcactgacattgacagcaaacagagattcgggttctgccgcttatcttcaggagcgaagagctgcttctgtatcttaagctatctcccctggttcgaggtattttataagctgcttaacatcctggcagattacacgacaaaaagacaggaaaatcagtggaatgagcttcttgaaactctgcacaaacttcccatccctgacccaggagtgtctgtccatctcagcgtgcattcttattttactgtgcctgataccagagaacttcccagcatacctgagaatagaaatctgacagaatattttgtggctgtggatgttaacaacatgttgcatctgtacgccagtatgctgtacgaacgccggatactcatcatttgcagcaaactcagcactctgactgcctgcatccacgggtctgcggcgatgctctaccccatgtactggcagcacgtgtacatccccgtgctgccgccgcatctgctggactactgctgtgctcccatgccctacctcataggaatccatttaagtttaatggagaaagtcagaaacatggccctggatgatgtcgtgatcctgaatgtggacaccaacaccctggaaacccccttcgatgacctccagagcctcccaaacgacgtgatctcttccctgaagaacaggctgaaaaaggtctccacaaccactggggatggtgtggccagagcgttcctcaaggcccaggctgctttcttcggtagctaccgaaacgctctgaaaatcgagccggaggagccgatcactttctgtgaggaagccttcgtgtcccactaccgctccggagccatgaggcagttcctgcagaacgccacacagctgcagctcttcaagcagtttattgatggtcgattagatcttctcaattccggcgaaggtttcagtgatgtttttgaagaggaaatcaacatgggcgagtacgctggcagtgacaaactgtaccatcagtggctctccactgtccggaaaggaagtggagcaattctgaatactgtaaagaccaaagcaaatccggccatgaagactgtctacaagttcgcaaaagatcatgcaaaaatgggaataaaagaggtgaaaaaccgcttgaagcaaaaggacattgccgagaatggctgcgcccccaccccagaagagcagctgccaaagactgcaccgtccccactggtggaggccaaggaccccaagctccgagaagaccggcggccaatcacagtccactttggacaggtgcgcccacctcgtccacatgttgttaagagaccaaagagcaacatcgcagtggaaggccggaggacgtctgtgccgagccctgagcaaaacaccattgcaacaccagctacactccacatcctacagaaaagcattacccattttgcggccaagttcccgacgagaggctggacctcttcatcacattgacttacgccgttgcttttccagactgggcagaggggctgacttcgcagtgtgtgccaaagagccggtgtctgataatcccattttcctgcttatcacctgaactgtgtcagtatcacttttagttttgttggttggttggtttgttgtttgtttaatatgccctgttttctacttctgttggaaaatatttggggttgaaataaaccagtgggagcatgggagccagtttggtggttggcaaactaccagtgatagaaaacaaatgacaggttttctgtgagcgtacgtcacagtggctcgggcccacaaggagacagaggggtacgtttcaggacatcattccaagggtttctgttcacgtttgtttaacgaggaaggggaagttgttctcccataataccagtggtatttctagtgcaacccgggtgtttttctacgcctcttcccatgctgcttccccacccccccactgtgctccgccccttccaaatgccatgtcacaacagcacttggatgtgtttttctcaactgtcatcagctccagctggcaggaccaacttcttgaaacacaggaagcatccagcggaaaatattttaataaaacagactcctcataaaatattgttcgggggagggggaagaaaccggctccaccaatctgtcggcattgtattgggagatgtgagaagccaggctggcagcaggggcccgatcctaatgggcctttgtcaggtggtggttccgtgttgggcacacggacttggtgcctggccctttaatctggcctgggttttcttgaatcacagatcttcatctccactgggaatatcaaagtgcttgggaaacttagaagactggggcagcagaaggggatgcaggatctttgaagtggagaggagagattcattcctcctgacttcttgccccaactctcacttccaattgcacattaaataatcccagcactttgggaggccaaggcgagcggatcacctgaggtcaggggttcgagaccagcctgggcaacatggcgaaaccccgtctctactaaaaatacaaaaattagccgagtgtggtggcgcacccctgtaattccagctactcgggaggctgaggcatgagaatcacttgaacccaggaggcggaggctgccgtgagctgagatcacaccaccacactccagcctgtgcaacagagtgagactctgtctcaaaaataaaataaccagctttgtggacagcaagatggggctgattaagagtaagactgtctcctggagtagctgagcatcctgggactcatcagggcccagaaacactagccagccactctctggccagtccacccctgaagttcatttcttccttcccagctgatgtccatccctccatcattccatctgtccattcgtgcattcattcattcagcaagtatctttgaaaacctactaggcgcaagcacggacgatttttttaaaggaggccttaaaagggagtccccatgctgactcttggttgacttgcattttcccaaaatgaaattttcctgtgtcaaattttctttctgaatcaatgataggtttcctagtcccttaaaactggccgttggcaattggaagaagacttttttgaagatttgtgggggaaacattccctttacttttcaggtaacattacttggttaatattcagttactaaatctcttcaagaa

SEQ ID NO: 217016 - protein, 736 aa, Artificial Sequence
  derived and/or modified sequence
MEIGTEISRKIRSAIKGKLQELGAYVDEELPDYIMVMVANKKSQDQMTEDLSLFLGNNTIRFTVWLHGVLDKLRSVTTEPSSLKSSDTNIFDSNVPSNKSNFSRGDERRHEAAVPPLAIPSARPEKRDSRVSTSSQESKTTNVRQTYDDGAATRLMSTVKPLREPAPSEDVIDIKPEPDDLIDEDLNFVQENPLSQKKPTVTLTYGSSRPSIEIYRPPASRNADSGVHLNRLQFQQQQNSIHAAKQLDMQSSWVYETGRLCEPEVLNSLEETYSPFFRNNSEKMSMEDENFRKRKLPVVSSVVKVKKFNHDGEEEEEDDDYGSRTGSISSSVSVPAKPERRPSLPPSKQANKNLILKAISEAQESVTKTTNYSTVPQKQTLPVAPRTRTSQEELLAEVVQGQSRTPRISPPIKEEETKGDSVEKNQGTQQRQLLSRLQIDPVMAETLQMSQDYYDMESMVHADTRSFILKKPKLSEEVVVAPNQESGMKTADSLRVLSGHLMQTRDLVQPDKPASPKFIVTLDGVPSPPGYMSDQEEDMCFEGMKPVNQTAASNKGLRGLLHPQQLHLLSRQLEDPNGSFSNAEMSELSVAQKPEKLLERCKYWPACKNGDECAYHHPISPCKAFPNCKFAEKCLFVHPNCKYDAKCTKPDCPFTHVSRRIPVLSPKPAVAPPAPPSSSQLCRYFPACKKMECPFYHPKHCRFNTQCTRPDCTFYHPTINVPPRHALKWIRPQTSE

SEQ ID NO: 217017 - DNA, 2211 bp, Artificial Sequence
  derived and/or modified sequence
atggagatcggcaccgagatcagcagaaagatcagaagcgccatcaagggcaagctgcaggagctgggcgcctacgtggacgaggagctgcccgactacatcatggtgatggtggccaacaagaagagccaggaccagatgaccgaggacctgagcctgttcctgggcaacaacaccatcagattcaccgtgtggctgcacggcgtgctggacaagctgagaagcgtgaccaccgagcccagcagcctgaagagcagcgacaccaacatcttcgacagcaacgtgcccagcaacaagagcaacttcagcagaggcgacgagagaagacacgaggccgccgtgccccccctggccatccccagcgccagacccgagaagagagacagcagagtgagcaccagcagccaggagagcaagaccaccaacgtgagacagacctacgacgacggcgccgccaccagactgatgagcaccgtgaagcccctgagagagcccgcccccagcgaggacgtgatcgacatcaagcccgagcccgacgacctgatcgacgaggacctgaacttcgtgcaggagaaccccctgagccagaagaagcccaccgtgaccctgacctacggcagcagcagacccagcatcgagatctacagaccccccgccagcagaaacgccgacagcggcgtgcacctgaacagactgcagttccagcagcagcagaacagcatccacgccgccaagcagctggacatgcagagcagctgggtgtacgagaccggcagactgtgcgagcccgaggtgctgaacagcctggaggagacctacagccccttcttcagaaacaacagcgagaagatgagcatggaggacgagaacttcagaaagagaaagctgcccgtggtgagcagcgtggtgaaggtgaagaagttcaaccacgacggcgaggaggaggaggaggacgacgactacggcagcagaaccggcagcatcagcagcagcgtgagcgtgcccgccaagcccgagagaagacccagcctgccccccagcaagcaggccaacaagaacctgatcctgaaggccatcagcgaggcccaggagagcgtgaccaagaccaccaactacagcaccgtgccccagaagcagaccctgcccgtggcccccagaaccagaaccagccaggaggagctgctggccgaggtggtgcagggccagagcagaacccccagaatcagcccccccatcaaggaggaggagaccaagggcgacagcgtggagaagaaccagggcacccagcagagacagctgctgagcagactgcagatcgaccccgtgatggccgagaccctgcagatgagccaggactactacgacatggagagcatggtgcacgccgacaccagaagcttcatcctgaagaagcccaagctgagcgaggaggtggtggtggcccccaaccaggagagcggcatgaagaccgccgacagcctgagagtgctgagcggccacctgatgcagaccagagacctggtgcagcccgacaagcccgccagccccaagttcatcgtgaccctggacggcgtgcccagcccccccggctacatgagcgaccaggaggaggacatgtgcttcgagggcatgaagcccgtgaaccagaccgccgccagcaacaagggcctgagaggcctgctgcacccccagcagctgcacctgctgagcagacagctggaggaccccaacggcagcttcagcaacgccgagatgagcgagctgagcgtggcccagaagcccgagaagctgctggagagatgcaagtactggcccgcctgcaagaacggcgacgagtgcgcctaccaccaccccatcagcccctgcaaggccttccccaactgcaagttcgccgagaagtgcctgttcgtgcaccccaactgcaagtacgacgccaagtgcaccaagcccgactgccccttcacccacgtgagcagaagaatccccgtgctgagccccaagcccgccgtggccccccccgccccccccagcagcagccagctgtgcagatacttccccgcctgcaagaagatggagtgccccttctaccaccccaagcactgcagattcaacacccagtgcaccagacccgactgcaccttctaccaccccaccatcaacgtgccccccagacacgccctgaagtggatcagaccccagaccagcgagtag

SEQ ID NO: 217018 - DNA, 2211 bp, Artificial Sequence
  derived and/or modified sequence
atggaaataggcacagagatctcacggaagattaggagtgcaattaaaggtaagctgcaggagctgggagcatacgttgatgaggagctgcctgattacatcatggttatggtggccaacaagaagtctcaggaccagatgaccgaggaccttagtctgttccttggaaataataccattaggttcactgtatggctgcacggggtgctcgacaagctgaggtctgtgactacagaaccgagcagtctgaagagcagcgacactaacatctttgattccaacgttccgtccaacaaatcaaatttctctcgaggcgatgagcgaagacacgaggctgctgttcctcccctggccatcccttctgcgaggcctgagaagagggactctagggtttccaccagctcacaggaaagcaagacaaccaatgttagacagacctacgacgatggagccgcgacccgtctgatgtcaactgtcaagccgcttcgcgaaccagctcccagtgaggacgttatcgatataaagcctgagccagatgacctgattgacgaggacctaaacttcgtacaggagaaccccttgtcacaaaaaaaacctacggtgaccctcacatatggatcttcccggcctagcatcgaaatatacaggcctcccgcttcgcggaatgctgacagtggcgtgcacctgaatcggctacaatttcagcaacagcagaacagcatacacgcagccaaacagttggacatgcaatcatcttgggtctatgagacggggcgcttatgcgaacctgaagtactgaacagcctagaggagacatactctccattctttcggaataactcagaaaagatgagtatggaggatgaaaacttcaggaaacgcaaattaccagtggtgtcctccgtagtgaaggtcaagaaatttaatcatgacggcgaagaggaggaagaggatgatgattatggctcacgaaccgggtcaatctcgtccagcgtaagtgtgcccgcgaaacccgagcgccgtccatccctgcccccatctaagcaggccaataagaatctaattcttaaggctatctccgaggcccaggaaagcgttaccaaaacaacaaattatagtacagtgccacaaaagcagacattgccagtggccccacgaactaggacaagccaagaggaactcctcgctgaagtggtgcaggggcaatccagaacgcccaggattagccctcctatcaaggaagaagagactaagggggactcggtggaaaagaatcagggaacacagcagcgacaactgctcagtaggctccagatagacccagtgatggctgagacactccagatgtcacaggactattacgatatggaatcaatggtccacgccgataccagatctttcattctaaaaaagccgaagctgtccgaggaagtggttgtcgcacctaaccaggaatcaggtatgaagacggccgatagcttaagggtgctcagcggacacctaatgcagacaagggatttagtgcagccagacaagcctgcatctcccaaatttattgtcaccctcgatggggtcccatcgcccccggggtacatgagcgaccaggaggaggacatgtgtttcgaaggaatgaaaccagttaatcaaacagccgcctccaataagggacttcgcgggctcttgcaccctcagcagctgcatctattgtctcggcagttggaggacccaaacggtagcttcagcaatgccgaaatgtcagagctgtctgttgcccagaagccagagaagctgcttgagagatgtaagtattggcccgcctgtaaaaacggtgacgaatgcgcctaccaccatcctatctccccctgtaaagcattccctaactgcaagtttgctgagaagtgtctgttcgtacatccaaattgtaagtacgatgccaaatgcaccaagcctgactgtccattcacgcacgtgtcacggcgcataccagtactttcaccaaaacccgcagtggctccccccgccccaccatcctcttcacagctgtgtcggtacttccccgcctgtaaaaaaatggagtgtccattttatcatcctaaacattgccgcttcaatactcagtgcacaagaccggattgcacgttttatcatcccactattaacgttcctccccggcacgccctgaagtggattcgccctcagacctctgagtag

SEQ ID NO: 217019 - DNA, 2211 bp, Artificial Sequence
  derived and/or modified sequence
atggagattggaacagagatcagcaggaagatccgcagcgccatcaagggcaagctgcaggagctgggcgcctacgtggatgaggagctgcctgactacatcatggtgatggtggccaacaagaagagccaggaccagatgacagaggacctgagcctcttcctgggcaacaacaccatccgcttcaccgtgtggctgcatggagtgctggacaagctgcggtctgtgaccacagagcccagcagcctgaagagcagtgacaccaacatctttgacagcaatgtgcccagcaacaagagcaacttcagcagaggagatgagaggagacatgaggccgctgtgccccccctggccatccccagcgcccggcctgagaagagggacagccgggtgtccaccagcagccaggagagcaagaccaccaacgtgcggcagacctatgatgatggagctgccacccggctgatgagcacagtgaagcccctgcgggagcccgcccccagtgaagatgtgattgacatcaagccagagccagatgacctgattgatgaggacctgaactttgtgcaggagaaccccctgagccagaagaagcccaccgtgaccctgacctacggcagcagccggcccagcattgagatctacagacctccagccagcagaaatgctgacagcggcgtgcacctgaaccggctgcagttccagcagcagcagaacagcatccatgctgccaagcagctggacatgcagagctcctgggtgtatgaaacaggccgcctgtgtgagcctgaggtgctgaacagcctggaggagacctacagccccttcttcaggaacaacagcgagaagatgtccatggaggatgagaacttcaggaagaggaagctgcctgtggtgtcctctgtggtgaaggtgaagaagttcaaccatgatggagaggaggaggaggaggatgatgattatggcagcaggacaggcagcatcagcagctctgtgtctgtgcctgccaagccagagcggcggcccagcctgccccccagcaagcaggccaacaagaacctgatcctgaaggccatcagcgaggcccaggagagcgtgaccaagaccaccaactacagcacagtgccccagaagcagaccctgcctgtggcccccaggaccaggaccagccaggaggagctgctggccgaggtggtgcagggccagagcaggaccccccgcatcagcccccccatcaaggaggaggagaccaagggggacagcgtggagaagaaccagggcacccagcagaggcagctgctgagccggctgcagattgatcctgtgatggccgagaccctgcagatgagccaggactactatgacatggagagcatggtgcacgccgacaccaggagcttcatcctgaagaagcccaagctgtctgaggaggtggtggtggcccccaaccaggagagcggcatgaagacagctgacagcctgcgggtgctgagcggccacctgatgcagacccgggacctggtgcagcctgacaagccagccagccccaagttcatcgtgaccctggatggagtgcccagccccccaggctacatgtctgaccaggaggaggacatgtgctttgagggcatgaagcctgtgaaccagacagctgccagcaacaagggcctgcggggcctgctgcacccccagcagctgcacctgctgagccggcagctggaggaccccaacggcagcttcagcaatgctgagatgtctgagctgtctgtggcccagaagccagagaagctgctggagcgctgcaagtactggccagcctgcaagaatggagatgaatgtgcctaccaccaccccatcagcccctgcaaggccttccccaactgcaagtttgctgagaagtgcctgtttgtgcaccccaactgcaagtatgatgccaagtgcaccaagccagactgccccttcacccacgtgtcccggcgcatccctgtgctgagccccaagccagctgtggcccccccagccccacccagcagcagccagctgtgccgctacttccctgcctgcaagaagatggagtgccccttctaccaccccaagcactgccgcttcaacacccagtgcaccaggccagactgcaccttctaccaccccaccatcaacgtgccccccaggcatgccctgaagtggatccggccccagaccagcgagtag

SEQ ID NO: 217020 - DNA, 2211 bp, Artificial Sequence
  derived and/or modified sequence
atggagatcggcaccgagatcagccggaagatccggagcgccatcaaggggaaactccaggaactgggggcctacgtggacgaggagctgcctgactacatcatggttatggttgcgaataagaaatcccaggaccagatgaccgaggatttgtctctgttcctcggcaataatactatccgttttacagtttggttgcatggcgtgctggataaactgcggagcgtgaccactgaacctagtagcctgaaatcgtcggatacaaatatcttcgatagcaacgtgcctagcaataagtcaaatttctcccgcggtgatgagaggagacatgaagcagccgtcccccctcttgctatacccagtgccagacctgagaagagggattctcgcgtgtcaaccagctctcaggaatctaaaacgactaacgtgcgtcagacatacgacgatggggctgcaacgcggcttatgtcaactgtgaaaccactgcgggagccagcgccctctgaggacgtcatcgacatcaagcctgagcctgacgacttgattgacgaggacttgaatttcgttcaggagaatcctctctcgcagaagaagccaacagtgacactgacctacgggtcatctcggccatcaatagagatctaccgcccaccagctagtcgaaacgccgattccggagtgcaccttaatcggctgcagtttcagcagcaacaaaactctatccacgccgccaagcagcttgacatgcagtcaagctgggtgtatgaaaccgggagactctgcgaaccggaagtgttgaactcccttgaagagacttacagccccttcttccgtaataactctgagaaaatgtccatggaagatgagaattttaggaaaagaaaactgcccgttgtgtccagcgtggtgaaagtgaagaaattcaaccacgatggtgaggaggaagaagaagatgatgactatggctcacgcacaggctccattagttcctcagtgtccgtaccggcaaagcccgagaggagaccgtctctgcctccctccaaacaggccaacaaaaacctgatcctcaaagcaattagtgaggcacaggagagcgtcacaaaaacgaccaactactccaccgtccctcagaagcagactctgcctgtagctccccggacacgaacctcccaggaggaattactggccgaggtggttcaggggcaatcaaggacaccgcggatttctccacctataaaggaggaggagactaagggagatagtgtcgaaaagaaccagggaacgcagcagcgccagctcctctcgcggctgcagatagaccccgttatggccgaaacactgcagatgtcccaggattattacgacatggagtctatggtgcacgccgatacaaggtcgttcattctcaagaaacctaagctatccgaggaagtagtcgtcgctcccaaccaggaaagcggtatgaagactgctgatagcctcagggtcctgtccgggcacttgatgcagactcgcgacctggtccaacccgacaagccagcttcacccaagtttatcgtaactctggatggcgtaccatcaccccccggctatatgtccgaccaggaagaggacatgtgtttcgaaggaatgaaacctgtgaatcagacagctgctagcaacaaggggttgagaggtttgctacatccgcagcaactccatttattatccagacagcttgaggatcctaacggatctttctccaatgctgagatgtccgaacttagcgtggcacaaaaaccagagaaactgctggaaaggtgtaaatactggccagcttgtaaaaatggggacgagtgcgcttatcatcaccctataagcccttgtaaagcctttcctaattgtaagttcgcggaaaaatgcttatttgtacatcccaactgcaagtacgatgcgaagtgtacaaagcctgattgtccgtttacacacgtgtctcggcggatacccgtgctgagtcccaagcctgccgtggcacctccagcccccccttcctccagtcagctgtgccggtacttccctgcctgtaaaaagatggagtgtccgttctaccatcccaagcattgtaggttcaacacccagtgtacccgccctgactgcacgttttaccacccgactattaacgtaccgccacgacatgccctgaagtggatacgtccacaaacctcggagtag

SEQ ID NO: 217021 - DNA, 2211 bp, Artificial Sequence
  derived and/or modified sequence
atggagattgggaccgaaatttccaggaaaattagaagtgccattaaagggaagcttcaggagctgggcgcatatgttgacgaggagctgccagactatataatggtgatggtcgcaaataagaagagccaagatcagatgactgaggacctgtccttatttcttgggaataataccatcaggttcactgtatggctgcacggggtccttgataagctgagatctgtgaccacagagccatcgagcctcaaatcaagtgacaccaatatttttgatagcaatgtaccctccaacaaatcaaatttttccagaggagatgaaagacggcatgaggcagctgtacctcctctggctatcccttccgcgagaccagaaaaacgggattcccgggtgagcactagctcacaggaatcgaagacaactaatgtgcggcagacctacgacgacggcgctgcaaccaggcttatgtccaccgtcaaacccctgcgagagcccgctcctagcgaggatgtcattgacatcaagcctgagccggacgacttaattgatgaagatttgaacttcgtgcaggaaaatccactctcgcagaaaaagcccacagttaccttgacatacggaagctctagaccttccatcgagatctatcgtccgccagccagccggaacgccgattccggggtgcacctaaatcgcctgcagttccagcagcagcaaaattcgattcacgcagctaagcaactggatatgcagagtagctgggtctacgagaccggtaggctatgcgaacccgaagtgctgaacagcctggaggagacatattcgcctttttttagaaataattctgaaaagatgtcaatggaggacgagaacttcagaaagcgaaagctgccagtggtcagttccgtggttaaggttaagaaatttaaccatgatggtgaggaggaagaagaagacgatgactacggttcccgcaccggcagcatttcttcttccgtttccgttcctgcaaagcccgaacggagaccctctcttcctccgagcaagcaggccaataagaacctaatacttaaggcaatttctgaggctcaggaaagcgtgactaaaacaactaattacagtacggttccacagaaacagaccttgccggtggcccctagaactagaacctcacaggaggagctgctcgctgaggttgtccaggggcagtcaagaactccgaggatctctccacccatcaaggaagaagagactaagggcgacagcgtagagaagaatcagggcactcagcagagacagctgctctcccgcctgcagatcgatcctgtcatggccgagacactgcagatgtcacaggattattatgatatggagagtatggtccacgcagatacacgctcttttattcttaagaaaccaaagctcagcgaggaggtggtagtggccccaaatcaggaaagtgggatgaaaaccgctgactccctccgggtgttgagtggccacctgatgcagacaagggatctggttcagcctgacaaaccagcctcacctaaatttattgtaacactcgacggcgttccttcaccccctggatatatgtccgatcaggaggaggacatgtgtttcgagggcatgaagcctgtgaatcaaaccgctgcctcgaataaaggactgagagggctgctgcatccccagcaactgcacttgctatcccgccagcttgaagatcctaatgggagtttttctaacgcagagatgagcgagctgagtgtagcccagaaaccagagaaactgctggagcgctgcaagtattggcctgcttgtaagaatggtgatgaatgcgcctaccatcatcctatttcaccttgtaaagcttttcccaattgcaagtttgccgagaagtgcctcttcgtccatcctaactgcaagtacgacgcgaaatgtacaaaacctgactgtcctttcacccatgtcagtagaagaatacctgttctctccccaaaacccgctgtagctcctccagccccaccctccagcagtcagttgtgccgatatttccccgcttgtaaaaagatggagtgcccattttatcatcccaagcattgccggttcaatacccagtgtaccaggccagactgcactttttaccatcctaccatcaatgtgcctccgaggcatgctctgaaatggatccggcctcaaacgtccgagtag

SEQ ID NO: 217022 - DNA, 4194 bp, Artificial Sequence
  derived and/or modified sequence
tgagcacaggtttcgcgggtagaaggcgtgcgcaggcgcggacacgggcgcatgcgcgttcactccggcgcgcagtgccggccggggcggggatacgccgtgtgcgcggccgggggcggaacggaggaggaggcggtggtgtcccggctgcggggtaggagtccgcggcagcctccgggtaagccaagcgccgcgcagtgctgagttcccgcacgccgcagagccatggagatcggcaccgagatcagccgcaagatccggagtgccattaaggggaaattacaagaattaggagcttatgttgatgaagaacttcctgattacattatggtgatggtggccaacaagaaaagtcaggaccaaatgacagaggatctgtccctgtttctagggaacaacacaattcgattcaccgtatggcttcatggtgtattagataaacttcgctctgttacaactgaaccctctagtctgaagtcttctgataccaacatctttgatagtaacgtgccttcaaacaagagcaatttcagtcggggagatgagaggaggcatgaagctgcagtgccaccacttgccattcctagcgcgagacctgaaaaaagagattccagagtttctacaagttcgcaggagtcaaaaaccacaaatgtcagacagacttacgatgatggagctgcaacccgactaatgtcaacagtgaaacctttgagggagccagcaccctctgaagatgtgattgatattaagccagaaccagatgatctcattgacgaagacctcaactttgtgcaggagaatcccttatctcagaaaaaacctacagtgacacttacatatggttcttctcgcccttctattgaaatttatcgaccacctgcaagtagaaatgcagatagtggtgttcatttaaacaggttgcaatttcaacagcagcagaatagtattcatgctgccaagcagcttgatatgcagagtagttgggtatatgaaacaggacgtttgtgtgaaccagaggtgcttaacagcttagaagaaacgtatagtccgttctttagaaacaactcggagaaaatgagtatggaggatgaaaactttcggaagagaaagttgcctgtggtaagttcagttgttaaagtaaaaaaattcaatcatgatggagaagaggaggaagaagatgatgattacgggtctcgaacaggaagcatctccagcagtgtgtctgtgcctgcaaagcctgaaaggagaccttctcttccaccttctaaacaagctaacaagaatctgattttgaaggctatatctgaagctcaagaatccgtaacaaaaacaactaactactctacagttccacagaaacagacacttccagttgctcccagaactcgaacttctcaagaagaattgctagcagaagtggtccagggacaaagtaggacccccagaataagtccccccattaaagaagaggaaacaaaaggagattctgtagaaaaaaatcaaggaactcaacagaggcaattattatcccgactgcaaatcgacccagtaatggcagaaactctgcagatgagtcaagattactatgacatggaatccatggtccatgcagacacaagatcatttattctgaagaagccaaagctgtctgaggaagtagtagtggcaccaaaccaagagtcggggatgaagactgcagattcccttcgggtactttcaggacaccttatgcagacacgagatcttgtacaaccagataaacctgcaagtcccaagtttatagtgacgctggatggtgtccccagccccccaggatacatgtcagatcaagaggaggacatgtgctttgaaggaatgaaacccgtaaaccaaactgcagcctcaaacaagggactcagaggtctcctccacccacagcagttgcacttgctgagcaggcagcttgaggacccaaatggtagcttttctaacgctgagatgagtgaactgagtgtggcacagaaaccagaaaaacttttggagcgctgcaagtactggcctgcttgtaaaaatggggatgagtgtgcctaccatcaccccatctcaccctgcaaagccttccccaattgtaaatttgctgaaaaatgtttgtttgttcacccaaattgtaaatatgatgcaaagtgtactaaaccagattgtcccttcactcatgtgagtagaagaattccagtactgtctccaaaaccagcagttgcaccaccagcaccaccttccagtagtcagctctgccgttacttccctgcttgtaagaagatggaatgtcccttctatcatccaaaacattgtaggtttaacactcaatgtacaagaccggactgcacattctaccatcccaccattaatgtcccaccacgacatgccttgaaatggattcgacctcaaaccagcgaatagcacccagtcctgcctggcagaagatcatgcagtttggaagttttcatgtactgatgaaagatactctacagaacttgtcaaatctttgaaacttggaatatattgctttcataatatgaagttttattgcctatctatctgaagtgtctaatttttcaagtttgtaagtttattatgtggttttaacattgggtgtttttgttttgtttttactatgaaaagacagcttaaggaagagctaaattctgttaaaatatttggggcatgtttgtgcactgctgttgtgaggatcagcatatgaaattgacatcatggttagtcatggtactgcagcttagggggctacacggttgctgtgtgagtggagagatgcagtgaggcagttgtcattattctaaaaattgtactactttcacttttcccaaagattatataatgttcataatccaccatgaaaacagcattggccaaaggtactgaggctgcttaaaatattcaattctgctttttaatttttaagtgaatttagtttgaaaagcatgattatacaggcctctcaggctgagtgctactttggtaaagttcccagttttcctgccttctgtgacaggatgaatgaggtgggtatggacagtggaggcagctggaatggcaagtgcagaaaataggaacagttctatacagtgctctcatttactaataacataatgccttctaaataatttttttgggaaactacattatcacaaaattatacaaatttttttacaagtatttacatactgtatctgaaaacagactttaaagtcacaagattataaatgtacatatatattctcacattctgaaaaataacattctcagaatccacagaaaatatacttagttactactgaagataatttttgaaatgtaaaaattagatttaaatagtatattttaaatgacagaactataattacagagatcagatcagataggtaaactgcaagatagataggatgaaacttttggcctactgtattacttacagagtttttttgtgtgtggtttttaaaactgttaaggcaagaagtgtcaaatgctttagagttaaataacagatcactgatttcaaagacttggtgtatagtgttaaaaattaaagcttaaaaggtggttagaaaagtggattaatgcaaaaggggtaataaagactgcaacattctcaggaccaaattaaactgctaaaaaaaaaaaaaaagttcattgacttgcttagtcgtatactcaaatgatgataaacctacatgtgcaaaggctcacgtttaagattgtcaagccagcagtctactgttgtgttgccattgcttttccattgggagaagaaagaattaaccagtcattaaaccatttggtaagttgcactttgctgtgctgatcccacaggaaaggcttgaaacacgagaagcagcaaagacagagcacacaagtgcataaggctgttgtcttcggcttgggtgaaatgacagttcctcttcattctaaaggtttactccattgaatttaaggcatttgttcattccagtgttgagatgctttgcatctctgcagaagaaatttattttaaattgtttaaatatctggaaatacttttagctatcatttataaagatagttttgttctcagtttcactataaattatagaacaaatgggaaacaagggtttaatttagttcagccattttacaaggaaataataaaatactaaaatctga

SEQ ID NO: 217023 - protein, 347 aa, Artificial Sequence
  derived and/or modified sequence
MLHTTQLYQHVPETRWPIVYSPRYNITFMGLEKLHPFDAGKWGKVINFLKEEKLLSDSMLVEAREASEEDLLVVHTRRYLNELKWSFAVATITEIPPVIFLPNFLVQRKVLRPLRTQTGGTIMAGKLAVERGWAINVGGGFHHCSSDRGGGFCAYADITLAIKFLFERVEGISRATIIDLDAHQGNGHERDFMDDKRVYIMDVYNRHIYPGDRFAKQAIRRKVELEWGTEDDEYLDKVERNIKKSLQEHLPDVVVYNAGTDILEGDRLGGLSISPAGIVKRDELVFRMVRGRRVPILMVTSGGYQKRTARIIADSILNLFGLGLIGPESPSVSAQNSDTPLLPPAVP

SEQ ID NO: 217024 - DNA, 1044 bp, Artificial Sequence
  derived and/or modified sequence
atgctgcacaccacccagctgtaccagcacgtgcccgagaccagatggcccatcgtgtacagccccagatacaacatcaccttcatgggcctggagaagctgcaccccttcgacgccggcaagtggggcaaggtgatcaacttcctgaaggaggagaagctgctgagcgacagcatgctggtggaggccagagaggccagcgaggaggacctgctggtggtgcacaccagaagatacctgaacgagctgaagtggagcttcgccgtggccaccatcaccgagatcccccccgtgatcttcctgcccaacttcctggtgcagagaaaggtgctgagacccctgagaacccagaccggcggcaccatcatggccggcaagctggccgtggagagaggctgggccatcaacgtgggcggcggcttccaccactgcagcagcgacagaggcggcggcttctgcgcctacgccgacatcaccctggccatcaagttcctgttcgagagagtggagggcatcagcagagccaccatcatcgacctggacgcccaccagggcaacggccacgagagagacttcatggacgacaagagagtgtacatcatggacgtgtacaacagacacatctaccccggcgacagattcgccaagcaggccatcagaagaaaggtggagctggagtggggcaccgaggacgacgagtacctggacaaggtggagagaaacatcaagaagagcctgcaggagcacctgcccgacgtggtggtgtacaacgccggcaccgacatcctggagggcgacagactgggcggcctgagcatcagccccgccggcatcgtgaagagagacgagctggtgttcagaatggtgagaggcagaagagtgcccatcctgatggtgaccagcggcggctaccagaagagaaccgccagaatcatcgccgacagcatcctgaacctgttcggcctgggcctgatcggccccgagagccccagcgtgagcgcccagaacagcgacacccccctgctgccccccgccgtgccctag

SEQ ID NO: 217025 - DNA, 1044 bp, Artificial Sequence
  derived and/or modified sequence
atgcttcatactacccagctttatcagcacgtgcccgagacaagatggccgattgtttactccccccgctataatattacttttatgggactcgagaaattacacccatttgacgcaggtaagtgggggaaggtaatcaacttcttaaaggaagagaagctgctgagcgacagtatgttggtggaggctcgcgaggctagcgaggaggacctgctggttgttcacacccgcaggtatcttaacgagttgaaatggtcgttcgcagtagctactatcacagagattccgccggtcatattcctgcccaattttttggtccagcgcaaagtgctccgccccctgaggacgcagactgggggaacaattatggccgggaagctggccgtggaaaggggttgggcaatcaatgtgggcggcgggttccaccattgttcttcagaccgcggcggaggtttctgcgcttatgcagacataactcttgccatcaaattcttgttcgaacgagtggaaggaatttctcgggcaacgataatcgacctggacgctcatcaagggaacggacacgagagggatttcatggacgacaaacgagtgtacattatggatgtgtacaatcgccacatctacccgggcgatcgctttgctaaacaggctattcggagaaaagtggagctcgagtggggcaccgaggatgacgagtacctggataaggtcgaaaggaacattaagaagtctttacaagagcacctacccgacgttgtcgtctataacgcagggactgacattctcgaaggagatagactggggggtttgtctatttcccctgctggcatagtcaagagagatgagctggtgtttaggatggttcggggaaggcgtgtgcctatactgatggtgacatctgggggatatcagaaacgcacagctagaatcatcgctgactccattctcaacctcttcggattaggcctgattggccctgaatctccatccgtctccgcacagaatagcgataccccgctgctgcccccggccgtgccgtag

SEQ ID NO: 217026 - DNA, 2960 bp, Artificial Sequence
  derived and/or modified sequence
ggccttcctgcgggcaggctctctgtgtcgcaacactggcggggcgggccaaatcggccagagctctgcccccagaggacgcggctaagcccgggggcgtgtcctgggctggccccacccgcgccccgccccgccccgcccggtcgcggagctgcggccagctttgggagggccggccccgggatgctacacacaacccagctgtaccagcatgtgccagagacacgctggccaatcgtgtactcgccgcgctacaacatcaccttcatgggcctggagaagctgcatccctttgatgccggaaaatggggcaaagtgatcaatttcctaaaagaagagaagcttctgtctgacagcatgctggtggaggcgcgggaggcctcggaggaggacctgctggtggtgcacacgaggcgctatcttaatgagctcaagtggtcctttgctgttgctaccatcacagaaatcccccccgttatcttcctccccaacttccttgtgcagaggaaggtgctgaggccccttcggacccagacaggaggaaccataatggcggggaagctggctgtggagcgaggctgggccatcaacgtggggggtggcttccaccactgctccagcgaccgtggcgggggcttctgtgcctatgcggacatcacgctcgccatcaagtttctgtttgagcgtgtggagggcatctccagggctaccatcattgatcttgatgcccatcagggcaatgggcatgagcgagacttcatggacgacaagcgtgtgtacatcatggatgtctacaaccgccacatctacccaggggaccgctttgccaagcaggccatcaggcggaaggtggagctggagtggggcacagaggatgatgagtacctggataaggtggagaggaacatcaagaaatccctccaggagcacctgcccgacgtggtggtatacaatgcaggcaccgacatcctcgagggggaccgccttggggggctgtccatcagcccagcgggcatcgtgaagcgggatgagctggtgttccggatggtccgtggccgccgggtgcccatccttatggtgacctcaggcgggtaccagaagcgcacagcccgcatcattgctgactccatacttaatctgtttggcctggggctcattgggcctgagtcacccagcgtctccgcacagaactcagacacaccgctgcttccccctgcagtgccctgacccttgctgccctgcctgtcacgtggccctgcctatccgccccttagtgctttttgttttctaacctcatggggtggtggaggcagccttcagtgagcatggaggggcagggccatccctggctggggcctggagctggcccttcctctacttttccctgctggaagccagaagggcttgaggcctctatgggtgggggcagaaggcagagcctgtgtcccagggggacccacacgaagtcaccagcccataggtccagggaggcaggcagttaactgagaattggagaggacaggctaggtcccaggcacagcgagggccctgggcttggggtgttctggttttgagaacggcagacccaggtcggagtgaggaagcttccacctccatcctgactaggcctgcatcctaactgggcctccctccctccccttggtcatgggatttgctgccctctttgccccagagctgaagagctataggcactggtgtggatggcccaggaggtgctggagctaggtctccaggtgggcctggttcccaggcagcaggtgggaaccctgggcctggatgtgaggggcggtcaggaaggggtacaggtgggttccctcatctggagttccccctcaataaagcaaggtctggacctgccttcccaggcccttctgtgggggtgaaggtggggaaggcctgcggcgcccagatcactgccttagcagtagtcttgcctgttcagtgcaaggggcaggttttggggggaggaattcttagcgcaaggacgggcctcagccctgtcgcctccagggggccgctgacccaggtggggagagggcagaagaagggtgggggacgtgggcaggccaggctcacaggtggaaatcagggatgcagggtggtgcccaagccaggtcctgcaggaacccaggcccagggagggacccagacactggtgaggcggggcaggggttcctggagagagggcagcgaggatctctatcctggcctggggattatgaacataggtagccggggcagggccctgggtgggactgtggcctccactggcctcaccaaagtgcctgggccccaatccttctccatgcccaggggccccaggtgggccagacctctggcctgttcctcagccctactcatggggacattcagggacctccaggaagtgggcgggggagcatccacccctgctagccggcagctgtggccctgatcaaatcaggggctggggagggaaagtgggtccattgaggtggccctgctccatcagccccctacgggacttgtgttcattacagtgagggggtgctcccactgtctcccggcctccctaatgctccctctgctgcagggagaagggttccaagatcacaaaatgtcaacaatgctggcctcctggaccagaccccgaggctctaacaatgcactctgagatccctacccttgccgttggtctctgtcgctgactcgaggcacctaacatccattcacacccaacacaggccagcgacttctggggctcagccacagacatggtttgtcactgttgagcttctgttcctagagaatcctagaggcttgattggcccaggctgctgtgtgtgctggaggcaaagaatccctacctcctaggggtgaaaggaaatgaaaatggaaagttcttgtagcgcaaggcctgacatgggtagctgctcaataaatgctagtgtgttatttca

SEQ ID NO: 217027 - DNA, 2766 bp, Artificial Sequence
  derived and/or modified sequence
gctacacacaacccagctgtaccagcatgtgccagagacacgctggccaatcgtgtactcgccgcgctacaacatcaccttcatgggcctggagaagctgcatccctttgatgccggaaaatggggcaaagtgatcaatttcctaaaagaagagaagcttctgtctgacagcatgctggtggaggcgcgggaggcctcggaggaggacctgctggtggtgcacacgaggcgctatcttaatgagctcaagtggtcctttgctgttgctaccatcacagaaatcccccccgttatcttcctccccaacttccttgtgcagaggaaggtgctgaggccccttcggacccagacaggaggaaccataatggcggggaagctggctgtggagcgaggctgggccatcaacgtggggggtggcttccaccactgctccagcgaccgtggcgggggcttctgtgcctatgcggacatcacgctcgccatcaagtttctgtttgagcgtgtggagggcatctccagggctaccatcattgatcttgatgcccatcagggcaatgggcatgagcgagacttcatggacgacaagcgtgtgtacatcatggatgtctacaaccgccacatctacccaggggaccgctttgccaagcaggccatcaggcggaaggtggagctggagtggggcacagaggatgatgagtacctggataaggtggagaggaacatcaagaaatccctccaggagcacctgcccgacgtggtggtatacaatgcaggcaccgacatcctcgagggggaccgccttggggggctgtccatcagcccagcgggcatcgtgaagcgggatgagctggtgttccggatggtccgtggccgccgggtgcccatccttatggtgacctcaggcgggtaccagaagcgcacagcccgcatcattgctgactccatacttaatctgtttggcctggggctcattgggcctgagtcacccagcgtctccgcacagaactcagacacaccgctgcttccccctgcagtgccctgacccttgctgccctgcctgtcacgtggccctgcctatccgccccttagtgctttttgttttctaacctcatggggtggtggaggcagccttcagtgagcatggaggggcagggccatccctggctggggcctggagctggcccttcctctacttttccctgctggaagccagaagggcttgaggcctctatgggtgggggcagaaggcagagcctgtgtcccagggggacccacacgaagtcaccagcccataggtccagggaggcaggcagttaactgagaattggagaggacaggctaggtcccaggcacagcgagggccctgggcttggggtgttctggttttgagaacggcagacccaggtcggagtgaggaagcttccacctccatcctgactaggcctgcatcctaactgggcctccctccctccccttggtcatgggatttgctgccctctttgccccagagctgaagagctataggcactggtgtggatggcccaggaggtgctggagctaggtctccaggtgggcctggttcccaggcagcaggtgggaaccctgggcctggatgtgaggggcggtcaggaaggggtacaggtgggttccctcatctggagttccccctcaataaagcaaggtctggacctgccttcccaggcccttctgtgggggtgaaggtggggaaggcctgcggcgcccagatcactgccttagcagtagtcttgcctgttcagtgcaaggggcaggttttggggggaggaattcttagcgcaaggacgggcctcagccctgtcgcctccagggggccgctgacccaggtggggagagggcagaagaagggtgggggacgtgggcaggccaggctcacaggtggaaatcagggatgcagggtggtgcccaagccaggtcctgcaggaacccaggcccagggagggacccagacactggtgaggcggggcaggggttcctggagagagggcagcgaggatctctatcctggcctggggattatgaacataggtagccggggcagggccctgggtgggactgtggcctccactggcctcaccaaagtgcctgggccccaatccttctccatgcccaggggccccaggtgggccagacctctggcctgttcctcagccctactcatggggacattcagggacctccaggaagtgggcgggggagcatccacccctgctagccggcagctgtggccctgatcaaatcaggggctggggagggaaagtgggtccattgaggtggccctgctccatcagccccctacgggacttgtgttcattacagtgagggggtgctcccactgtctcccggcctccctaatgctccctctgctgcagggagaagggttccaagatcacaaaatgtcaacaatgctggcctcctggaccagaccccgaggctctaacaatgcactctgagatccctacccttgccgttggtctctgtcgctgactcgaggcacctaacatccattcacacccaacacaggccagcgacttctggggctcagccacagacatggtttgtcactgttgagcttctgttcctagagaatcctagaggcttgattggcccaggctgctgtgtgtgctggaggcaaagaatccctacctcctaggggtgaaaggaaatgaaaatggaaagttcttgtagcgcaaggcctgacatgggtagctgctcaataaatgctagtgt

SEQ ID NO: 217028 - DNA, 1559 bp, Artificial Sequence
  derived and/or modified sequence
agggcgagggcggggacggccgggcgggcgcgccaggctacacacaacccagctgtaccagcatgtgccagagacacgctggccaatcgtgtactcgccgcgctacaacatcaccttcatgggcctggagaagctgcatccctttgatgccggaaaatggggcaaagtgatcaatttcctaaaagaagagaagcttctgtctgacagcatgctggtggaggcgcgggaggcctcggaggaggacctgctggtggtgcacacgaggcgctatcttaatgagctcaagaggaaggtgctgaggccccttcggacccagacaggaggaaccataatggcggggaagctggctgtggagcgaggctgggccatcaacgtggggggtggcttccaccactgctccagcgaccgtggcgggggcttctgtgcctatgcggacatcacgctcgccatcaagtttctgtttgagcgtgtggagggcatctccagggctaccatcattgatcttgatgcccatcagggcaatgggcatgagcgagacttcatggacgacaagcgtgtgtacatcatggatgtctacaaccgccacatctacccaggggaccgctttgccaagcaggccatcaggcggaaggtggagctggagtggggcacagaggatgatgagtacctggataaggtggagaggaacatcaagaaatccctccaggagcacctgcccgacgtggtggtatacaatgcaggcaccgacatcctcgagggggaccgccttggggggctgtccatcagcccagcgggcatcgtgaagcgggatgagctggtgttccggatggtccgtggccgccgggtgcccatccttatggtgacctcaggcgggtaccagaagcgcacagcccgcatcattgctgactccatacttaatctgtttggcctggggctcattgggcctgagtcacccagcgtctccgcacagaactcagacacaccgctgcttccccctgcagtgccctgacccttgctgccctgcctgtcacgtggccctgcctatccgccccttagtgctttttgttttctaacctcatggggtggtggaggcagccttcagtgagcatggaggggcagggccatccctggctggggcctggagctggcccttcctctacttttccctgctggaagccagaagggcttgaggcctctatgggtgggggcagaaggcagagcctgtgtcccagggggacccacacgaagtcaccagcccataggtccagggaggcaggcagttaactgagaattggagaggacaggctaggtcccaggcacagcgagggccctgggcttggggtgttctggttttgagaacggcagacccaggtcggagtgaggaagcttccacctccatcctgactaggcctgcatcctaactgggcctccctccctccccttggtcatgggatttgctgccctctttgccccagagctgaagagctataggcactggtgtggatggcccaggaggtgctggagctaggtctccaggtgggcctggttcccaggcagca

SEQ ID NO: 217029 - DNA, 1044 bp, Artificial Sequence
  derived and/or modified sequence
atgctgcacaccacccagctgtaccagcacgtgcctgagacccgctggcccatcgtgtacagcccccgctacaacatcaccttcatgggcctggagaagctgcacccctttgatgctgggaagtggggcaaggtgatcaacttcctgaaggaggagaagctgctgagtgacagcatgctggtggaggcccgggaggccagcgaggaggacctgctggtggtgcacacccggcgctacctgaatgagctgaagtggagctttgctgtggccaccatcacagagatcccccctgtgatcttcctgcccaacttcctggtgcagaggaaggtgctgcggcccctgcggacccagacaggaggcaccatcatggccggcaagctggccgtggagcggggctgggccatcaacgtgggcggcggcttccaccactgcagcagtgacagaggaggcggcttctgtgcctatgctgacatcaccctggccatcaagttcctgtttgagcgggtggagggcatcagccgggccaccatcatcgacctggatgcccaccagggcaatggccacgagcgggacttcatggatgacaagagggtgtacatcatggatgtgtacaacagacacatctacccaggggacagatttgccaagcaggccatccggaggaaggtggagctggagtggggcacagaagatgatgagtacctggacaaggtggagaggaacatcaagaagagcctgcaggagcacctgcctgatgtggtggtgtacaatgccggcacagacatcctggagggggaccggctgggcggcctgagcatcagccctgctggcatcgtgaagagagatgagctggtgttcaggatggtgcggggccggcgggtgcccatcctgatggtgaccagcggcggctaccagaagaggacagcccgcatcatcgctgacagcatcctgaacctgtttggcctgggcctgattggccctgagagccccagcgtgtctgcccagaacagcgacacccccctgctgcccccagctgtgccctag

SEQ ID NO: 217030 - DNA, 1044 bp, Artificial Sequence
  derived and/or modified sequence
atgctgcacaccacccagctgtaccagcacgtgcccgagacccggtggcccatcgtatactctcctcgatacaacattacatttatgggattggaaaagttgcatccttttgatgcagggaaatggggcaaggttataaattttctgaaagaggagaagctgctgtccgattcaatgttggtcgaggcccgggaggcctctgaagaagatctgctggtggtccatacacgcagatatctgaacgaactcaaatggagctttgcagtagccaccattaccgagattcccccagtgatcttccttcccaattttctggttcagcgaaaggttctgaggccgctaaggactcagacgggtggaacaatcatggcaggtaaactggccgttgagcgtggatgggccattaacgtggggggcgggttccatcactgcagcagcgatcgagggggtggcttttgtgcctacgctgacattacgttggctatcaagttcttatttgagagggttgagggtatatcacgggccacgatcatcgatctggacgcgcatcagggtaacgggcacgaacgcgacttcatggatgacaaaagagtgtacattatggatgtctataatcgacatatctatccaggcgatagatttgctaaacaggcgatacggcgcaaagtggaattggagtggggcacagaagacgatgagtacctggacaaagtggaaaggaatattaagaaatctctacaggagcacctgccggatgtcgtagtttataatgccgggaccgatatccttgaaggggacagactaggcggcctgtctatctcacccgcaggcatcgtgaagagggacgagctggtctttaggatggtcagaggccgaagagttccgattctgatggtaacctcaggcgggtatcagaagcggaccgcgaggatcatagcagactccatcctcaatctattcggtctgggcctcataggccctgagtcccccagcgtgtccgcacagaactcagacacaccgctcctaccacccgcagttccatag

SEQ ID NO: 217031 - DNA, 1044 bp, Artificial Sequence
  derived and/or modified sequence
atgcttcatacaacacagctgtatcagcacgtcccagagaccaggtggcccatagtttactcaccgagatacaacatcacctttatgggccttgaaaaactgcacccattcgacgccggtaagtggggaaaagttataaacttcctaaaggaggagaagttactgtccgattccatgctcgttgaagccagagaagcttcagaggaagatctgcttgtggttcatacccgcaggtacctgaacgaactgaaatggtcttttgctgtggctactatcacagaaatcccccctgtgattttcctgcccaattttctcgtgcagaggaaggtcctcaggcctctgcggacccagactggtgggaccatcatggctggtaaactggccgttgagcgtggatgggctattaacgtgggcggaggcttccaccactgtagctccgacaggggcggaggtttttgtgcatacgccgatattacactcgcaatcaagttcctgtttgaacgggtggagggtatttcccgcgctaccataatcgacctggacgcccaccaaggcaatggccacgagagagatttcatggatgacaagcgcgtgtacatcatggatgtttacaatcgccacatctatcctggggaccggttcgccaagcaggcaatcaggcgaaaggttgaactggagtggggtaccgaagacgatgaatatctcgacaaggtcgaacggaatataaaaaaaagcctgcaggagcacctaccagacgttgtggtctacaatgccggtactgacattctggagggggacaggcttggaggtctgtccattagcccggcaggtatcgtgaagagagatgagttggtatttcggatggtgagaggaaggagggttccgatactaatggtaactagtggcggataccagaagcggacagcacgcatcatcgcggactccattctgaacctgtttggcttgggactgatcggtccggagtcccctagcgtcagcgctcagaactcagacactcctctgctgcctcccgctgtgccgtag

SEQ ID NO: 217032 - protein, 553 aa, Artificial Sequence
  derived and/or modified sequence
MTRGGPGGRPGLPQPPPLLLLLLLLPLLLVTAEPPKPAGVYYATAYWMPAEKTVQVKNVMDKNGDAYGFYNNSVKTTGWGILEIRAGYGSQTLSNEIIMFVAGFLEGYLTAPHMNDHYTNLYPQLITKPSIMDKVQDFMEKQDKWTRKNIKEYKTDSFWRHTGYVMAQIDGLYVGAKKRAILEGTKPMTLFQIQFLNSVGDLLDLIPSLSPTKNGSLKVFKRWDMGHCSALIKVLPGFENILFAHSSWYTYAAMLRIYKHWDFNVIDKDTSSSRLSFSSYPGFLESLDDFYILSSGLILLQTTNSVFNKTLLKQVIPETLLSWQRVRVANMMADSGKRWADIFSKYNSGTYNNQYMVLDLKKVKLNHSLDKGTLYIVEQIPTYVEYSEQTDVLRKGYWPSYNVPFHEKIYNWSGYPLLVQKLGLDYSYDLAPRAKIFRRDQGKVTDTASMKYIMRYNNYKKDPYSRGDPCNTICCREDLNSPNPSPGGCYDTKVADIYLASQYTSYAISGPTVQGGLPVFRWDRFNKTLHQGMPEVYNFDFITMKPILKLDIK

SEQ ID NO: 217033 - DNA, 1662 bp, Artificial Sequence
  derived and/or modified sequence
atgacgcggggtgggcctggaggacggcctgggcttcctcaacctccacctctgctcctattactcctgttacttcccctgctgcttgtcaccgccgagccccctaagccagccggtgtctactacgctacggcgtactggatgccggctgagaagacagtgcaagtcaagaacgtaatggataaaaacggggatgcctatggcttctataacaatagcgttaaaacgacgggctggggaatcttggaaatccgggctggttatggaagtcagacattgagcaacgagatcatcatgtttgttgcagggtttctggagggctatttaacagcccctcacatgaacgaccactacacaaacttgtatccccagctcatcacaaaaccctccatcatggacaaggttcaagattttatggagaaacaagacaaatggacaaggaagaatataaaggagtataagacagatagcttttggagacatactggttacgtgatggcccagatagatggactctatgtcggagcgaagaaaagggccatccttgagggtactaaaccaatgaccttattccagattcagtttcttaacagcgtgggagatcttctggatctcatccccagcctgagtcccaccaaaaatgggagcctgaaggtgtttaagcgttgggacatgggtcattgcagcgctctgatcaaggtactccccggattcgaaaacatcttgtttgcgcacagtagctggtatacctatgcagccatgctccgcatttacaagcactgggattttaatgtcattgataaagacacttcctccagccgtctgtccttctccagctaccctggtttcctggagagcctggacgacttttacatcctgtctagcggactgatcctgctgcagactactaattccgtgttcaacaagacactgctcaaacaggtcatccctgagacgctgcttagttggcagcgagttcgagtcgcaaatatgatggccgactccggaaaacggtgggccgatatcttcagcaagtataactcaggaacctacaataatcagtacatggtactggacctgaagaaggtcaaacttaatcactcactggacaaaggcactttgtacattgtcgaacagatcccaacttatgtggaatattcggaacagaccgatgtgctcaggaagggatattggcctagctacaatgtgcccttccacgaaaagatttacaactggtctggctatcccctcctggtgcaaaagctgggccttgactactcgtatgatctagcacccagagccaagatatttaggagggatcagggcaaagtgacagatacggctagcatgaaatacattatgcggtataacaattacaagaaggacccttacagccggggagatccttgtaacaccatctgctgccgggaggatctgaatagtccgaatccctctcccggaggctgctacgacacaaaggtcgccgatatttatctggccagccagtacacaagctacgcaataagcgggcctactgtgcaggggggattgcccgtattccggtgggacaggtttaataagactctgcaccaggggatgcccgaggtatacaacttcgacttcattacaatgaaaccaattctgaaacttgatatcaaatag

SEQ ID NO: 217034 - DNA, 1662 bp, Artificial Sequence
  derived and/or modified sequence
atgaccaggggaggtccaggcggtagacccggacttccccaaccccctcctttgcttctgttactgctgctcttacccttacttcttgtgaccgccgaaccgcctaagcccgcaggcgtatactacgctactgcttactggatgcccgcagagaaaacagtacaggtgaagaacgtcatggacaagaatggcgacgcatatgggttctacaataattctgtgaaaaccactgggtgggggatccttgagattcgggcgggatacggcagccagaccctttccaatgaaattatcatgtttgtcgccggctttttagagggctacctgaccgcacctcatatgaacgaccactacaccaatctgtacccccagttgattacaaagccatcgattatggataaagtacaggacttcatggagaaacaggacaagtggacacgaaagaatattaaggagtacaagacagattctttttggaggcatacagggtatgttatggctcaaatcgacggactgtacgttggagcaaagaagagggcaatcttagagggtaccaaacccatgactctgttccagatccagttcctgaattccgtgggggacctattggatttaataccctcattgtccccaacaaagaacggtagccttaaggtgttcaaacgatgggacatgggtcactgctctgctctgatcaaagtgttaccgggtttcgagaacattcttttcgcccatagctcctggtacacctacgccgctatgttacgcatatataagcactgggacttcaacgtcatcgacaaggacacatcctcatctagactctcttttagctcttacccagggttcctcgagagcctcgatgacttctacattttgagctccggcctcatcctactacagactacgaacagtgttttcaataagacccttctgaagcaagtaattccagagacattgctatcctggcagcgcgttcgagtggcaaatatgatggccgactccggaaaacgatgggcagacattttctctaaatacaacagcgggacctacaataatcaatatatggtgcttgacctgaaaaaagtaaaattgaaccattcactcgacaagggaacactgtacatcgtcgaacagattcctacgtatgtggaatatagcgagcagaccgacgttctgcggaaagggtactggccgagttacaatgtaccatttcacgaaaaaatatataattggagcggttaccctttgctggtgcaaaagttggggctggattattcttatgatctggcacccagggcaaagatctttcgccgtgatcagggaaaggtaactgatacagcatcaatgaaatatatcatgaggtacaataattacaagaaggacccttatagccggggcgacccatgtaacacaatctgctgtcgtgaagatctgaattcccctaatccttctccaggaggctgctatgacacaaaagtggcagacatctatttggccagtcagtatactagctatgcaatttccggtccaactgtccaaggaggcttgcctgtgttccgttgggatcggtttaataaaaccttacatcaggggatgcccgaggtctataactttgattttatcaccatgaagcctatcttgaagctggatattaaatag

SEQ ID NO: 217035 - DNA, 1662 bp, Artificial Sequence
  derived and/or modified sequence
atgacaagaggcggtcccggcggtcgacctggcctgcctcagcctccccccctactgctgcttcttcttctcttgccgcttttattagtgacagccgagccacccaagccagcaggcgtgtattacgctactgcttactggatgccagccgaaaagacagtgcaggtcaagaatgttatggataagaacggagatgcatacggcttttataacaatagcgttaaaacaacaggatggggaatcctggaaatccgtgcggggtacggctctcaaaccctgtccaacgagattataatgtttgtggctgggtttctagaaggctatcttacagctcctcacatgaacgaccactatacaaatttgtatccacagctcatcacaaaaccgagtattatggacaaggtccaggactttatggaaaagcaggataagtggacaagaaagaacatcaaagaatacaaaactgactccttttggcggcacactggatatgtgatggctcaaattgacggcctctacgtgggcgctaagaaaagagctattctggaagggactaagcctatgacactgtttcagatccaattcctcaattctgtgggagatctcctggacctgattccaagcctctcccccactaagaacggttcactgaaagtatttaaacgatgggatatgggacattgctcagcattaatcaaagtgctccccggattcgagaacatcctctttgcccattctagttggtacacatacgccgctatgttgagaatttacaaacattgggacttcaacgtgatcgacaaggacacgtccagttcccggctgagtttcagcagctatcctggattcttggagtctttggatgacttttatatactgtcaagtggcctcatcctattgcagactacgaacagtgttttcaataagacccttctgaagcaagtaattccagagacattgctatcctggcagcgcgttcgagtggcaaatatgatggccgactccggaaaacgatgggcagacattttctctaaatacaacagcgggacctacaataatcaatatatggtgcttgacctgaaaaaagtaaaattgaaccattcactcgacaagggaacactgtacatcgtcgaacagattcctacgtatgtggaatatagcgagcagaccgacgttctgcggaaagggtactggccgagttacaacgttccattccacgagaagatttacaattggtccggttatcctttgctagtgcaaaagctcggcctcgattactcctatgacctcgcaccccgtgcgaagatctttaggcgggaccaaggaaaagtgaccgacaccgcttcaatgaagtatatcatgaggtataacaattataaaaaagacccctatagccgcggcgatccatgcaacaccatctgctgcagagaagacctgaatagtccgaaccctagccctggcggatgttacgatactaaggtggcagatatctatctggcctcccaatacaccagctacgctataagcggaccgaccgtgcagggaggattaccagtattcagatgggaccggttcaataaaacgctgcaccagggaatgcctgaggtttataacttcgatttcatcacaatgaagcctattctgaaactcgacattaagtag

SEQ ID NO: 217036 - DNA, 2426 bp, Artificial Sequence
  derived and/or modified sequence
agtgtgtctagtgtcagccccgtctgaatcactctcctgtggtggctccagccaacgaagaggaagcaaaaaggataaaaaatctgagctacagcgcatggatttaggttaaacagcctgggaatgaggggtacgctaatcgctgaggaaaacgcacctgtggaggcctctccagaaacagcagaggatccgagctgcgtgtaggcagggcgcgcatgtcaccctggcccgggcgcctggtccgctgctggagataaatggtcgaccccggagggagaggctagtaggggtgttgatgtgaactgattcgcccaagccttgggccgcaaaactgcgaaagaaagcggcaggcagcctctgcatttcccagaagtgcagctggggaactttcccagaccggcccaggggttgctagagggtcagacgtaaaggatccgcctttcctaggcggggtgggccccaggccaccacgtgaagcgtcctcgcccctcagagcccggagcaggccgggctcaagaaagaggaaagttgaggacgccccacctcggagaggcggcgcccctgagtaggccaggagcctctcttgcaacttctgccaccgcgggccaccgcggccgcctgatcccgcagaggaaggtcgcggccgtggagcgatgacccgcggcggtccgggcgggcgcccggggctgccacagccgccaccgcttctgctgctgctgctgctgctgccgctgttgttagtcaccgcggagccgccgaaacctgcaggagtctactatgcaactgcatactggatgcctgctgaaaagacagtacaagtcaaaaatgtaatggacaagaatggggacgcctatggcttttacaataactctgtgaaaaccacaggctggggcatcctggagatcagagctggctatggctctcaaaccctgagcaatgagatcatcatgtttgtggctggctttttggagggttacctcactgccccacacatgaatgaccactacacaaacctctacccacagctgatcacgaaaccttccatcatggataaagtgcaggattttatggagaagcaagataagtggacccggaaaaatatcaaagaatacaagactgattcattttggagacatacaggctatgtgatggcacaaatagatggcctctatgtaggagcaaagaagagggctatattagaagggacaaagccaatgaccctgttccagattcagttcctgaatagtgttggagatctattggatctgattccctcactctctcccacaaaaaacggcagcctaaaggtttttaagagatgggacatgggacattgctccgctcttatcaaggttcttcctggatttgagaacatcctttttgctcactcaagctggtacacgtatgcagccatgctcaggatatataaacactgggacttcaacgtcatagataaagataccagcagtagtcgcctctctttcagcagttacccagggtttttggagtctctggatgatttttacattcttagcagtggattgatattgctgcagaccacaaacagtgtgtttaataaaaccctgctaaagcaggtaatacccgagactctcctgtcctggcaaagagtccgtgtggccaatatgatggcagatagtggcaagaggtgggcagacatcttttcaaaatacaactctggcacctataacaatcaatacatggttctggacctgaagaaagtaaagctgaaccacagtcttgacaaaggcactctgtacattgtggagcaaattcctacatatgtagaatattctgaacaaactgatgttctacggaaaggatattggccctcctacaatgttcctttccatgaaaaaatctacaactggagtggctatccactgttagttcagaagctgggcttggactactcttatgatttagctccacgagccaaaattttccggcgtgaccaagggaaagtgactgatacggcatccatgaaatatatcatgcgatacaacaattataagaaggatccttacagtagaggtgacccctgtaataccatctgctgccgtgaggacctgaactcacctaacccaagtcctggaggttgttatgacacaaaggtggcagatatctacctagcatctcagtacacatcctatgccataagtggtcccacagtacaaggtggcctccctgtttttcgctgggaccgtttcaacaaaactctacatcagggcatgccagaggtctacaactttgattttattaccatgaaaccaattttgaaacttgatataaaatgaaggagggagatgacggactagaagactgtaaataagataccaaaggcactattttagctatgtttttcccatcagaattatgcaataaaatatattaatttgtcactttca

SEQ ID NO: 217037 - DNA, 1662 bp, Artificial Sequence
  derived and/or modified sequence
atgaccagaggcggccccggcggcagacccggcctgccccagcccccccccctgctgctgctgctgctgctgctgcccctgctgctggtgaccgccgagccccccaagcccgccggcgtgtactacgccaccgcctactggatgcccgccgagaagaccgtgcaggtgaagaacgtgatggacaagaacggcgacgcctacggcttctacaacaacagcgtgaagaccaccggctggggcatcctggagatcagagccggctacggcagccagaccctgagcaacgagatcatcatgttcgtggccggcttcctggagggctacctgaccgccccccacatgaacgaccactacaccaacctgtacccccagctgatcaccaagcccagcatcatggacaaggtgcaggacttcatggagaagcaggacaagtggaccagaaagaacatcaaggagtacaagaccgacagcttctggagacacaccggctacgtgatggcccagatcgacggcctgtacgtgggcgccaagaagagagccatcctggagggcaccaagcccatgaccctgttccagatccagttcctgaacagcgtgggcgacctgctggacctgatccccagcctgagccccaccaagaacggcagcctgaaggtgttcaagagatgggacatgggccactgcagcgccctgatcaaggtgctgcccggcttcgagaacatcctgttcgcccacagcagctggtacacctacgccgccatgctgagaatctacaagcactgggacttcaacgtgatcgacaaggacaccagcagcagcagactgagcttcagcagctaccccggcttcctggagagcctggacgacttctacatcctgagcagcggcctgatcctgctgcagaccaccaacagcgtgttcaacaagaccctgctgaagcaggtgatccccgagaccctgctgagctggcagagagtgagagtggccaacatgatggccgacagcggcaagagatgggccgacatcttcagcaagtacaacagcggcacctacaacaaccagtacatggtgctggacctgaagaaggtgaagctgaaccacagcctggacaagggcaccctgtacatcgtggagcagatccccacctacgtggagtacagcgagcagaccgacgtgctgagaaagggctactggcccagctacaacgtgcccttccacgagaagatctacaactggagcggctaccccctgctggtgcagaagctgggcctggactacagctacgacctggcccccagagccaagatcttcagaagagaccagggcaaggtgaccgacaccgccagcatgaagtacatcatgagatacaacaactacaagaaggacccctacagcagaggcgacccctgcaacaccatctgctgcagagaggacctgaacagccccaaccccagccccggcggctgctacgacaccaaggtggccgacatctacctggccagccagtacaccagctacgccatcagcggccccaccgtgcagggcggcctgcccgtgttcagatgggacagattcaacaagaccctgcaccagggcatgcccgaggtgtacaacttcgacttcatcaccatgaagcccatcctgaagctggacatcaagtag

SEQ ID NO: 217038 - DNA, 1662 bp, Artificial Sequence
  derived and/or modified sequence
atgactaggggcggacctggtggaagacctggcctgccccaaccaccacctcttctcctcctgctgctgctcctccctcttctgctggtgacggctgagcccccaaagccagctggcgtgtactacgctacagcctactggatgccagctgagaagacagtgcaggtgaagaacgtgatggataagaatggggatgcatacgggttctacaataacagcgtgaaaaccacaggctggggcatactcgagattcgtgctggctacggttcccaaactcttagcaatgagatcatcatgtttgttgcgggatttctggaagggtacctcactgccccccacatgaatgaccactatacaaatctctatccccagctgattactaagccatccatcatggacaaggtacaggatttcatggagaaacaggataagtggactcgtaaaaacattaaggaatacaagacggatagcttctggcgccacactggttatgtcatggcacagatcgatggactgtacgtgggggcaaagaaacgtgctatactagaggggacaaagcctatgacattgtttcaaatccagtttttaaacagcgtgggcgacttgctggacctgatccctagcttgtcccccaccaagaacggttccttgaaagtgttcaaaagatgggatatggggcattgcagcgcacttatcaaagtgcttcctggcttcgagaatatccttttcgctcattcatcatggtacacctacgctgcgatgttgagaatatataagcactgggacttcaacgtaattgacaaggatacctcctcatcaaggctgtcctttagctcataccccgggtttctagaaagcctggatgatttctacatcctaagctctgggctcattctacttcagactacgaacagtgtattcaataaaacactcctcaaacaggtgatcccagagacactcctgtcctggcagagggttcgagtcgccaatatgatggcagattcagggaaacggtgggccgacatcttctctaagtacaactctggcacgtacaataatcaatatatggtactagaccttaagaaggtcaagctcaaccactctctggataaaggcaccctctacatcgtcgaacagataccaacatatgtggagtacagcgagcagaccgatgtgcttaggaagggctactggcccagctacaatgtgcctttccacgagaagatctacaattggtccggatacccgctgctggtgcagaagctcgggctcgattattcctatgatctggcacctagagccaagattttcagacgcgaccaaggcaaggtcactgatactgcaagcatgaagtatatcatgcgctacaataactacaaaaaggacccatacagtaggggtgacccttgcaacactatctgctgcagggaggatctgaatagtcccaatccatctccaggaggctgttacgacacaaaggtggcagacatttacttagctagccagtatacaagttacgctattagcggtcccacagtgcaggggggactccccgtattccgatgggacagattcaataaaaccctgcatcaggggatgccggaagtgtataatttcgactttattaccatgaaaccgattttgaagctggatattaaatag

SEQ ID NO: 217039 - DNA, 1662 bp, Artificial Sequence
  derived and/or modified sequence
atgacccggggcggccctgggggccggcccggcctgccccagcccccacccctgctgctgctgctgctgctgctgcccctgctgctggtgacagctgagccccccaagccagctggggtgtactatgccacagcctactggatgcctgctgagaagacagtgcaggtgaagaatgtgatggacaagaatggagatgcctacggcttctacaacaacagcgtgaagaccaccggctggggcatcctggagatccgggccggctacggcagccagaccctgagcaatgagatcatcatgtttgtggccggcttcctggagggctacctgacagccccccacatgaatgaccactacaccaacctgtacccccagctgatcaccaagcccagcatcatggacaaggtgcaggacttcatggagaagcaggacaagtggaccaggaagaacatcaaggagtacaagacagacagcttctggaggcacacaggctacgtgatggcccagattgatggcctgtatgtgggcgccaagaagagggccatcctggagggcaccaagcccatgaccctcttccagatccagttcctgaacagcgtgggggacctgctggacctgatccccagcctgagccccaccaagaatggcagcctgaaggtgttcaagcgctgggacatgggccactgcagcgccctgatcaaggtgctgcccggctttgagaacatcctgtttgcccacagctcctggtacacctacgccgccatgctgcgcatctacaagcactgggacttcaacgtcatcgacaaggacaccagcagcagccggctgtccttcagcagctacccaggcttcctggagagcctggatgacttctacatcctgagcagcggcctcatcctgctgcagaccaccaacagcgtcttcaacaagaccctgctgaagcaggtgattcctgagaccctgctgtcctggcagagggtgcgggtggccaacatgatggctgacagcggcaagcgctgggccgacatcttcagcaagtacaacagcggcacctacaacaaccagtacatggtgctggacctgaagaaggtgaagctgaaccacagcctggacaagggcaccctgtacatcgtggagcagatccccacctacgtggagtacagcgagcagacagatgtgctgaggaagggctactggcccagctacaacgtgcccttccacgagaagatctacaactggagcggctaccccctgctggtgcagaagctgggcctggactacagctatgacctggccccccgggccaagatcttccggcgggaccagggcaaggtgacagacacagcctccatgaagtacatcatgagatacaacaactacaagaaggacccctacagcagaggagacccctgcaacaccatctgctgccgggaggacctgaacagccccaaccccagccctgggggctgctatgacaccaaggtggccgacatctacctggccagccagtacaccagctatgccatcagcggccccaccgtgcagggcggcctgcccgtcttccgctgggaccgcttcaacaagaccctgcaccagggcatgcctgaggtgtacaactttgacttcatcaccatgaagcccatcctgaagctggacatcaagtag

SEQ ID NO: 217040 - DNA, 1662 bp, Artificial Sequence
  derived and/or modified sequence
atgacccggggcggccccggcggccggcccggcctgccccagccccctccgctccttttgctcctcctcctgctgccgctgctgctggttactgccgaaccccccaagcccgcaggcgtttattacgcaacagcgtattggatgcccgccgaaaaaaccgttcaggtaaagaatgtgatggataagaatggcgatgcctacggcttttacaataacagcgtgaaaacgactggctggggaattctcgaaataagggcagggtacggaagtcagacgctcagcaacgagatcatcatgttcgtcgctgggttcctggaaggataccttaccgccccgcatatgaatgatcactacaccaacctatatccacagttgattacgaaaccgagtatcatggacaaagtccaggactttatggaaaagcaagataagtggacccgtaagaacatcaaggaatataagacagatagcttctggcggcataccggctatgtgatggcccagatcgatggcttgtacgtcggcgctaagaaacgcgcgatcctcgaaggtaccaagcccatgacattattccagatccagtttctcaacagcgtcggcgatttgctcgacctgattccatcactttcccccaccaaaaatggatcactgaaggtcttcaagagatgggatatgggtcactgctctgctctgattaaggtgctgcctggattcgagaacatcctgtttgctcactcctcatggtacacctatgcagcaatgcttaggatttacaagcattgggatttcaatgtgattgacaaggacacgagttcaagcagactgtcgttttcatcttaccctggttttttggaaagtctggacgatttctatatcttgtctagcggacttatcttgctgcagactaccaatagtgtgtttaacaaaacgttactcaagcaggtgatcccagaaactctgctttcttggcaacgggttcgtgttgcaaacatgatggcggatagcggaaaacgctgggcagacatattttcaaaatataactccggcacctataacaaccagtacatggtcttggacctgaagaaggtgaagttaaatcattccctggacaaggggacactgtacatcgtagaacagattccaacatacgtagagtatagcgagcaaacggacgtgttgcgtaaaggctactggcctagttacaacgtgccatttcatgagaagatatataattggagcgggtacccattactggtgcagaaactagggctcgattactcgtatgatctggccccacgagctaaaatatttaggcgggatcagggcaaagtgaccgatacagcctctatgaagtatattatgcgatataataattataagaaagacccatacagccggggtgacccttgcaacacaatttgctgccgcgaggatcttaattcgcccaacccatcacctggaggatgttatgacaccaaggtcgccgacatatatctggctagccagtacacctcctatgcaatctctggcccaactgtgcagggaggtctgccggtgttcagatgggaccgatttaacaagactctccatcaggggatgcctgaggtttataactttgactttatcactatgaagccaattctgaagcttgacataaagtag

SEQ ID NO: 217041 - RNA, 1662 nt, Artificial Sequence
  derived and/or modified sequence
augaccaggggagguccaggcgguagacccggacuuccccaacccccuccuuugcuucuguuacugcugcucuuacccuuacuucuugugaccgccgaaccgccuaagcccgcaggcguauacuacgcuacugcuuacuggaugcccgcagagaaaacaguacaggugaagaacgucauggacaagaauggcgacgcauauggguucuacaauaauucugugaaaaccacugggugggggauccuugagauucgggcgggauacggcagccagacccuuuccaaugaaauuaucauguuugucgccggcuuuuuagagggcuaccugaccgcaccucauaugaacgaccacuacaccaaucuguacccccaguugauuacaaagccaucgauuauggauaaaguacaggacuucauggagaaacaggacaaguggacacgaaagaauauuaaggaguacaagacagauucuuuuuggaggcauacaggguauguuauggcucaaaucgacggacuguacguuggagcaaagaagagggcaaucuuagaggguaccaaacccaugacucuguuccagauccaguuccugaauuccgugggggaccuauuggauuuaauacccucauuguccccaacaaagaacgguagccuuaagguguucaaacgaugggacaugggucacugcucugcucugaucaaaguguuaccggguuucgagaacauucuuuucgcccauagcuccugguacaccuacgccgcuauguuacgcauauauaagcacugggacuucaacgucaucgacaaggacacauccucaucuagacucucuuuuagcucuuacccaggguuccucgagagccucgaugacuucuacauuuugagcuccggccucauccuacuacagacuacgaacaguguuuucaauaagacccuucugaagcaaguaauuccagagacauugcuauccuggcagcgcguucgaguggcaaauaugauggccgacuccggaaaacgaugggcagacauuuucucuaaauacaacagcgggaccuacaauaaucaauauauggugcuugaccugaaaaaaguaaaauugaaccauucacucgacaagggaacacuguacaucgucgaacagauuccuacguauguggaauauagcgagcagaccgacguucugcggaaaggguacuggccgaguuacaauguaccauuucacgaaaaaauauauaauuggagcgguuacccuuugcuggugcaaaaguuggggcuggauuauucuuaugaucuggcacccagggcaaagaucuuucgccgugaucagggaaagguaacugauacagcaucaaugaaauauaucaugagguacaauaauuacaagaaggacccuuauagccggggcgacccauguaacacaaucugcugucgugaagaucugaauuccccuaauccuucuccaggaggcugcuaugacacaaaaguggcagacaucuauuuggccagucaguauacuagcuaugcaauuuccgguccaacuguccaaggaggcuugccuguguuccguugggaucgguuuaauaaaaccuuacaucaggggaugcccgaggucuauaacuuugauuuuaucaccaugaagccuaucuugaagcuggauauuaaauag

SEQ ID NO: 217042 - RNA, 1662 nt, Artificial Sequence
  derived and/or modified sequence
augacaagaggcggucccggcggucgaccuggccugccucagccucccccccuacugcugcuucuucuucucuugccgcuuuuauuagugacagccgagccacccaagccagcaggcguguauuacgcuacugcuuacuggaugccagccgaaaagacagugcaggucaagaauguuauggauaagaacggagaugcauacggcuuuuauaacaauagcguuaaaacaacaggauggggaauccuggaaauccgugcgggguacggcucucaaacccuguccaacgagauuauaauguuuguggcuggguuucuagaaggcuaucuuacagcuccucacaugaacgaccacuauacaaauuuguauccacagcucaucacaaaaccgaguauuauggacaagguccaggacuuuauggaaaagcaggauaaguggacaagaaagaacaucaaagaauacaaaacugacuccuuuuggcggcacacuggauaugugauggcucaaauugacggccucuacgugggcgcuaagaaaagagcuauucuggaagggacuaagccuaugacacuguuucagauccaauuccucaauucugugggagaucuccuggaccugauuccaagccucucccccacuaagaacgguucacugaaaguauuuaaacgaugggauaugggacauugcucagcauuaaucaaagugcuccccggauucgagaacauccucuuugcccauucuaguugguacacauacgccgcuauguugagaauuuacaaacauugggacuucaacgugaucgacaaggacacguccaguucccggcugaguuucagcagcuauccuggauucuuggagucuuuggaugacuuuuauauacugucaaguggccucauccuauugcagacuacgaacaguguuuucaauaagacccuucugaagcaaguaauuccagagacauugcuauccuggcagcgcguucgaguggcaaauaugauggccgacuccggaaaacgaugggcagacauuuucucuaaauacaacagcgggaccuacaauaaucaauauauggugcuugaccugaaaaaaguaaaauugaaccauucacucgacaagggaacacuguacaucgucgaacagauuccuacguauguggaauauagcgagcagaccgacguucugcggaaaggguacuggccgaguuacaacguuccauuccacgagaagauuuacaauugguccgguuauccuuugcuagugcaaaagcucggccucgauuacuccuaugaccucgcaccccgugcgaagaucuuuaggcgggaccaaggaaaagugaccgacaccgcuucaaugaaguauaucaugagguauaacaauuauaaaaaagaccccuauagccgcggcgauccaugcaacaccaucugcugcagagaagaccugaauaguccgaacccuagcccuggcggauguuacgauacuaagguggcagauaucuaucuggccucccaauacaccagcuacgcuauaagcggaccgaccgugcagggaggauuaccaguauucagaugggaccgguucaauaaaacgcugcaccagggaaugccugagguuuauaacuucgauuucaucacaaugaagccuauucugaaacucgacauuaaguag

SEQ ID NO: 217043 - protein, 534 aa, Artificial Sequence
  derived and/or modified sequence
MRLRGCGPRAAPASSAGASDARLLAPPGRNPFVHELRLSALQKAQVALMTLTLFPVRLLVAAAMMLLAWPLALVASLGSAEKEPEQPPALWRKVVDFLLKAIMRTMWFAGGFHRVAVKGRQALPTEAAILTLAPHSSYFDAIPVTMTMSSIVMKAESRDIPIWGTLIQYIRPVFVSRSDQDSRRKTVEEIKRRAQSNGKWPQIMIFPEGTCTNRTCLITFKPGAFIPGAPVQPVVLRYPNKLDTITWTWQGPGALEILWLTLCQFHNQVEIEFLPVYSPSEEEKRNPALYASNVRRVMAEALGVSVTDYTFEDCQLALAEGQLRLPADTCLLEFARLVRGLGLKPEKLEKDLDRYSERARMKGGEKIGIAEFAASLEVPVSDLLEDMFSLFDESGSGEVDLRECVVALSVVCRPARTLDTIQLAFKMYGAQEDGSVGEGDLSCILKTALGVAELTVTDLFRAIDQEEKGKITFADFHRFAEMYPAFAEEYLYPDQTHFESCAETSPAPIPNGFCADFSPENSDAGRKPVRKKLD

SEQ ID NO: 217044 - DNA, 1605 bp, Artificial Sequence
  derived and/or modified sequence
atgcggctgcgtggctgtgggccccgggcagccccagcgagcagtgctggagccagcgacgctagactgttggctcccccgggtagaaatccattcgtgcatgaactgcggctgagcgcactgcagaaagctcaggtcgccctgatgactctcaccctatttcccgtgcggctcctcgtcgccgcggccatgatgctccttgcttggccgctcgccttagttgctagtctgggctctgcagagaaggaacccgagcagcctcccgcactctggaggaaggttgtggacttcttactgaaagcaattatgagaacaatgtggtttgcaggtgggtttcaccgggttgccgttaaggggaggcaggcacttccaaccgaggcagccatactaactctggcacctcacagttcctacttcgatgccattccagtgacaatgacaatgtctagtatagtcatgaaagcagagtctcgcgatatccctatttggggaaccctgatacaatatattcggcccgtgttcgtgtccaggagcgaccaggactcgaggcgcaaaacagtcgaagagatcaagcgcagagcgcagtcaaacggcaaatggccgcagattatgatcttccccgagggcacatgtacaaaccgcacctgtctgatcacctttaagcccggtgcgttcatcccgggcgctcccgttcagcccgtggtactgagatatccaaacaaactggatactatcacctggacgtggcagggacctggcgccctggagatcttgtggctgacactgtgccaatttcacaaccaggtcgagatcgagttcctgccagtgtactcaccatcagaggaggaaaaaagaaatcccgctttgtacgcatcaaatgtgcgtcgggtaatggctgaggctctgggcgtctctgtcacagattacacattcgaagactgccagctggccttagccgaggggcaactgaggctaccagccgacacttgtctcttggagtttgctcggcttgtccgtggactaggcctcaagccggaaaagctggagaaggaccttgacagatacagcgaacgagccagaatgaagggcggagagaagatcgggatcgcagagtttgctgcctcactagaagtccccgtgtccgatcttttggaagacatgttttctctttttgatgagagtggctctggcgaggttgaccttcgggagtgcgtggtcgcactgtcggtcgtctgccgccctgcccggaccttggatactatccagctcgctttcaagatgtatggagcacaggaagacggaagtgtcggagagggcgacctttcttgcatcctgaagactgctctgggagtcgccgagctcacagtgactgacctgtttcgggccatcgaccaggaagagaagggtaaaattacctttgctgacttccaccgcttcgccgaaatgtacccagccttcgccgaagagtatctttaccccgatcagactcactttgagtcatgcgccgaaacgtctccagcacctatcccaaatgggttttgcgcagatttttccccagagaactcagacgccgggagaaagccagttagaaagaaacttgactag

SEQ ID NO: 217045 - DNA, 1605 bp, Artificial Sequence
  derived and/or modified sequence
atgcgcttgcgggggtgcggcccgcgcgctgcccctgccagcagcgccggcgctagtgatgccagacttctggctcctcctggaaggaatcccttcgtgcatgaacttaggctgtcagctctgcaaaaagcacaggttgcgctaatgactctgaccctgttcccagtcaggctcctggttgcagcagccatgatgctgctggcttggcctctcgctttggtggcctctctggggtctgccgagaaagagcccgagcagccacccgcactgtggcgcaaagtggtcgactttctgctgaaggcaatcatgagaactatgtggttcgcgggcggctttcatcgtgtggctgtaaagggtcgccaggctctgccaacggaggccgccatccttaccttggcaccccattcttcctacttcgatgctatccccgttaccatgacaatgtcctccatcgtgatgaaagccgagtctagggatataccaatctggggaacgctgattcagtacatccgccctgtgtttgtaagtcgctcggatcaggattcaaggaggaagacagtggaagagataaaaagacgagcccaatcaaatgggaaatggccacagatcatgatctttccggaggggacttgtaccaatagaacttgcctgatcacattcaaacctggagcctttattcctggggcaccggtccagcccgttgttcttaggtatcccaataagctcgataccataacatggacatggcagggcccgggcgccttggaaatcttgtggctcaccctctgtcagtttcataatcaggttgaaattgagtttctcccggtgtacagcccgtccgaggaggaaaaacggaatcctgcactttacgccagtaatgttcgaagagtgatggctgaggccttgggagtgagcgtaactgactatacgttcgaggactgtcagctggctctcgcggagggacagctcagactgcccgcggatacttgcttgctcgaattcgcgcggctagtgagagggctgggactaaaacctgagaagctggaaaaggacttggatcggtacagtgaacgcgcgaggatgaagggaggagagaagatcggaatcgccgagtttgctgctagcctggaggtgcctgttagcgatctgctggaagatatgttctctctgttcgacgaatctggatctggcgaggtggacctcagagaatgcgtggtagcactgtcggtggtttgtcgcccggccaggacactggacacgattcagctggcctttaagatgtatggggcccaagaggacggtagtgtcggagagggcgacctcagttgcattttaaagaccgctctcggtgtggctgaacttactgtaactgacctctttagggccattgaccaggaagagaagggaaaaataacttttgcagattttcaccggtttgcagagatgtacccggccttcgcggaggagtacctctatccagatcagacacactttgagtcttgtgctgaaacaagtccagccccgatacccaatggcttttgcgccgacttttctccggaaaattctgacgcagggcgcaagccagttcgaaagaaattggactag

SEQ ID NO: 217046 - DNA, 1605 bp, Artificial Sequence
  derived and/or modified sequence
atgaggctgcggggctgcggcccccgggccgccccagccagcagcgctggggccagtgatgcccggctgctggcccctcctggaagaaacccctttgtgcatgagctgcggctgagcgccctgcagaaggcccaggtggccctgatgaccctgaccctcttccctgtgcggctgctggtggccgccgccatgatgctgctggcctggcccctggccctggtggccagcctgggcagcgctgagaaggagcctgagcagcccccagccctgtggaggaaggtggtggacttcctgctgaaggccatcatgaggaccatgtggtttgctgggggcttccaccgggtggccgtgaagggccggcaggccctgcccacagaagctgccatcctgaccctggccccccacagcagctactttgatgccatccctgtgaccatgaccatgagcagcatcgtgatgaaggccgagagccgggacatccccatctggggcaccctcatccagtacatccggcctgtgtttgtgtccagaagtgaccaggacagcaggaggaagacagtggaggagatcaagaggcgggcccagagcaatggcaagtggccccagatcatgatcttccctgagggcacctgcaccaacagaacctgcctgatcaccttcaagccaggggccttcatccctggggcccctgtgcagcctgtggtgctgcgctaccccaacaagctggacaccatcacctggacctggcagggccctggggccctggagatcctgtggctgaccctgtgccagttccacaaccaggtggagattgagttcctgcctgtgtacagccccagcgaggaggagaagagaaatcctgccctgtatgccagcaatgtgagaagagtgatggccgaggccctgggcgtgtctgtgacagactacacctttgaggactgccagctggccctggccgagggccagctgcggctgcctgctgacacctgcctgctggagtttgcccggctggtgcggggcctgggcctgaagccagagaagctggagaaggacctggaccgctacagcgagcgggccaggatgaagggcggggagaagattggaattgctgagtttgctgccagcctggaggtgcctgtgtctgacctgctggaggacatgttcagcctgtttgatgagagcggcagcggggaggtggacctgagagaatgtgtggtggccctgtctgtggtgtgcaggcctgcccggaccctggacaccatccagctggccttcaagatgtacggggcccaggaggatggctctgtgggggagggggacctgagctgcatcctgaagacagccctgggcgtggccgagctgactgtgacagacctcttccgggccatcgaccaggaggagaagggcaagatcacctttgctgacttccacagatttgctgagatgtacccagcctttgctgaggagtacctgtacccagaccagacccactttgagagctgtgccgagaccagccctgcccccatccccaacggcttctgtgccgacttcagccctgagaacagtgatgctggcaggaagcctgtgaggaagaagctggactag

SEQ ID NO: 217047 - DNA, 3966 bp, Artificial Sequence
  derived and/or modified sequence
cgcgcctgcgcgcccggcccgctccagccgccgcgcatcctcggcccgcgccccgagacccgcgcccagctagccccggccccgctcggcgccccaggcagctcggctgcgctcgccgcgggacggcgcggccatgaggctgcggggatgcggaccccgggccgcccctgcctccagcgcaggggccagcgacgctcggctgctggcgcccccggggcggaaccccttcgtgcacgagctgcgcctcagcgccctgcagaaggcccaggtggccctcatgacactgacgctcttcccggtccggctcctggttgccgctgccatgatgctgctggcctggcccctcgcacttgtcgcatccctgggctctgcggagaaggaacccgagcagcccccggccctgtggaggaaggttgtggacttcctgctgaaggccatcatgcgcaccatgtggttcgccggcggcttccaccgggtggccgtgaaggggcggcaggcgctgcccaccgaggcggccatcctcacgctcgcgcctcactcgtcctacttcgacgccatccctgtgaccatgacgatgtcctccatcgtgatgaaggcagagagcagagacatcccgatctggggaactctgatccagtatatacggcctgtgttcgtgtcccggtcagaccaggattctcgcaggaaaacagtagaagaaatcaagagacgggcgcagtccaacggaaagtggccacagataatgatttttccagaaggaacttgtacaaacaggacctgcctaattaccttcaaacctggtgcattcatccctggagcgcccgtccagcctgtggttttacgatatccaaataaactggacaccatcacatggacgtggcaaggacctggagcgctggaaatcctgtggctcacgctgtgtcagtttcacaaccaagtggaaatcgagttccttcctgtgtacagcccttctgaggaggagaagaggaaccccgcgctgtatgccagcaacgtgcggcgagtcatggccgaggccttgggtgtctccgtgactgactacacgttcgaggactgccagctggccctggcggaaggacagctccgtctccccgctgacacttgccttttagaatttgccaggctcgtgcggggcctcgggctaaaaccagaaaagcttgaaaaagatctggacagatactcagaaagagccaggatgaagggaggagagaagataggtattgcggagtttgccgcctccctggaagtccccgtttctgacttgctggaagacatgttttcactgttcgacgagagcggcagcggcgaggtggacctgcgagagtgtgtggttgccctgtctgtcgtctgccggccggcccggaccctggacaccatccagctggctttcaagatgtacggagcgcaagaggacggcagcgtcggcgaaggtgacctgtcctgcatcctcaagacggccctgggggtggcagagctcaccgtgaccgacctattccgagccattgaccaagaggagaaggggaagatcacattcgctgacttccacaggtttgcagaaatgtaccctgccttcgcagaggaatacctgtacccggatcagacacatttcgaaagctgtgcagagacctcacctgcgccaatcccaaacggcttctgtgccgatttcagcccggaaaactcagacgctgggcggaagcctgttcgcaagaagctggattaggacccagggttgcggagagacgcggcccctcccgcgtggacatcaccgccatgagcctctttgcgagtgacctctgggctccgctcctcactcctgctgtacaggcactgtcttcagcccgagttccaggggcctcgggggctgtttgtatcttgttcctttgtgaagtgtgttgcagaaccgacgcttactgtgcgagaatcggagggcgcgcacgcggatcccccgcctggcctggaccccgtggggtcaggttccctgccgggcggggggcaccggtgccgccccgtgttctcccacggggccctggtttcgagtctctgtcacagcctcttccggcggcagcgtgcaccgggcgggcctccgtgcacactcagcacacgcctgccacacagcgtgcgcttgcgtgtcactctggcacgaaacctgtctgcctctgtggatccacagcctggcagagccgagccgtcacctgatttttcagtgtttctacctgtgtgctggagctcatgagtattttataaactccatttaggtacttcaggaaacatgcagcattttttaaaaaatgaaaattgtttttctacttcatttttccttttagagtcaaaggatatttatttataggcctttttttttttaatatagaatctgaggctgtttgggctttgacttaaatttccatcaggcctctctccagcaggtaatccctctccttccgctgggtcccctggggaggtgtgaactcaagggcctagccccaaaacactttttctgcttttcttaatccttttccagtcccctctttttttataaacgttggcagtttgatgtttctgtttcggcataacgtaatccatttcactgtagcctaaactccagtccgaggttggatattgttcaaatgagcagggcccgagctggaagcgcaaggcagccgccgccgtgccgctcctcccttgccctcaggccaggtccctgctggaagcggctgcatcttcctgtcagccctggtttccatggtgactggcgtcacgctgccacccgagtatggctgaccttcctgcagagagaggagccgcagtcttttgcttgtggaaggagacgctgggctgtgcggtgcggagggtgatgaggatgtctggtgacagccgtgcggacaccactcctctctgcagcactgcctcccagcgccagggtcgcgggcacatcccactgagagcgggggtcctgccccatcttagagtcaaaggcagaggggcttccaggccctggatggggtattttggtgtcacctgaagtccctctgacatcaccttgtttcatcattttttatgacagaattagaaacccatccttcaagcacaataatcatcacagacttgagtttgcttcctaaagcaaaggctccgggtttgtttggaaaatttttttgatttctgaaatgaattgatttttatatttggggcatctctatagaaagtgaccaccaaggccagtaagtacgggaaaaaatgtttactaacttcctcagagattcgtgatacgcgtttctccactgacagacatttaaaaacaaccttcagctccgtttcaatcaatcacctcgacttgttttttagcatggacactgccagcaggacagacagggatggagtaaaccgaagtcaatttcagggctcttggcgtgttggacacagaagaaatcctagtgcagcctttggtagctaacagtcactgattttataattggagaatgcgtaaagattcatttttcaaggagaagagcctgcaaatggccaatgaaggaggtaaataaactaagatattccgagggaagggacccaggccacctcccttccgcaggtctgcagatgaagggttttttgaatgaaatgccactgtgcattttcagaaaaaaaaatctctgataaacagactttgaatggatgtttgttcctcctgattctcttttctcttcgtggcgacttagagttggcggatattcggaactgtgaatgtacatagcgttgagttaaaccccttgtgtgtgagacaggacgcagcgggcccctggtggcctgggggccagacccgtgggcaggtggggcatgggccctggcctgcggggacctgctggggtgtgagggcagagggagggttgccatgaaggaacttgggattttcaatggaataagtaaaacataaagtctatacttgggaatgat

SEQ ID NO: 217048 - DNA, 5610 bp, Artificial Sequence
  derived and/or modified sequence
ggcccgctccagccgccgcgcatcctcggcccgcgccccgagacccgcgcccagctagccccggccccgctcggcgccccaggcagctcggctgcgctcgccgcgggacggcgcggccatgaggctgcggggatgcggaccccgggccgcccctgcctccagcgcaggggccagcgacgctcggctgctggcgcccccggggcggaaccccttcgtgcacgagctgcgcctcagcgccctgcagaaggcccaggtggccctcatgacactgacgctcttcccggtccggctcctggttgccgctgccatgatgctgctggcctggcccctcgcacttgtcgcatccctgggctctgcggagaaggaacccgagcagcccccggccctgtggaggaaggttgtggacttcctgctgaaggccatcatgcgcaccatgtggttcgccggcggcttccaccgggtggccgtgaaggggcggcaggcgctgcccaccgaggcggccatcctcacgctcgcgcctcactcgtcctacttcgacgccatccctgtgaccatgacgatgtcctccatcgtgatgaaggcagagagcagagacatcccgatctggggaactctgatccagtatatacggcctgtgttcgtgtcccggtcagaccaggattctcgcaggaaaacagtagaagaaatcaagagacgggcgcagtccaacggaaagtggccacagataatgatttttccagaaggaacttgtacaaacaggacctgcctaattaccttcaaacctggtgcattcatccctggagcgcccgtccagcctgtggttttacgatatccaaataaactggacaccatcacatggacgtggcaaggacctggagcgctggaaatcctgtggctcacgctgtgtcagtttcacaaccaagtggaaatcgagttccttcctgtgtacagcccttctgaggaggagaagaggaaccccgcgctgtatgccagcaacgtgcggcgagtcatggccgaggccttgggtgtctccgtgactgactacacgttcgaggactgccagctggccctggcggaaggacagctccgtctccccgctgacacttgccttttagaatttgccaggctcgtgcggggcctcgggctaaaaccagaaaagcttgaaaaagatctggacagatactcagaaagagccaggatgaagggaggagagaagataggtattgcggagtttgccgcctccctggaagtccccgtttctgacttgctggaagacatgttttcactgttcgacgagagcggcagcggcgaggtggacctgcgagagtgtgtggttgccctgtctgtcgtctgccggccggcccggaccctggacaccatccagctggctttcaagatgtacggagcgcaagaggacggcagcgtcggcgaaggtgacctgtcctgcatcctcaagacggccctgggggtggcagagctcaccgtgaccgacctattccgagccattgaccaagaggagaaggggaagatcacattcgctgacttccacaggtttgcagaaatgtaccctgccttcgcagaggaatacctgtacccggatcagacacatttcgaaagctgtgcagagacctcacctgcgccaatcccaaacggcttctgtgccgatttcagcccggaaaactcagacgctgggcggaagcctgttcgcaagaagctggattaggacccagggttgcggagagacgcggcccctcccgcgtggacatcaccgccatgagcctctttgcgagtgacctctgggctccgctcctcactcctgctgtacaggcactgtcttcagcccgagttccaggggcctcgggggctgtttgtatcttgttcctttgtgaagtgtgttgcagaaccgacgcttactgtgcgagaatcggagggcgcgcacgcggatcccccgcctggcctggaccccgtggggtcaggttccctgccgggcggggggcaccggtgccgccccgtgttctcccacggggccctggtttcgagtctctgtcacagcctcttccggcggcagcgtgcaccgggcgggcctccgtgcacactcagcacacgcctgccacacagcgtgcgcttgcgtgtcactctggcacgaaacctgtctgcctctgtggatccacagcctggcagagccgagccgtcacctgatttttcagtgtttctacctgtgtgctggagctcatgagtattttataaactccatttaggtacttcaggaaacatgcagcattttttaaaaaatgaaaattgtttttctacttcatttttccttttagagtcaaaggatatttatttataggcctttttttttttaatatagaatctgaggctgtttgggctttgacttaaatttccatcaggcctctctccagcaggtaatccctctccttccgctgggtcccctggggaggtgtgaactcaagggcctagccccaaaacactttttctgcttttcttaatccttttccagtcccctctttttttataaacgttggcagtttgatgtttctgtttcggcataacgtaatccatttcactgtagcctaaactccagtccgaggttggatattgttcaaatgagcagggcccgagctggaagcgcaaggcagccgccgccgtgccgctcctcccttgccctcaggccaggtccctgctggaagcggctgcatcttcctgtcagccctggtttccatggtgactggcgtcacgctgccacccgagtatggctgaccttcctgcagagagaggagccgcagtcttttgcttgtggaaggagacgctgggctgtgcggtgcggagggtgatgaggatgtctggtgacagccgtgcggacaccactcctctctgcagcactgcctcccagcgccagggtcgcgggcacatcccactgagagcgggggtcctgccccatcttagagtcaaaggcagaggggcttccaggccctggatggggtattttggtgtcacctgaagtccctctgacatcaccttgtttcatcattttttatgacagaattagaaacccatccttcaagcacaataatcatcacagacttgagtttgcttcctaaagcaaaggctccgggtttgtttggaaaatttttttgatttctgaaatgaattgatttttatatttggggcatctctatagaaagtgaccaccaaggccagtaagtacgggaaaaaatgtttactaacttcctcagagattcgtgatacgcgtttctccactgacagacatttaaaaacaaccttcagctccgtttcaatcaatcacctcgacttgttttttagcatggacactgccagcaggacagacagggatggagtaaaccgaagtcaatttcagggctcttggcgtgttggacacagaagaaatcctagtgcagcctttggtagctaacagtcactgattttataattggagaatgcgtaaagattcatttttcaaggagaagagcctgcaaatggccaatgaaggagaaagacaacaacaggcattgtgagaggagagccaatccagatgagattttcttggtgtggttctagcatgtttggaaaacacaagaattgaaattctgtagaaaaagctgtcttggtggcaaagggacgctccggagtgttctggtattttgcggacagtagcagacatcttacagagttgaaacatggatggctggctgcctgcctgttctccactcagcattggagccaggagaaatgaaggtgggaccctcaggaaaaagcaaacccacccccggtgttcacgcaagagttgacacagctgcacctgctgctgccgtatgctgatcctaaccagaagctggctgggaggagaggccccctgggccatgaagcagagctcgggaatgtgagaagtggggctgagggcaaacggggtagtgaaggaccagcactgcccacccatagctgctctgtgtccacaagcaggtcagctgcagctctgctccatgtcaccatctgcatccagcccagcacagcagcccctcctgggactcagccagtcagatggctttgggaagaggtgacaagcaagcctgcctagatgctatatctgctgcacagacgcagaatacagcaggcccactcctggttcattggccacagtaagccatgtggtcacagctgaattcaacagccagagacgtacagtcctgcaagggagcccctcaaaggaggtgaaggatcttctgaacagcagcaccagccaccctgcagtaagtgttggatgtggtggtgagcagggccagtcctaattccacccattgacattacagacattattctggctatgaaatggtgccatgtcttggtccacagttcgaggcactatgtcatccatcaggatggcagtccaatgttctagggcactgcctccccatgggcagcacacctaaagcttcaagaagtcatcctcatgcttaatcagactcgccacctctgggtgatgggaaacgtagggattccaagtgtgtacctgttcccatgctgcctttgctgtaaagtaaattccttaacaatgccataggaggtgggcaatagtgaataagccattcatcaagcccacagatggtgctgtcagaaacactgacagcaaagacatatccatatctggaataagggaaactgaaaccaagagatactcccctcaatgatggaagagtccagtgtgatcaacctgcctccagggggctggctagtccctttcccaggaatggtacctggggctaagtatgggaccctgcttccgacatgttgggagtccagtgataactgcatcagcctaggctattgttgatgggtcagctctttgttattgatccacactcatctccatccctatttccagtgccagtttgtgaatggttctactaggtaaacactgggttggctgggaaagagacaggctgacatccactgcctgtgtcataccctggcagagactatagtaaattagacccgacaagagaaaatattagtgaacctgaaaatacagctatgtgtgatcccagtgatgtacagggagaaacagacagaaatgaagcacaagtgggcatggaataatgccacaaggcccatcacatgtgattggagccctagaaaaggaggaggacaggacagaaaaattatttgatgaaataatggccagaatttttttccaaatctataaactaagatacccaagaagctcaataagcacccagcagaaaaaatacaataaaaacacagcaagacacacatcacaaactgctgaaagccactgaaaaggagaaaaatcttaaaagcagctggagaaaaacaacatactatcaaggaacagagataagaatgaaagccaacttctcttcagaaactatgcaacccagacgtcaaggaacagagataagaacgacagccgacttctctgcagaaactatgcaacccagacgtcaaggaacagagataagaacgacagccgacttctctgcagaaactatgcaacccagacgtcaaggaacagagataagaacgacagccgacttctctgcagaaactatg

SEQ ID NO: 217049 - DNA, 1605 bp, Artificial Sequence
  derived and/or modified sequence
atgcggctgcggggctgcggcccccgggccgcccccgccagcagcgccggtgcttcggacgccaggttgctggcaccccctggccggaacccttttgtccacgagctacgactctctgcactgcaaaaagcacaggtagccttgatgaccctaacattgttcccagttagactcttggtcgcagcagctatgatgcttctcgcatggcccttggcacttgttgcttcccttggctcagcggaaaaggagccggagcaaccacctgctctctggcgcaaggtggtcgactttttgctgaaggcaattatgcgcacaatgtggtttgcagggggctttcaccgggtcgccgtgaagggtcgacaggcactgcctaccgaagcagccattctcaccctggcgccccactcctcctacttcgatgccatccctgtgactatgactatgagctcaatcgtcatgaaggctgagtcaagggatattccgatctgggggacactcattcagtacatcagacctgtcttcgttagccggagcgaccaggactccagaaggaagacagtggaagagataaaacgcagggcccaatccaatggtaaatggccccagatcatgatattcccagagggcacttgcactaacaggacctgtctgatcacctttaaaccgggggccttcatcccaggtgcgcctgtccagcctgtggtactccggtaccccaataaactcgatacgattacttggacctggcaggggcctggtgctctggaaattttgtggcttactctgtgtcagttccataaccaggtggaaattgagtttttgcctgtgtacagcccttctgaggaagagaagcgcaacccagcgctgtatgcctcaaatgtgcggcgcgtgatggccgaagccttgggtgtctccgtcacagattatacttttgaagattgccagttggcactggccgaagggcagctcagacttcctgctgacacttgcctgcttgagttcgcccggctagttcgcgggttgggccttaagcccgagaagctggagaaagatctggaccgatacagtgaacgcgcacgtatgaagggtggagagaagattgggatcgcagagttcgctgcctcattggaggttccagtcagcgacctgctcgaggatatgttcagcctgtttgacgagtccggatccggcgaggtcgacctgcgtgagtgcgtagtggccctgtccgtggtctgtaggcccgctcgtaccctggacacaatccaactggcattcaaaatgtatggcgctcaggaagatggatcagtgggcgaaggagacctgtcatgcattcttaagacagcacttggagtggccgaactgaccgtgactgatttattcagagccatcgaccaggaggaaaaaggaaaaatcaccttcgccgactttcaccgctttgccgaaatgtaccctgcatttgcggaggagtacttgtaccctgaccagacacactttgagtcatgcgccgaaacttcacctgccccaattccaaacgggttctgtgcagatttctccccggagaatagcgatgccgggcgaaaaccagtcagaaagaagctcgattag

SEQ ID NO: 217050 - DNA, 1605 bp, Artificial Sequence
  derived and/or modified sequence
atgcggctgcggggctgcggcccccgggccgcccccgccagcagcgctggcgcatctgacgcacgcctgctcgctcctccggggagaaatccatttgtccatgaactgcgactaagtgcactccaaaaagcccaggtggcactcatgactctcactctctttcccgtgcggctgttggtggccgccgctatgatgctgttggcatggcctcttgcactcgtggcctctctcggttccgctgagaaagaaccagagcaaccaccagcgctctggagaaaggtggttgatttcctgctgaaggctatcatgcggacgatgtggtttgcaggaggctttcatagggtggcagtgaagggacgtcaggcattgcccaccgaggctgctattctgacgttagcacctcatagttcctatttcgacgctatccccgtcactatgacaatgtcctcaattgtcatgaaggccgaatcacgggatatcccgatctggggaactcttatccaatacatccggccagtatttgtttcacgctctgaccaggactctaggcggaaaaccgtagaggagattaaacgtagggctcagtcaaatgggaagtggccacagatcatgatatttcccgaaggcacctgtaccaatagaacttgcctgattacatttaagcccggtgcctttatacctggcgctccagtccagcccgtagttctgcgatacccaaacaagctcgacaccatcacctggacgtggcaaggccccggagctctggagatcctctggctaacattgtgccagtttcataaccaggttgaaatagagttcttgcctgtgtattcaccttctgaggaggagaagcgcaatcctgccttgtatgcctccaatgtacgacgcgttatggcggaggccctgggagtatccgtgacggactacactttcgaggactgccaactagccttagctgaaggccagctgcgtctccctgctgacacctgtcttctggagttcgctagactggtaagaggcctgggtctgaagcccgagaagctggagaaagatctcgatcgatactctgagcgggcccgaatgaaaggaggggagaagatcggtatcgcagaatttgctgccagtttggaggtacccgtgtcagatcttcttgaggacatgttctcactgttcgatgaaagtggaagtggcgaagtcgatctgcgcgagtgcgtggtcgcactcagcgtggtctgtcggcccgcccgcacactggacaccattcaactggcctttaagatgtatggggcacaagaagacggaagcgtgggcgagggggacctgagttgcattctgaaaaccgccctgggcgtcgcggagttgacggtgacggatttatttcgcgcaatcgaccaggaggagaaaggcaaaataaccttcgctgacttccatcggtttgctgaaatgtaccctgcatttgctgaagagtacttgtatcccgaccagacccactttgaatcttgcgccgagacatctcccgccccgatcccgaatggcttctgcgctgattttagtcctgagaattcagacgctggacgtaagcctgtccgcaagaagctggactag

SEQ ID NO: 217051 - DNA, 1605 bp, Artificial Sequence
  derived and/or modified sequence
atgagactgcgaggatgcgggccacgcgctgcaccagctagtagtgcaggggcttcagatgcgaggctgttggcgcctcccggtcggaatcctttcgtccatgaactcagactgagcgctctccagaaagcacaggtcgctctgatgaccttaacactgtttcctgtgagactgctggttgcggctgctatgatgttactcgcttggcctctggctttggtggccagcctcggctccgcagaaaaggagcctgaacagccacctgcactttggcggaaagtcgtggactttctgttaaaagccatcatgagaacaatgtggttcgctggaggctttcatcgggtggcggttaaggggaggcaggcccttcctacagaggccgctatccttactttggctccccactccagctacttcgatgccattccggttacgatgaccatgagctccatcgtcatgaaagctgaaagccgcgacattcccatctggggcacactaattcagtacatccggccagtcttcgtgtctcgttctgatcaggactcacggcgtaagacagtggaggagattaagaggagggcccagagcaacggaaaatggccacagattatgatctttccagaagggacatgcactaatcgaacttgtctcatcactttcaagcccggagcattcatcccaggggctcccgtgcagcccgtggtgcttcgctatcctaataaactggacacgatcacatggacttggcagggtcccggtgcgcttgagatcctctggctgacgctctgccagttccataatcaagtagagattgagtttttgcctgtctacagccccagcgaggaggagaaaagaaaccctgctctgtacgcttccaacgtaagaagggtcatggccgaagccctcggtgtgtccgtgacagactatactttcgaggattgccaactggccctggctgaaggacagcttagattgccagccgacacttgccttctcgagttcgctcgtctcgtcaggggcctgggtctgaaacccgagaaactggaaaaagatctcgacagatattctgagagggcacgaatgaaggggggagagaagattggaattgccgagttcgctgctagcctggaagttccagtctctgacttgctcgaggatatgttctccttgttcgatgaatccgggagcggggaagtggacctccgcgaatgcgtggtggcactgtctgtggtgtgcagacccgctcgaactctggacactattcagctggccttcaaaatgtatggagcccaggaggatggctccgtaggcgagggagatttgtcttgtattctaaagacagccctgggggtggcagagctcactgttactgatctttttagagccatcgatcaggaagagaagggtaagattaccttcgctgacttccaccgattcgcagagatgtatccagccttcgccgaggagtacctgtatcccgatcagacacactttgaatcatgcgcggagacttctccggctcccattcctaatggtttttgcgcagactttagtcccgagaattcagatgcaggacggaagcccgtaagaaagaagctcgactag

SEQ ID NO: 217052 - DNA, 1605 bp, Artificial Sequence
  derived and/or modified sequence
atgcggctccgcggatgtgggccaagggccgcacctgcatcctcggctggagccagcgatgcgagattactggcccctccaggccgtaatcccttcgtgcacgaactgcgactgagtgcccttcagaaggcccaagtggccctgatgactctcactctgtttcccgtgagattactggtcgccgcagcaatgatgctgctggcctggccccttgcactggtcgccagcttggggtccgcagagaaggaacccgaacagccgcctgcactgtggaggaaggtcgtggatttcttgttaaaggccataatgcgcaccatgtggtttgctggaggattccaccgagtggcagtgaagggaaggcaggctcttccaacggaagctgcaatcctgacgctcgcaccccatagctcctacttcgacgctattccggttacaatgacaatgtcctccatagtgatgaaggcagagtccagagatattcctatctggggaacactgattcaatacatccgtcccgtattcgtgagccgctcagatcaggacagtaggaggaaaactgttgaagaaataaagagaagggctcaatcaaatggcaaatggccccagatcatgatcttcccggaaggaacgtgtactaacaggacatgtttgattacctttaagcccggagcctttatacctggtgcgcctgtccagcctgtagtgttgaggtacccaaacaaactggatacaatcacttggacgtggcaaggccctggagctttggaaatactgtggctgaccctgtgtcagtttcataaccaggtcgagattgaatttttgccagtgtacagtccaagcgaagaggaaaagagaaatccggcactgtacgccagcaatgtcaggagagtgatggccgaggcgctgggagtgagcgtgactgactatacatttgaggattgccaattagcgctcgccgaggggcagctccgactgccagctgacacctgtctcctcgaatttgccaggctcgtacgaggactcggccttaaacccgagaagttggagaaggacctcgaccgctatagcgagcgggcaaggatgaagggcggtgaaaagatcggcattgctgaatttgccgcttccctggaggtgccagtgtccgatctcctggaagacatgttctctttgtttgatgaatcaggatctggcgaggtggacctgcgcgaatgtgtggtcgccttgtctgttgtttgccgccctgcccgaactctggataccatccagttagcttttaagatgtacggggctcaagaagatggatctgttggggaaggagatctgtcatgcatcctgaaaaccgctctgggggtggccgaactgacagtcacggatctcttcagagccatcgaccaggaggagaaaggaaagatcacattcgccgacttccaccggtttgcagagatgtatccggcatttgcagaagaatacctgtatccggatcagactcattttgagagctgcgccgagactagccccgctcccatccctaacgggttttgtgcggacttttctccggagaatagcgacgcgggtcgcaagccagtccgcaaaaaactggattag

SEQ ID NO: 217053 - DNA, 1605 bp, Artificial Sequence
  derived and/or modified sequence
atgagactgagaggctgcggccccagagccgcccccgccagcagcgccggcgccagcgacgccagactgctggccccccccggcagaaaccccttcgtgcacgagctgagactgagcgccctgcagaaggcccaggtggccctgatgaccctgaccctgttccccgtgagactgctggtggccgccgccatgatgctgctggcctggcccctggccctggtggccagcctgggcagcgccgagaaggagcccgagcagccccccgccctgtggagaaaggtggtggacttcctgctgaaggccatcatgagaaccatgtggttcgccggcggcttccacagagtggccgtgaagggcagacaggccctgcccaccgaggccgccatcctgaccctggccccccacagcagctacttcgacgccatccccgtgaccatgaccatgagcagcatcgtgatgaaggccgagagcagagacatccccatctggggcaccctgatccagtacatcagacccgtgttcgtgagcagaagcgaccaggacagcagaagaaagaccgtggaggagatcaagagaagagcccagagcaacggcaagtggccccagatcatgatcttccccgagggcacctgcaccaacagaacctgcctgatcaccttcaagcccggcgccttcatccccggcgcccccgtgcagcccgtggtgctgagataccccaacaagctggacaccatcacctggacctggcagggccccggcgccctggagatcctgtggctgaccctgtgccagttccacaaccaggtggagatcgagttcctgcccgtgtacagccccagcgaggaggagaagagaaaccccgccctgtacgccagcaacgtgagaagagtgatggccgaggccctgggcgtgagcgtgaccgactacaccttcgaggactgccagctggccctggccgagggccagctgagactgcccgccgacacctgcctgctggagttcgccagactggtgagaggcctgggcctgaagcccgagaagctggagaaggacctggacagatacagcgagagagccagaatgaagggcggcgagaagatcggcatcgccgagttcgccgccagcctggaggtgcccgtgagcgacctgctggaggacatgttcagcctgttcgacgagagcggcagcggcgaggtggacctgagagagtgcgtggtggccctgagcgtggtgtgcagacccgccagaaccctggacaccatccagctggccttcaagatgtacggcgcccaggaggacggcagcgtgggcgagggcgacctgagctgcatcctgaagaccgccctgggcgtggccgagctgaccgtgaccgacctgttcagagccatcgaccaggaggagaagggcaagatcaccttcgccgacttccacagattcgccgagatgtaccccgccttcgccgaggagtacctgtaccccgaccagacccacttcgagagctgcgccgagaccagccccgcccccatccccaacggcttctgcgccgacttcagccccgagaacagcgacgccggcagaaagcccgtgagaaagaagctggactag

SEQ ID NO: 217054 - protein, 853 aa, Artificial Sequence
  derived and/or modified sequence
MCCEKWSRVAEMFLFIEEREDCKILCLCSRAFVEDRKLYNLGLKGYYIRDSGNNSGDQATEEEEGGYSCGTAESHDSKGIGLDESELDSEAELMRSMGLPLQFGRITAHKDFEVSMNTRNKVKIKKKKHQKKYLDEIVQESWRKEYEEDDILASDDPSSIEQYENTRTYELQSKKDTETENPPVENTLSPKLEITEKWEKYWNEYGGGLLWQSWQEKHPGQALSSEPWNFPDTKEEWEQHYSQLYWYYLEQFQYWEAQGWTFDASQSCDTDTYTSKTEADDKNDEKCMKVDLVSFPSSPIMVDNDSSGTSDKDHSEILDGISNIKLNSEEVTQSQLDSCTSHDGHQQLSEVSSKRECPASGQSEPRNGGTNEESNSSGNTNTDPPAEDSQKSSGANTSKDRPHASGTDGDESEEDPPEHKPSKLKRSHELDIDENPASDFDDSGSLLGFKYGSGQKYGGIPNFSHRQVRYLEKNVKLKSKYLDMRRQIKMKNKHIFFTKESEKPFFKKSKILSKVEKFLTWVNKPMDEEASQESSSHDNVHDASTSSDSEEQDMSVKKGDDLLETNNPEPEKCQSVSSAGELETENYERDSLLATVPDEQDCVTQEVPDSRQAETEAEVKKKKNKKKNKKVNGLPPEIAAVPELAKYWAQRYRLFSRFDDGIKLDREGWFSVTPEKIAEHIAGRVSQSFKCDVVVDAFCGVGGNTIQFALTGMRVIAIDIDPVKIALARNNAEVYGIADKIEFICGDFLLLASFLKADVVFLSPPWGGPDYATAETFDIRTMMSPDGFEIFRLSKKITNNIVYFLPRNADIDQVASLAGPGGQVEIEQNFLNNKLKTITAYFGDLIRRPASET

SEQ ID NO: 217055 - DNA, 2562 bp, Artificial Sequence
  derived and/or modified sequence
atgtgctgcgagaagtggagcagagtggccgagatgttcctgttcatcgaggagagagaggactgcaagatcctgtgcctgtgcagcagagccttcgtggaggacagaaagctgtacaacctgggcctgaagggctactacatcagagacagcggcaacaacagcggcgaccaggccaccgaggaggaggagggcggctacagctgcggcaccgccgagagccacgacagcaagggcatcggcctggacgagagcgagctggacagcgaggccgagctgatgagaagcatgggcctgcccctgcagttcggcagaatcaccgcccacaaggacttcgaggtgagcatgaacaccagaaacaaggtgaagatcaagaagaagaagcaccagaagaagtacctggacgagatcgtgcaggagagctggagaaaggagtacgaggaggacgacatcctggccagcgacgaccccagcagcatcgagcagtacgagaacaccagaacctacgagctgcagagcaagaaggacaccgagaccgagaacccccccgtggagaacaccctgagccccaagctggagatcaccgagaagtgggagaagtactggaacgagtacggcggcggcctgctgtggcagagctggcaggagaagcaccccggccaggccctgagcagcgagccctggaacttccccgacaccaaggaggagtgggagcagcactacagccagctgtactggtactacctggagcagttccagtactgggaggcccagggctggaccttcgacgccagccagagctgcgacaccgacacctacaccagcaagaccgaggccgacgacaagaacgacgagaagtgcatgaaggtggacctggtgagcttccccagcagccccatcatggtggacaacgacagcagcggcaccagcgacaaggaccacagcgagatcctggacggcatcagcaacatcaagctgaacagcgaggaggtgacccagagccagctggacagctgcaccagccacgacggccaccagcagctgagcgaggtgagcagcaagagagagtgccccgccagcggccagagcgagcccagaaacggcggcaccaacgaggagagcaacagcagcggcaacaccaacaccgacccccccgccgaggacagccagaagagcagcggcgccaacaccagcaaggacagaccccacgccagcggcaccgacggcgacgagagcgaggaggacccccccgagcacaagcccagcaagctgaagagaagccacgagctggacatcgacgagaaccccgccagcgacttcgacgacagcggcagcctgctgggcttcaagtacggcagcggccagaagtacggcggcatccccaacttcagccacagacaggtgagatacctggagaagaacgtgaagctgaagagcaagtacctggacatgagaagacagatcaagatgaagaacaagcacatcttcttcaccaaggagagcgagaagcccttcttcaagaagagcaagatcctgagcaaggtggagaagttcctgacctgggtgaacaagcccatggacgaggaggccagccaggagagcagcagccacgacaacgtgcacgacgccagcaccagcagcgacagcgaggagcaggacatgagcgtgaagaagggcgacgacctgctggagaccaacaaccccgagcccgagaagtgccagagcgtgagcagcgccggcgagctggagaccgagaactacgagagagacagcctgctggccaccgtgcccgacgagcaggactgcgtgacccaggaggtgcccgacagcagacaggccgagaccgaggccgaggtgaagaagaagaagaacaagaagaagaacaagaaggtgaacggcctgccccccgagatcgccgccgtgcccgagctggccaagtactgggcccagagatacagactgttcagcagattcgacgacggcatcaagctggacagagagggctggttcagcgtgacccccgagaagatcgccgagcacatcgccggcagagtgagccagagcttcaagtgcgacgtggtggtggacgccttctgcggcgtgggcggcaacaccatccagttcgccctgaccggcatgagagtgatcgccatcgacatcgaccccgtgaagatcgccctggccagaaacaacgccgaggtgtacggcatcgccgacaagatcgagttcatctgcggcgacttcctgctgctggccagcttcctgaaggccgacgtggtgttcctgagccccccctggggcggccccgactacgccaccgccgagaccttcgacatcagaaccatgatgagccccgacggcttcgagatcttcagactgagcaagaagatcaccaacaacatcgtgtacttcctgcccagaaacgccgacatcgaccaggtggccagcctggccggccccggcggccaggtggagatcgagcagaacttcctgaacaacaagctgaagaccatcaccgcctacttcggcgacctgatcagaagacccgccagcgagacctag

SEQ ID NO: 217056 - DNA, 2562 bp, Artificial Sequence
  derived and/or modified sequence
atgtgctgcgaaaaatggagtcgggtggccgagatgttcttatttatagaggagcgggaggattgtaagatcctgtgtctgtgttcacgggccttcgttgaagacaggaaactgtataatctgggattaaaggggtactacattcgcgattcgggaaataattctggggaccaagcaacagaggaagaagaagggggctactcatgcggaacagccgagagtcatgacagcaaaggcattggtctggacgagtcggaactcgactctgaagctgagcttatgcggtctatgggtctccctttgcagttcgggaggattacagcccacaaggattttgaggtgagcatgaatactcgtaacaaggttaaaattaaaaaaaaaaaacaccaaaaaaagtatttggacgagatcgttcaggagagctggagaaaggagtatgaggaggacgacatcttggcttccgacgatcctagctcgatcgagcagtatgagaacacccgcacatacgaactgcagtccaagaaagacactgagaccgaaaacccaccagtggagaatactctgtcacccaagttggaaattacagaaaagtgggagaagtattggaatgaatacgggggcggcttgttgtggcagtcatggcaggaaaagcatcccggccaagcccttagctccgagccgtggaattttcccgacactaaggaagagtgggaacaacactacagtcagctatattggtattatctcgagcagttccaatattgggaggcacagggctggaccttcgacgcctctcagtcttgcgatactgacacctacaccagtaaaacggaggcagacgataagaatgatgaaaaatgcatgaaggtcgacctggtttccttcccgagcagccctatcatggtagacaatgactcctctgggacgtccgataaggaccattccgaaattctcgatggtataagcaacataaaattgaattctgaagaagtgactcagagccagctcgactcctgcaccagtcacgatggccatcagcaattgtctgaggtgtcttcaaagcgcgaatgtccagcatcggggcagtctgaaccccgcaacggaggtaccaacgaagaatctaattcctcaggcaatactaatactgacccacccgcagaggactcacagaagagcagcggggccaatacgtccaaagatcgccctcacgcctctggtactgatggggacgaaagcgaggaagatccgcctgaacataagcccagcaagttgaagcggagccatgagctggacatcgatgaaaacccggctagcgattttgacgatagcggcagtcttctcggtttcaagtacggttccggccagaagtacggtggaatccctaacttctcccaccggcaggtgcggtatctcgagaaaaacgtgaaactcaaaagcaagtatctagacatgagaaggcaaataaagatgaaaaacaaacacatcttcttcaccaaggagtccgagaaacctttcttcaaaaaatctaaaatcctgtctaaagtggagaaatttctgacgtgggtgaataagccgatggatgaagaagcgtcccaggaatcctcgtctcacgacaacgtgcatgatgcctctacaagcagcgatagcgaggagcaggatatgagcgtaaagaaaggggatgaccttctggaaactaataatccagaacctgaaaagtgccagagtgtgtcaagcgctggagagctggagacagaaaactatgaacgagactcactgctggcgacagtgcctgatgaacaagactgtgtgacccaggaagtcccggattcacgccaggctgaaacagaagccgaagtgaagaagaagaagaacaagaagaaaaacaagaaagttaatggactcccacccgagatagctgcggtccccgagttagctaaatactgggcccaacggtaccgcttgttctctcggtttgacgatggtatcaaactggatcgtgagggctggttttctgtgacccctgagaaaattgctgagcatatagccggccgggtgagccagtcgtttaagtgcgacgtggtagtggacgctttctgcggggtgggaggcaacactatccaattcgctctaacaggcatgcgagtgatcgctatcgacatagatcccgtgaagattgctctcgcacgtaacaacgctgaggtgtatggtattgctgataagattgaatttatctgtggcgattttttgttacttgccagcttcttgaaggctgatgtggtgttcttgtctcctccttggggaggacccgattatgctactgctgagactttcgatatccggacgatgatgagtccagacggattcgagatcttccggctgagcaagaagattaccaataacatagtgtatttcctgcctcgcaatgctgatatcgatcaggtagcctcccttgcagggcctgggggccaggttgaaattgagcagaacttccttaataataagttgaagacaattaccgcgtacttcggcgatttgattagacggcctgcgagcgagacgtag

SEQ ID NO: 217057 - DNA, 2562 bp, Artificial Sequence
  derived and/or modified sequence
atgtgctgtgagaagtggagccgggtggccgagatgttcctgttcatcgaggagcgggaggactgcaagatcctgtgcctgtgcagccgggcctttgtggaggacaggaagctgtacaacctgggcctgaagggctactacatccgggacagcggcaacaacagcggggaccaggccacagaggaggaggagggcggctacagctgtggcacagctgagagccatgacagcaagggcatcggcctggatgaaagtgagctggacagcgaggccgagctgatgaggtccatgggcctgcccctgcagtttggccgcatcacagcccacaaggactttgaggtgtccatgaacaccaggaacaaggtgaagatcaagaagaagaagcaccagaagaagtacctggatgaaattgtgcaggagagctggaggaaggagtatgaggaggatgacatcctggccagtgatgaccccagcagcattgagcagtatgagaacaccaggacctatgagctgcagagcaagaaggacacagaaacagagaacccccctgtggagaacaccctgagccccaagctggagatcacagagaagtgggagaagtactggaatgaatatggaggcggcctgctgtggcagagctggcaggagaagcaccctggccaggccctgagcagcgagccctggaacttcccagacaccaaggaggagtgggagcagcactacagccagctgtactggtactacctggagcagttccagtactgggaggcccagggctggacctttgatgccagccagagctgtgacacagacacctacaccagcaagacagaagcagatgacaagaatgatgagaagtgcatgaaggtggacctggtgtccttccccagcagccccatcatggtggacaatgacagcagcggcaccagtgacaaggaccacagcgagatcctggatggcatcagcaacatcaagctgaacagcgaggaggtgacccagagccagctggacagctgcaccagccatgatggccaccagcagctgtctgaggtgagcagcaagcgggagtgcccagccagcggccagagcgagcccagaaatggaggcaccaatgaggagagcaacagcagcggcaacaccaacacagaccccccagctgaggacagccagaagagcagcggggccaacaccagcaaggaccggccccacgccagcggcacagatggagatgagagcgaggaggaccccccagagcacaagcccagcaagctgaagaggagccatgagctggacattgatgagaacccagccagtgactttgatgattctggcagcctgctgggcttcaagtatggcagcggccagaagtatggaggcatccccaacttcagccaccggcaggtgcgctacctggagaagaatgtgaagctgaagagcaagtacctggacatgaggcggcagatcaagatgaagaacaagcacatcttcttcaccaaggagagcgagaagcccttcttcaagaagagcaagatcctgagcaaggtggagaagttcctgacctgggtgaacaagcccatggatgaggaggccagccaggagagcagcagccatgacaacgtgcatgatgccagcaccagcagtgacagcgaggagcaggacatgtctgtgaagaagggagatgacctgctggagaccaacaaccctgagcctgagaagtgccagagcgtgagcagcgctggggagctggagacagaaaattatgagcgggacagcctgctggccaccgtgcctgatgagcaggactgtgtgacccaggaggtgcctgacagccggcaggccgagacagaagctgaggtgaagaagaagaagaacaagaagaagaacaagaaggtgaatggcctgcccccagaaattgctgctgtgcctgagctggccaagtactgggcccagcgctaccgcctcttcagcagatttgatgatggcatcaagctggaccgggagggctggttctctgtgaccccagagaagattgctgagcacatcgccggccgggtgtcccagagcttcaagtgtgatgtggtggtggatgccttctgtggggtgggcggcaacaccatccagtttgccctgaccggcatgagggtcatcgccatcgacatcgaccctgtgaagatcgccctggccagaaataatgctgaggtgtatggaattgctgacaagattgagttcatctgtggggacttcctgctgctggccagcttcctgaaggcagatgtggtgttcctgagccccccctggggcggccctgactatgccacagctgagacctttgacatccgcaccatgatgagcccagatggctttgagatcttccggctgagcaagaagatcaccaacaacatcgtgtacttcctgcccagaaatgctgacatcgaccaggtggccagcctggccggccctgggggccaggtggagattgagcagaacttcctgaacaacaagctgaagaccatcacagcctactttggagacctgatcagaagacctgccagcgagacctag

SEQ ID NO: 217058 - DNA, 2562 bp, Artificial Sequence
  derived and/or modified sequence
atgtgctgcgagaagtggagccgggtggccgagatgttcctgttcatcgaagagagggaggattgtaagattctttgcctatgcagtagggcctttgtggaggatagaaagctgtataacctaggtctgaagggatattacatccgagattcaggcaacaattccggggatcaagcaacagaagaggaagagggaggatactcatgcgggaccgccgaatcccatgactcgaaaggaatcgggctcgatgaaagcgagctggattccgaggctgagttgatgcgctccatgggacttccactccagtttgggcgcatcaccgcccacaaagattttgaggtcagtatgaatactcgcaataaggtcaagataaagaaaaagaagcaccagaagaaatatctagatgagatcgtccaggaaagctggcgaaaggaatacgaggaggatgatattctagcatcagacgatccttcatctattgaacaatacgaaaacacaaggacgtacgagttgcagtccaagaaagacactgaaacagaaaacccacccgtggagaacactctgtccccaaagcttgagatcacggagaaatgggaaaaatactggaacgagtacggtgggggcctcctgtggcagtcctggcaggagaagcatcccggccaggcactgagtagtgagccctggaacttccccgataccaaggaggagtgggagcaacattattcacaattgtactggtactacttagagcagttccagtactgggaagcacagggatggacgttcgacgcctctcagtcttgtgatactgacacgtacacctctaagaccgaagccgatgataagaatgacgaaaaatgtatgaaagtcgatctcgtgtcattcccatccagtcccattatggtcgataatgacagctcaggaacttctgacaaggatcattctgaaatcctggacggaatcagcaatattaaactaaatagcgaggaggtgactcagtctcagctggatagctgcacctcacacgatggccaccagcagctgtcagaggtgtcatctaaaagagagtgccccgcttcaggtcagtcagaaccccgcaacggagggacaaatgaggaatccaacagttccggaaataccaacacagatcccccagcggaagacagtcagaagagctcaggcgcgaatactagcaaggatcggccgcatgcctccggcacagacggcgatgagagcgaggaggatcccccagagcacaaaccttcaaaactaaaaagatcccacgagctggatatcgacgaaaatcccgcctctgatttcgacgattcagggtctctgcttggcttcaagtatggatctggccagaagtacgggggcattcccaacttttctcaccgccaggtaagataccttgagaagaacgtgaaactcaaatccaaatacttggatatgcggcggcaaataaaaatgaaaaacaagcacatcttcttcactaaggaatctgagaagcccttctttaagaagtcaaagatcctctccaaagtcgaaaaattcctgacttgggtgaacaagccaatggacgaagaagcttcccaagagtcatcctcacacgataacgtccacgatgccagcacatcttccgattcagaggaacaggatatgagtgtgaaaaagggcgatgacttgcttgaaactaacaacccagaacccgagaagtgccagtctgtgagcagcgccggggagctggagacagagaactatgagcgggacagcctcctggctacagtccccgatgaacaggactgtgtcacccaggaagtgccggatagtcgccaagcggagacagaggctgaagtcaaaaaaaagaaaaataagaaaaagaacaagaaggtgaacggactgccaccagagattgccgccgtccccgagctcgcaaaatactgggcacagagatatagattgttctctcgctttgatgacgggattaaactggacagagaaggctggttctccgttacacccgagaagatcgcggaacatatcgcagggagagtttcgcaatctttcaagtgtgatgtagtcgtagatgcattctgcggcgtcggcggaaacacaattcagttcgccctgacggggatgcgcgtcatagctattgacatcgaccctgtgaaaatcgcattggcccgaaacaacgccgaagtgtacgggatcgctgacaaaatcgaattcatatgcggagatttcttgctgctggcatcatttttgaaagccgacgttgtgttcctctcacctccttggggcggacccgattatgccaccgcagagactttcgatattagaacaatgatgtcccctgatggctttgaaatctttagactcagcaaaaagattactaacaatatcgtgtactttctgccgaggaacgctgatatcgatcaggtggcaagtctggccggcccaggggggcaggtggagattgagcaaaattttctgaacaacaagctgaagactatcacagcgtacttcggcgacctgattaggcggccagccagcgaaacctag

SEQ ID NO: 217059 - DNA, 2562 bp, Artificial Sequence
  derived and/or modified sequence
atgtgttgcgagaagtggtccagggtcgctgagatgtttctttttatcgaggaacgcgaagattgtaagattctgtgcttgtgttcccgggcatttgtagaagacaggaagctgtacaacttgggccttaaaggatactacattagggattcaggtaacaattcaggagaccaggccaccgaagaagaagagggcggatactcttgcggaactgcagagagtcacgactctaagggtattggattggatgagagcgaactggattctgaggctgagttaatgaggagtatgggcctgccactccagtttggacgaattaccgcacataaggactttgaagttagcatgaacactagaaacaaggtgaagattaagaagaagaagcaccaaaagaaatacctggacgaaattgtccaagagagttggaggaaagaatatgaggaagacgatattctagcctctgatgacccctcgtccattgagcagtatgaaaatacccgaacttacgagctgcagagtaagaaggataccgagactgagaaccctccagtcgagaatacattatccccgaagctggagattaccgaaaaatgggagaagtactggaatgagtacggaggcggactgctgtggcagtcttggcaggaaaaacaccccggacaggctctgtcttctgagccatggaactttccagacactaaggaagagtgggagcagcattacagccaactgtattggtattacctcgaacaattccagtactgggaagcccagggatggacgtttgatgcttctcagagttgcgacacggatacctataccagcaagaccgaggcagacgataaaaatgacgaaaagtgcatgaaagtggacctcgtttcctttccatccagtccaattatggtggataatgactcttccggtacctctgacaaagaccattccgagattctggacgggatttctaatatcaagcttaactctgaagaggtcacccaatctcaactggacagttgtacgagtcacgacgggcaccagcagctgtctgaggtttcgagtaaaagggagtgtcctgctagcggtcaatctgagcctcgtaatggtgggacaaacgaggagtcaaactcttctgggaataccaatacagatccaccagccgaagattcccagaagtcttccggtgcaaatacctcaaaggaccggccacacgcatccggtacagatggcgacgagtctgaggaggacccccctgagcacaagccttcaaaactgaaaaggagtcatgaactggacattgacgagaaccctgcatcagattttgacgacagtggctcactgctgggcttcaaatatggttccggccagaagtacggaggaatccccaacttcagtcataggcaggttcggtacctggaaaagaatgttaaactcaaatccaagtacttggatatgcggagacagatcaaaatgaagaataagcatatttttttcacaaaagagagtgaaaagcctttctttaagaaatctaaaatcttgagtaaagtagagaagtttctcacctgggtaaataagccaatggatgaagaggcttctcaggagtcctcatcccacgacaacgtgcacgacgcctccacctcatctgatagcgaggaacaagatatgtccgttaagaaaggcgacgatctcctggaaaccaacaatcccgaaccggaaaagtgccagagcgtctctagcgcgggagagttggaaaccgaaaattatgaaagagactcactcctggctaccgtgccggatgaacaggattgtgtgactcaagaggtccctgacagcaggcaggcagagaccgaggctgaagtcaaaaagaagaaaaataaaaagaaaaacaaaaaagtaaacggcctgcctccagagatagctgccgtgccagagctggcgaagtactgggcacagagatatcgactcttttccaggtttgacgacgggattaaattagatcgcgagggttggttttccgtgacaccggaaaagatcgctgagcacattgcaggcagggtgagtcagtcctttaagtgtgacgttgtagtggacgctttctgcggagtgggcggaaacaccatccagtttgctctgaccggaatgcgggttatcgcaattgacatcgaccctgtgaagattgcattggccagaaacaacgctgaggtgtacgggatcgctgacaagattgagtttatctgcggtgatttcttgctcttggcaagctttcttaaggcagatgtggtgtttctatcccctccttggggaggcccagattatgccaccgcagaaacattcgatattaggaccatgatgtctccagacggattcgagatcttccgcctgtcaaagaaaatcacaaataacatcgtctatttccttccgaggaacgcagatattgaccaggttgcttcactggccggtcccggaggccaggtagagattgagcagaattttctcaataataagttgaagaccatcactgcctatttcggggatctgatcaggcgacctgctagcgaaacctag

SEQ ID NO: 217060 - DNA, 3782 bp, Artificial Sequence
  derived and/or modified sequence
tgggagaccggacgcgcgcggcctccgccgctcccagtcccgccagacccgatgccgggctggagaagcgcgggggccgacgcacctcggataggcgggggcaggggcaggggcagctctcctttaccctagagcggcgacagaagctcttcgggggatcagtggccaagggggcggacagatttgcacggcggattcctccgaagcaacccgtgtgaaagaagccaagcggcggctgcagcccgggccgcgatgggggtgacaccgcccgtggtcccgccccttcccgtggcccctcggagccacttccggcggcagcgtccgggctagttcccggcgcgagcggccgcgggccagtttctatctcctcatccagggcttgcgggcgaggcctgttttaagtctccagtaaccgagcggaggcccggcaggcgcgacccgggctgcgtacgtcagagctgcctccgaagtggtaaaatgtgctgcgagaagtggagccgcgtggcggaaatgtttctcttcattgaggagcgggaggattgtaagatactgtgcctttgctccagggcatttgtggaggatcgaaaattgtacaatttgggattaaaaggctattacatcagagacagtggcaacaattcaggagaccaggcgacagaagaagaggaaggtggttattcctgtggtactgcagaatcacatgacagcaaaggcataggcctggatgaaagtgaacttgattctgaggctgaactcatgagaagtatgggattgccacttcaatttggtaggataactgcacataaggattttgaggtatctatgaatactagaaataaagttaaaataaaaaagaaaaaacatcaaaagaaatacttagatgaaattgtgcaagaatcttggagaaaagaatatgaagaagacgacattttggcttcagatgatccatcttcaattgaacagtatgagaacaccagaacatatgaacttcaaagcaaaaaagatactgagacagaaaatcctccagttgaaaacacattatctccaaagctagaaattacagagaaatgggaaaagtattggaatgaatatggaggaggactattgtggcaaagttggcaagaaaaacatccgggtcaagcactatcttctgaaccttggaactttcctgatacaaaggaagaatgggagcaacattatagtcaactttattggtattatttggaacaatttcagtattgggaagctcagggttggacttttgatgcctcgcaaagctgtgatacagatacttacacatctaaaacagaagctgatgacaagaacgatgaaaaatgcatgaaagttgacttagtatcttttccatcttcacctattatggttgataatgatagctctggtacaagtgataaggatcatagtgaaatacttgatggaattagtaacataaaactgaattcagaggaagtaacacagagccaattagattcctgtacaagtcatgatggtcatcaacagctaagtgaagttagtagcaaaagagagtgccctgcttccggccaaagtgaaccacgtaatggaggaaccaatgaggaaagcaactcatcggggaatacaaacacagacccaccagctgaggattcacagaagtcttcaggagcaaacacaagcaaagacagaccacatgccagtggtactgatggagatgaaagtgaggaagacccacctgagcataagccaagcaaactgaagaggagccatgaactggacattgatgaaaacccagcttcagactttgatgacagtggttcccttctaggattcaagtatggctcaggacaaaaatatggtggaatcccaaatttcagtcatcggcaggtcaggtatttagagaagaatgtgaagcttaagtctaagtacctagacatgcgcagacaaataaagatgaaaaacaaacacatcttctttaccaaagagtcagaaaaaccatttttcaagaaaagcaaaattctgagtaaggtagaaaaattcctcacatgggttaataaaccaatggatgaagaagcatcacaggaatcatcttctcatgacaatgtgcacgacgcttccacaagtagtgattcagaggaacaagacatgtctgttaaaaaaggtgatgacctactggagactaataatccagaacctgaaaagtgtcagagcgtatcttcagctggtgaacttgaaacagaaaactatgaaagagacagcttgctagcaactgttccagatgagcaggattgtgttactcaagaagtgccagactcccgccaggcagaaactgaagctgaagtgaaaaagaagaagaacaagaagaagaacaaaaaggtgaatggtctgcctcctgaaatagctgctgttcctgagctggcaaaatactgggcccagaggtacaggctcttctcccgttttgatgatgggattaagttggacagagagggctggttttcagttacacccgagaagattgctgaacacattgctggccgtgttagtcagtccttcaagtgtgacgttgtagtagacgcattctgtggagttggaggaaataccattcagtttgccttaacaggaatgagagtgattgccattgatatcgatcctgttaagattgcccttgctcgcaataatgcagaagtttatgggatagcagataagatagagttcatctgtggagatttcttgctgctggcttcttttttaaaggctgatgttgtgttcctcagcccaccttggggagggccagactatgccactgcagagacctttgacattagaacaatgatgtctcctgatggctttgaaattttcagactttctaagaagatcactaataatattgtttattttcttccaagaaatgctgatattgaccaggtggcatccttagctgggcctggagggcaagtggaaatagaacagaacttccttaacaacaaattgaagacaatcactgcatattttggtgacctaattcgaagaccagcctctgaaacctaactatgcagcagtgcgaggacaaaagatcatggagtggtcaaaatattcagatgagacatttggcatgtcttcctttattcactgatattttctacccatggtcttatatcaccgtatgaaatggaaacttacaggacttaaatatcagtgaaatattttgagatctttgaataattcctttagaggaattatacaaaattaatatatatgagtcctttgtaatttatttttttttgagacaggatctcacttttaccgcccaggctggagtgcagtgccatgatcacagctcactgcaggttcagccttctgagttcaagcaatccttctgtctcagtctcctcagtagctggggctttaggtgggcactgccacaccgtactaatttttgtattttttgtagagacgaggtcccaccatgttgcccaggctggtgtcaaactcctgggctcagtcagtccccccatctcaccctccccaagtgctggaattacaggcgtgagctactgtgcccagccttacggacatccttttgaattatctttttcactcatagaatatgaatacatttatttagactttttctagaactttcctgttttcatgtctttgcttcatctggaattggcttaacacccttttataaagtttgtgtttgtaaaatttccattgtgacatcaatacgcaatatattttgtaatataggagtttctatttttttattaaaatggcaatgaaagcaa

SEQ ID NO: 217061 - protein, 985 aa, Artificial Sequence
  derived and/or modified sequence
MIRHAGAPARGDPTGPVPVVGKGEEEEEEDGMRLCLPANPKNCLPHRRGISILEKLIKTCPVWLQLSLGQAEVARILHRVVAGMFLVRRDSSSKQLVLCVHFPSLNESSAEVLEYTIKEEKSILYLEGSALVFEDIFRLIAFYCVSRDLLPFTLRLPQAILEASSFTDLETIANLGLGFWDSSLNPPQERGKPAEPPRDRAPGFPLVSSLRPTAHDANCACEIELSVGNDRLWFVNPIFIEDCSSALPTDQPPLGNCPARPLPPTSDATSPTSRWAPRRPPPPPPVLPLQPCSPAQPPVLPALAPAPACPLPTSPPVPAPHVTPHAPGPPDHPNQPPMMTCERLPCPTAGLGPLREEAMKPGAASSPLQQVPAPPLPAKKNLPTAPPRRRVSERVSLEDQSPGMAAEGDQLSLPPQGTSDGPEDTPRESTEQGQDTEVKASDPHSMPELPRTAKQPPVPPPRKKRISRQLASTLPAPLENAELCTQAMALETPTPGPPREGQSPASQAGTQHPPAQATAHSQSSPEFKGSLASLSDSLGVSVMATDQDSYSTSSTEEELEQFSSPSVKKKPSMILGKARHRLSFASFSSMFHAFLSNNRKLYKKVVELAQDKGSYFGSLVQDYKVYSLEMMARQTSSTEMLQEIRTMMTQLKSYLLQSTELKALVDPALHSEEELEAIVESALYKCVLKPLKEAINSCLHQIHSKDGSLQQLKENQLVILATTTTDLGVTTSVPEVPMMEKILQKFTSMHKAYSPEKKISILLKTCKLIYDSMALGNPGKPYGADDFLPVLMYVLARSNLTEMLLNVEYMMELMDPALQLGEGSYYLTTTYGALEHIKSYDKITVTRQLSVEVQDSIHRWERRRTLNKARASRSSVQDFICVSYLEPEQQARTLASRADTQAQALCAQCAEKFAVERPQAHRLFVLVDGRCFQLADDALPHCIKGYLLRSEPKRDFHFVYRPLDGGGGGGGGSPPCLVVREPNFL

SEQ ID NO: 217062 - protein, 909 aa, Artificial Sequence
  derived and/or modified sequence
MIRHAGAPARGDPTGPVPVVGKGEEEEEEDGMRLCLPANPKNCLPHRRGISILEKLIKTCPVWLQLSLGQAEVARILHRVVAGMFLVRRDSSSKQLVLCVHFPSLNESSAEVLEYTIKEEKSILYLEGSALVFEDIFRLIAFYCVSRDLLPFTLRLPQAILEASSFTDLETIANLGLGFWDSSLNPPQERGKPAEPPRDRAPGFPLVSSLRPTAHDANCACEIELSVGNDRLWFVNPIFIEDCSSALPTDQPPLGNCPARPLPPTSDATSPTSRWAPRRPPPPPPVLPLQPCSPAQPPPLPAKKNLPTAPPRRRVSERVSLEDQSPGMAAEGDQLSLPPQGTSDGPEDTPRESTEQGQDTEVKASDPHSMPELPRTAKQPPVPPPRKKRISRQLASTLPAPLENAELCTQAMALETPTPGPPREGQSPASQAGTQHPPAQATAHSQSSPEFKGSLASLSDSLGVSVMATDQDSYSTSSTEEELEQFSSPSVKKKPSMILGKARHRLSFASFSSMFHAFLSNNRKLYKKVVELAQDKGSYFGSLVQDYKVYSLEMMARQTSSTEMLQEIRTMMTQLKSYLLQSTELKALVDPALHSEEELEAIVESALYKCVLKPLKEAINSCLHQIHSKDGSLQQLKENQLVILATTTTDLGVTTSVPEVPMMEKILQKFTSMHKAYSPEKKISILLKTCKLIYDSMALGNPGKPYGADDFLPVLMYVLARSNLTEMLLNVEYMMELMDPALQLGEGSYYLTTTYGALEHIKSYDKITVTRQLSVEVQDSIHRWERRRTLNKARASRSSVQDFICVSYLEPEQQARTLASRADTQAQALCAQCAEKFAVERPQAHRLFVLVDGRCFQLADDALPHCIKGYLLRSEPKRDFHFVYRPLDGGGGGGGGSPPCLVVREPNFL

SEQ ID NO: 217063 - DNA, 3869 bp, Artificial Sequence
  derived and/or modified sequence
agaagggagcgagagccccagagcgcggcggcagcggcggcctggcccttccagagggccagagccagggacatgcgggcgcccgggactccgcgttccgcgcggcccggcgcctgagcgcctccgttccccgtcccggagctgccggcggcatgatccgacacgccggggcgcccgcgcgcggggaccccacgggtccggttccagttgttggcaaaggagaggaagaggaagaggaagatggcatgcggctttgtctgccagccaacccgaaaaactgccttcctcaccgccggggcatcagcatcctggagaagctcatcaaaacatgcccggtgtggctgcagctgagtctgggccaggcagaggtggccaggatcctgcaccgggtggtggctgggatgttcctggttcgccgggacagcagctcgaagcagctggtgctctgtgtccactttccttctctgaacgaaagctcggccgaggtgctcgaatacaccattaaggaagaaaagtcgatattgtacctggaaggctcggctcttgtgtttgaggacatcttcagattgattgcgttctactgtgtcagtagagacttactgcccttcacactgcggctaccccaggccatccttgaggccagcagcttcacggaccttgagaccatcgccaacctgggtctgggtttctgggactcctcgctgaatcctccacaagaaagagggaagccagcagagcccccaagagaccgggcccccggattccccctagtctccagcctcaggcccacagcccatgacgcaaactgtgcctgtgaaatcgagctgtcggtaggaaatgaccgcctgtggtttgtgaatcctattttcatcgaggactgcagcagcgccctgcccaccgaccagccacctcttggaaattgccctgcacgccctttgccgcccacctctgatgccacctcacccacctccaggtgggccccacgccgcccaccaccccctcccccagtgctgcccctgcagccctgcagcccagcccagccccctgtgctccctgctcttgcccccgcccctgcctgtcctttgcccacctctcccccagtgcctgccccccacgtcacaccccatgccccaggtcccccagaccatccgaaccagccgcccatgatgacctgcgagagactcccatgccccactgcaggcctgggccccctcagggaggaagcgatgaagccaggggcagcctccagtcccttgcagcaggtccccgccccgccactgcctgcgaagaagaaccttcccactgcccctcccagacgccgcgtttccgagagggtgtccttagaagaccaaagtccggggatggcggcagagggggaccagctcagcctgcctccccaagggacctcagacggccctgaggacacgccccgggagagcacggagcaaggccaggacacagaggtgaaagccagcgatcctcacagcatgccagagctgcccaggacagccaaacaacccccagtcccgccccccaggaaaaaacggatctctcgacaactggcctcgaccctcccagctcccttagagaacgctgagctctgcacacaggcgatggccttggagacacccacgccgggtccacccagagagggccaaagccctgcttctcaggctgggactcagcaccctcctgcccaggccactgcccattcccagagctctccagagttcaagggctccctggcctccctctcagacagcttgggggtgtctgtcatggccaccgaccaggactcctactccaccagcagcacggaggaggagctggagcagttcagcagccccagcgtgaagaagaagccctccatgatcctgggcaaggctcggcaccggctgagctttgccagtttcagcagcatgttccacgctttcctctccaacaaccgcaagctgtacaagaaggtggtggagctggcgcaggacaagggctcgtactttggcagcctggtgcaggactacaaggtgtacagcctggagatgatggcgcgccagacctccagcacggagatgctgcaggagattcgcaccatgatgacccagctcaagagctacctgctgcagagcaccgagctcaaggccctggtggaccccgccctgcactccgaggaggagctcgaagcaattgtagagtctgccttgtacaaatgtgtcctgaagcccctgaaggaagccatcaactcatgcctgcatcagatccacagcaaggatggttcgctgcagcagctcaaggagaaccagttagtgatcctggccaccaccaccactgacctaggtgtgaccaccagcgtgccggaggtgcccatgatggagaagatcctgcagaagttcaccagcatgcacaaggcctactcacctgagaagaagatctccatcctgctcaagacctgcaaactcatctacgactccatggccctcggcaacccagggaagccctatggggcggatgacttcctgcctgtgctcatgtatgtgctggcccgcagcaacctcacggagatgcttctcaatgtggagtacatgatggagctcatggaccccgccctgcagctgggggagggttcctactatctgaccaccacctacggggccctggagcacatcaagagctacgacaagatcacggtgacccggcagctgagtgtggaggtgcaggactccatccaccgctgggagcgccggcgtactctcaacaaggcccgggcctcccgctcctccgtacaggacttcatctgcgtgtcgtacctggagcccgagcagcaggcgcggacgctggcgtcgcgggcggacacccaggcccaggcgctgtgcgcgcagtgcgcggagaagttcgcggtggagcggccgcaggcgcaccggctgttcgtgctggtggacgggcgctgcttccagctggcggacgacgcgctgccgcactgcatcaagggctacctgctgcgcagcgagcccaagcgcgacttccactttgtctaccggcccctggacggtggtggcggcggcggcggcgggagcccgccctgcctggtggtgcgggagcccaacttcctgtgaggccctcccggggcgcctcccctcacccccaggcgcacgtctggccccgcctctggctgcgcactcccgaccgcgacgtccacgcagcagagggacatgggccattccatgacgtgcccaggccaacgtcgcaggacagttgtgaaaataacatgacgctcgtccaaggccacttcctgagggcaagtcctaatagccctgagacaccgagacggcatgttcttcattagacggaaagggaaactgaggctcaggagagaggcgctccaggccgctgcagccaacaaaccggcgccctcttcacacgtagctcctcaggccattccccatgagtcccccacacccaccccatcctcggtctttgcaaagaagggcccgagcttagtttccccaggactggcctaggaaggagcaccggccacagctgctccccgtgccactcagggtggacccagcatctcaggagcacctcagggtgtcggttaagagacaggcctccacccctgcaccagagcctgctcttagctcccggtgcccccagaccccgcagctctgtgcccggcaagaagcagctagacacacgccagggcgccaagcacggccagctccgcggacccatggacaagcccagccccgcctcagggaaaacagggcctttccctacaggacacgccccagagctgtggcagattgcaggagccatcgtgtggggagaatttaataaaagcccttttgaaaaaaaaaaaaaaaaaaaaaaaa

SEQ ID NO: 217064 - DNA, 3859 bp, Artificial Sequence
  derived and/or modified sequence
aggaagtagaagggagcgagagccccagagcgcggcggcagcggcggcctggcccttccagagggccagagccagggacatgcgggcgcccgggactccgcgttccgcgcggcccggcgcctgagcgcctccgttccccgtcccggagctgccggcggcatgatccgacacgccggggcgcccgcgcgcggggaccccacgggtccggttccagttgttggcaaaggagaggaagaggaagaggaagatggcatgcggctttgtctgccagccaacccgaaaaactgccttcctcaccgccggggcatcagcatcctggagaagctcatcaaaacatgcccggtgtggctgcagctgagtctgggccaggcagaggtggccaggatcctgcaccgggtggtggctgggatgttcctggttcgccgggacagcagctcgaagcagctggtgctctgtgtccactttccttctctgaacgaaagctcggccgaggtgctcgaatacaccattaaggaagaaaagtcgatattgtacctggaaggctcggctcttgtgtttgaggacatcttcagattgattgcgttctactgtgtcagtagagacttactgcccttcacactgcggctaccccaggccatccttgaggccagcagcttcacggaccttgagaccatcgccaacctgggtctgggtttctgggactcctcgctgaatcctccacaagaaagagggaagccagcagagcccccaagagaccgggcccccggattccccctagtctccagcctcaggcccacagcccatgacgcaaactgtgcctgtgaaatcgagctgtcggtaggaaatgaccgcctgtggtttgtgaatcctattttcatcgaggactgcagcagcgccctgcccaccgaccagccacctcttggaaattgccctgcacgccctttgccgcccacctctgatgccacctcacccacctccaggtgggccccacgccgcccaccaccccctcccccagtgctgcccctgcagccctgcagcccagcccagccccctgtgctccctgctcttgcccccgcccctgcctgtcctttgcccacctctcccccagtgcctgccccccacgtcacaccccatgccccaggtcccccagaccatccgaaccagccgcccatgatgacctgcgagagactcccatgccccactgcaggcctgggccccctcagggaggaagcgatgaagccaggggcagcctccagtcccttgcagcaggtccccgccccgccactgcctgcgaagaagaaccttcccactgcccctcccagacgccgcgtttccgagagggtgtccttagaagaccaaagtccggggatggcggcagagggggaccagctcagcctgcctccccaagggacctcagacggccctgaggacacgccccgggagagcacggagcaaggccaggacacagaggtgaaagccagcgatcctcacagcatgccagagctgcccaggacagccaaacaacccccagtcccgccccccaggaaaaaacggatctctcgacaactggcctcgaccctcccagctcccttagagaacgctgagctctgcacacaggcgatggccttggagacacccacgccgggtccacccagagagggccaaagccctgcttctcaggctgggactcagcaccctcctgcccaggccactgcccattcccagagctctccagagttcaagggctccctggcctccctctcagacagcttgggggtgtctgtcatggccaccgaccaggactcctactccaccagcagcacggaggaggagctggagcagttcagcagccccagcgtgaagaagaagccctccatgatcctgggcaaggctcggcaccggctgagctttgccagtttcagcagcatgttccacgctttcctctccaacaaccgcaagctgtacaagaaggtggtggagctggcgcaggacaagggctcgtactttggcagcctggtgcaggactacaaggtgtacagcctggagatgatggcgcgccagacctccagcacggagatgctgcaggagattcgcaccatgatgacccagctcaagagctacctgctgcagagcaccgagctcaaggccctggtggaccccgccctgcactccgaggaggagctcgaagcaattgtagagtctgccttgtacaaatgtgtcctgaagcccctgaaggaagccatcaactcatgcctgcatcagatccacagcaaggatggttcgctgcagcagctcaaggagaaccagttagtgatcctggccaccaccaccactgacctaggtgtgaccaccagcgtgccggaggtgcccatgatggagaagatcctgcagaagttcaccagcatgcacaaggcctactcacctgagaagaagatctccatcctgctcaagacctgcaaactcatctacgactccatggccctcggcaacccagggaagccctatggggcggatgacttcctgcctgtgctcatgtatgtgctggcccgcagcaacctcacggagatgcttctcaatgtggagtacatgatggagctcatggaccccgccctgcagctgggggagggttcctactatctgaccaccacctacggggccctggagcacatcaagagctacgacaagatcacggtgacccggcagctgagtgtggaggtgcaggactccatccaccgctgggagcgccggcgtactctcaacaaggcccgggcctcccgctcctccgtacaggacttcatctgcgtgtcgtacctggagcccgagcagcaggcgcggacgctggcgtcgcgggcggacacccaggcccaggcgctgtgcgcgcagtgcgcggagaagttcgcggtggagcggccgcaggcgcaccggctgttcgtgctggtggacgggcgctgcttccagctggcggacgacgcgctgccgcactgcatcaagggctacctgctgcgcagcgagcccaagcgcgacttccactttgtctaccggcccctggacggtggtggcggcggcggcggcgggagcccgccctgcctggtggtgcgggagcccaacttcctgtgaggccctcccggggcgcctcccctcacccccaggcgcacgtctggccccgcctctggctgcgcactcccgaccgcgacgtccacgcagcagagggacatgggccattccatgacgtgcccaggccaacgtcgcaggacagttgtgaaaataacatgacgctcgtccaaggccacttcctgagggcaagtcctaatagccctgagacaccgagacggcatgttcttcattagacggaaagggaaactgaggctcaggagagaggcgctccaggccgctgcagccaacaaaccggcgccctcttcacacgtagctcctcaggccattccccatgagtcccccacacccaccccatcctcggtctttgcaaagaagggcccgagcttagtttccccaggactggcctaggaaggagcaccggccacagctgctccccgtgccactcagggtggacccagcatctcaggagcacctcagggtgtcggttaagagacaggcctccacccctgcaccagagcctgctcttagctcccggtgcccccagaccccgcagctctgtgcccggcaagaagcagctagacacacgccagggcgccaagcacggccagctccgcggacccatggacaagcccagccccgcctcagggaaaacagggcctttccctacaggacacgccccagagctgtggcagattgcaggagccatcgtgtggggagaatttaataaaagcccttttgaaaatga

SEQ ID NO: 217065 - DNA, 2958 bp, Artificial Sequence
  derived and/or modified sequence
atgatacgccatgctggtgcgcctgcgcggggggatcctacaggcccagtgccagtcgttggcaagggggaggaggaggaggaggaagatgggatgcgcctgtgcctccctgccaacccaaaaaattgtctcccccaccggcgaggcatttccatcctggagaaattgatcaagacatgccctgtgtggctgcagctttccctgggccaggctgaggtggcccgcatactccatagagttgttgcgggaatgtttctggtgcgacgcgatagctcttccaagcaattagtgctttgcgtgcattttccctccttgaatgaatcttctgcagaggtcttagaatacacaataaaagaggaaaagtccattctatacttggaaggtagcgcactagtgttcgaggacattttccgactgatcgcattttattgtgtgtctagggatttgttaccgtttacactgcgactccctcaagcaatcctggaagcgtcgtcattcactgatcttgaaacgatagcaaatctcggtttgggcttttgggacagtagcctcaacccaccacaggagcggggcaaacccgcagagccaccccgcgaccgagccccaggcttccctctggtttcttctctgaggcccacagcacacgacgcaaactgcgcatgcgaaattgaactttccgtcggcaacgaccgattatggtttgtgaatcccatattcatcgaggattgttcttctgccctcccaaccgaccaaccccctctgggaaattgcccagcaagaccccttcccccgactagtgatgcaacctcccctacttcgcgttgggctcccaggaggccgcctccacccccgcccgtgctccccctgcagccttgcagtccagcccagccaccagtcctgcccgctcttgcccctgccccagcgtgtcctttgcccacaagccctccagtgccagcccctcatgtgacaccacatgcgcctgggcccccggatcatcctaaccagcctcctatgatgacatgtgaaagactgccctgtcctaccgcagggctcgggccactgagagaagaagccatgaagcccggggccgccagtagccccctccagcaggtacctgcccctcccttgccagcgaagaaaaacctccctaccgcccccccaaggcggcgcgtctcagaacgtgtctcccttgaggaccagtcaccagggatggcagccgagggagaccaactatccctcccaccacagggcactagcgatggccccgaagacacacccagggaaagcacagagcaagggcaagatacagaggtcaaggcttccgatccccactcgatgcccgaactccctaggactgccaagcaaccgcccgtgccaccaccgaggaaaaaaaggatctctagacagctcgctagcacactacccgctcctcttgagaatgcggaactgtgcacccaagcgatggccctggagactcctacaccgggaccaccacgggaaggtcagtcccccgcttcacaggctggtacccagcaccctcctgcccaggcgacagctcatagccagtcaagcccagagtttaagggaagtttggccagcctctccgattccctgggagtgagcgtgatggctacagaccaagactcctactctaccagtagtaccgaggaagagctggagcagttctccagcccgtccgttaaaaaaaaaccgagtatgattctgggcaaggcaagacaccgtctcagctttgcatcattctcatccatgttccatgccttcctgagtaacaacagaaagttgtacaagaaggtggtggaactggcacaagataaagggtcctattttggatccctcgtgcaagactataaggtgtattccctggaaatgatggcacgacagacctcaagcactgaaatgttgcaagagattcgcactatgatgacccaacttaagtcatatcttttgcaatccaccgaattaaaagcgttagtggaccccgctctccatagtgaggaagaactcgaggccatcgtggaaagcgctctgtataagtgcgtcttgaaaccactgaaagaggccataaactcctgtctacaccagatccattctaaagatggctccctgcagcagctgaaggaaaaccagctcgtgatcctcgcaactactaccaccgacctgggagtcaccacctccgtgccagaggttccaatgatggagaagatcctccagaagtttacttctatgcacaaagcgtatagtccagagaaaaaaatctctattcttctcaagacatgcaaactgatatacgactccatggcactcggaaaccccggtaagccatatggggccgacgacttcttacccgtcctgatgtacgtgttggctaggagcaatctgaccgaaatgctgttgaatgtcgagtatatgatggaactgatggaccccgcacttcagttaggcgaaggctcatactaccttactacgacctacggagcattagagcatattaaaagttacgataaaatcacagtcacaagacagttgtcagttgaggtccaagactctattcatagatgggaacgacgccgtacgctgaacaaggccagggcatctcgctctagcgtgcaggacttcatctgtgtgagctacttggaacccgagcaacaggcccggacccttgcttctcgcgctgacacccaggcccaggccctttgcgcgcagtgtgccgagaaatttgccgtggagcgacctcaagcccacaggctcttcgtcctggtggacgggcgctgctttcaacttgctgacgacgctctgcctcattgcataaagggatatctgctgagaagcgagccaaaaagagactttcatttcgtctatagacccttagacggaggcggcgggggtgggggcgggtccccgccttgtctggttgtcagagagcccaacttcctttag

SEQ ID NO: 217066 - DNA, 2958 bp, Artificial Sequence
  derived and/or modified sequence
atgatcagacatgctggggccccagcccggggggaccccaccggccctgtgcctgtggtgggcaagggggaggaggaggaggaggaggatggcatgaggctgtgcctgcctgccaaccccaagaactgcctgccccacagaagaggcatcagcatcctggagaagctgatcaagacctgccctgtgtggctgcagctgagcctgggccaggccgaggtggcccgcatcctgcaccgggtggtggccggcatgttcctggtgcggcgggacagcagcagcaagcagctggtgctgtgtgtgcacttccccagcctgaatgaatcttctgctgaggtgctggagtacaccatcaaggaggagaagagcatcctgtacctggagggcagcgccctggtgtttgaggacatcttccgcctcatcgccttctactgtgtgtcccgggacctgctgcccttcaccctgcggctgccccaggccatcctggaggccagcagcttcacagacctggagaccatcgccaacctgggcctgggcttctgggacagcagcctgaaccccccccaggagcggggcaagccagctgagcccccccgggaccgggcccctggcttccccctggtgagcagcctgcggcccacagcccatgatgccaactgtgcctgtgaaattgagctgtctgtgggcaatgaccggctgtggtttgtgaaccccatcttcatcgaggactgcagcagcgccctgcccacagaccagccccccctgggcaactgcccagcccggcccctgccccccaccagtgatgccaccagccccaccagccgctgggccccccggcggcccccacctcctcctcctgtgctgcccctgcagccctgcagccctgcccagccccctgtgctgcctgccctggccccagccccagcctgccccctgcccaccagcccccctgtgcctgcccctcatgtgacccctcatgcccctggccccccagaccaccccaaccagccccccatgatgacctgtgagcggctgccctgccccacagctggcctgggccccctgcgggaggaggccatgaagccaggagctgccagcagccccctgcagcaggtgcctgccccacccctgcctgccaagaagaacctgcccacagccccacccaggagaagagtgtctgagcgggtgtccctggaggaccagagccctggcatggctgctgagggggaccagctgagcctgcccccccagggcaccagtgatggccctgaggacaccccccgggagagcacagagcagggccaggacacagaggtgaaggccagtgacccccacagcatgcctgagctgcccaggacagccaagcagccccctgtgcccccacccaggaagaagaggatcagccggcagctggccagcaccctgcctgcccccctggagaatgctgagctgtgcacccaggccatggccctggagacccccaccccaggccccccccgggagggccagagccctgccagccaggccggcacccagcaccccccagcccaggccacagcccacagccagagcagccctgagttcaagggcagcctggccagcctgagtgacagcctgggcgtgtctgtgatggccacagaccaggacagctacagcaccagcagcacagaggaggagctggagcagttcagcagccccagcgtgaagaagaagcccagcatgatcctgggcaaggcccggcaccggctgagctttgccagcttcagctccatgttccacgccttcctgagcaacaacaggaagctgtacaagaaggtggtggagctggcccaggacaagggcagctacttcggcagcctggtgcaggactacaaggtgtacagcctggagatgatggcccggcagaccagcagcacagagatgctgcaggagatccgcaccatgatgacccagctgaagagctacctgctgcagagcacagagctgaaggccctggtggaccctgccctgcacagcgaggaggagctggaggccatcgtggagagcgccctgtacaagtgtgtgctgaagcccctgaaggaggccatcaacagctgcctgcaccagatccacagcaaggatggcagcctgcagcagctgaaggagaaccagctggtgatcctggccaccaccaccacagacctgggcgtgaccacctctgtgcctgaggtgcccatgatggagaagatcctgcagaagttcacctccatgcacaaggcctacagccctgagaagaagatcagcatcctgctgaagacctgcaagctgatctatgacagcatggccctgggcaaccctgggaagccctacggggctgatgacttcctgcctgtgctgatgtatgtgctggcccggagcaacctgacagagatgctgctgaatgtggagtacatgatggagctgatggaccctgccctgcagctgggggagggcagctactacctgaccaccacctatggagccctggagcacatcaagagctatgacaagatcaccgtgacccggcagctgtctgtggaggtgcaggacagcatccaccgctgggagaggaggaggaccctgaacaaggcccgggccagccgcagctctgtgcaggacttcatctgtgtgtcctacctggagcctgagcagcaggcccggaccctggccagcagagctgacacccaggcccaggccctgtgtgcccagtgtgccgagaagtttgctgtggagcggccccaggcccaccggctgtttgtgctggtggatggccgctgcttccagctggctgatgatgccctgccccactgcatcaagggctacctgctgcggtctgagcccaagagggacttccactttgtgtaccggcccctggatggcggcggcggcggcggcggcggcagccccccctgcctggtggtgcgggagcccaacttcctgtag

SEQ ID NO: 217067 - DNA, 2958 bp, Artificial Sequence
  derived and/or modified sequence
atgatccggcacgccggcgcccccgcccggggcgaccccaccggccctgtgccagtggtagggaaaggcgaggaagaggaggaggaagacggcatgagactgtgtttgcctgccaatcctaaaaattgtctcccacatcgcagaggaatcagcatcctggaaaaactcatcaaaacatgccccgtctggcttcagttatctctgggtcaagctgaggtggcaagaatacttcaccgcgtggttgctggaatgtttcttgttcgccgagacagcagcagtaagcagctggttctctgcgtgcatttcccgtccctgaatgaatccagtgccgaggttctggagtacacgatcaaagaggagaagagcatattatacctggaaggaagcgctctagtgttcgaggatatcttcagactgatagccttttactgcgtgagcagagatttactgcctttcacactaagacttccgcaagccatactcgaggcttcttccttcacagatctggagacgattgcgaacctcgggttagggttctgggacagcagcctcaaccctccacaagaaagggggaagcctgccgagcctcctcgcgatagggcccctgggttcccgctggtgtcttctcttagaccaaccgcccacgacgcaaattgcgcatgcgagatcgagctgtcagtgggaaacgaccgcctgtggttcgtaaatcctattttcatcgaagactgctccagtgccttacccactgatcaacctccgttgggtaattgccccgcacggcctctgcccccaacctccgacgcaacctccccaacttctcggtgggcacctcgccggcctccaccacccccacccgtacttcctctgcaaccctgctcacccgcgcagcccccagtgctacccgcactggccccagcgcccgcatgccccctgcctacatccccaccagtgccggccccgcacgttacaccccacgccccaggcccgcctgaccatccaaaccagccccctatgatgacttgtgaaagactgccatgccccaccgccgggctggggcccctgagggaagaggcaatgaaaccaggcgccgccagcagtcccttgcagcaagtcccagcgcctccactgcctgcaaagaagaacctgcccactgcccctcccaggagacgtgttagcgagcgggtgtcattggaggatcagtccccgggtatggccgcagaaggcgatcagttgtctctaccaccacaaggcacgtctgatggcccagaagacacccccagagagtctactgaacagggccaagacaccgaggtgaaagcttctgacccccatagcatgccagaactgcccagaaccgccaagcaacctcccgttcctccgcccaggaaaaagcgaatcagtcggcaactcgcttcgactctgcctgcccccctcgagaatgctgaactctgcacacaggctatggctctggagacaccgacccccggccctcctagggagggtcagtcaccggcttcacaggcgggtacacagcaccccccagcgcaggctacagcccactcccagagttccccagaatttaagggcagtctcgctagcctctcggactcattgggggtcagtgtgatggcaacagatcaggattcgtactcgacatcaagcacagaggaggagctggagcagttctcttctccgagtgtgaagaagaagcccagtatgatactcgggaaagcaagacatcgtcttagcttcgcatccttctcatcaatgttccacgcgttcctgtccaataatcgcaagctatataaaaaagttgtggagctagctcaggacaaaggctcctatttcggatctttagtacaggattataaggtgtatagtctagaaatgatggctcgccaaacttcttcaacagagatgctgcaggaaatcaggaccatgatgacccagctaaagagctatttactgcagagcacagagctgaaagcgctcgtcgatcccgccctgcacagcgaggaggaacttgaagcgattgtggaatctgccctgtacaaatgtgtgctgaaacccttgaaagaggccattaattcttgcctccatcagattcactctaaagatgggagtctgcagcagctcaaggagaatcagctggtgatcctggccactaccactactgacttgggagtaaccacaagcgtccccgaggttccaatgatggagaagattcttcagaagttcaccagtatgcataaggcctactctcctgaaaagaagatcagtattcttctcaagacgtgtaagttgatctatgacagcatggctcttgggaaccctggcaagccctacggagctgacgacttcttgcccgtcttaatgtatgtgctggcccgcagcaatctcaccgaaatgttactgaatgttgaatatatgatggaactgatggatcccgcccttcagcttggcgagggcagttactacctcacgactacctacggcgcactcgaacatatcaaatcatatgacaagataaccgtgactagacagctctccgtggaagtgcaggacagcatccatagatgggagagaagaagaacactcaacaaagctagagcgtcccgatcaagtgttcaggatttcatctgtgtgtcatatctggaacctgagcaacaagcccgcacccttgcttcgagggcagacactcaggcacaggccctgtgcgcccagtgtgccgagaagttcgccgtggagcggcctcaagcacatagactgttcgttttggtagatggcagatgcttccagttggcagacgatgctcttcctcactgcatcaaaggatatttactgaggtcagaaccgaaacgtgatttccattttgtttacagaccactcgatggagggggcggtgggggcggcggaagcccaccctgtctggtggtgcgagagcccaattttctctag

SEQ ID NO: 217068 - DNA, 2958 bp, Artificial Sequence
  derived and/or modified sequence
atgatcaggcatgctggtgccccagctcgaggcgacccaactggccctgtgcccgtcgtgggaaaaggcgaagaggaagaggaagaggatggcatgcgcctttgtctgccggcaaatccaaaaaactgcttaccccataggcgaggcatctccatccttgagaaactgattaagacgtgcccggtgtggctgcaactgagcctgggacaggccgaagtggcgcgtatcctgcatcgagtggtggcaggaatgttcctagtgagacgggatagctcctccaagcaactggtcctctgcgtccactttccttctctgaacgaatcctcagctgaagtgctggaatacactataaaggaagaaaaatccatcctgtacctggagggcagtgctctcgtgttcgaagatatattccgactgatagcgttctactgcgtgagccgtgaccttctgcctttcactctcaggctgccccaggctattcttgaagcctctagctttactgatctggagactattgcaaacctcggccttgggttttgggactcttctctcaacccgccacaggaacgaggcaaacctgcagagcctccaagagatagagctcccggattccctttggtttccagcttgaggcccaccgcacatgatgccaactgcgcgtgcgagatagaactgtccgttggtaacgatagactgtggttcgtgaatccgatctttattgaggactgcagctccgccctccccacagaccagccccctctgggcaattgcccagccaggcctctcccccctacaagcgacgccacctctccgacctcgcggtgggcccctaggcgccctccaccgccaccacccgtgctaccgctccagccatgctcccctgcccagcccccagtccttcccgctcttgcccctgcacccgcatgtccgctgcctacaagtcccccagttcctgctccccacgttaccccacatgcccctgggcctcctgaccaccccaatcagcccccaatgatgacgtgtgaacgcctaccctgccctactgccggactcggacccttacgcgaggaggctatgaaaccaggcgcagcctccagtcctctgcaacaagtgcccgctccgcctcttcctgcgaaaaaaaacctgccaaccgcgcctccccgaaggcgggtgagcgagcgggtgtctctcgaggaccagtcccccggtatggcggcagagggcgatcagctgtctctgccaccccagggaacctctgacggcccagaggatacacctagagagtccacagagcagggtcaggacaccgaagttaaagccagcgatccccacagtatgccggagcttcctcgaacggcgaagcaaccccctgtcccaccgcctcggaaaaagcgaatctcaaggcagctcgcaagtacacttccagctccgctcgagaacgccgagttgtgtactcaggctatggctctggagaccccaacccctggcccacccagggaagggcagagccccgcttcgcaggccggaacccagcatccgcctgcgcaggcaactgcccattcccagtcttcacctgagttcaaaggctctctagcttctttgtctgattcactcggggttagcgtgatggcaactgaccaggattcttattctacctcctctactgaggaggagctggagcaattttcgagcccctctgtgaaaaagaagccaagcatgatcctgggtaaagccaggcaccgtttatccttcgccagtttcagctctatgttccatgctttcctgagcaacaatcggaagctctacaagaaggtggtcgaactggcccaagacaagggatcttattttgggtctttggtgcaggattacaaggtctatagcttggagatgatggcacggcaaacgtccagcaccgagatgctgcaagagatcagaactatgatgacacagctcaagtcatatcttctccagagcacagagctcaaagctctagtcgaccctgctttgcactccgaagaggagttagaagccatagttgagtccgcgctgtataagtgtgtactgaaaccactcaaggaagccatcaattcttgtcttcaccagattcattctaaggacggaagcctacagcaactgaaggaaaatcagctggttatcttggctacaacaaccacggatctaggggtgactaccagtgtccccgaggttcccatgatggagaagattttgcagaaatttacttctatgcacaaagcctactccccagagaagaagattagcatcttgctaaaaacatgcaagcttatctatgatagcatggcattagggaatcccggaaagccgtacggagccgacgatttcctgcctgtgcttatgtacgtgctcgccaggtccaacctgacagaaatgctccttaatgtcgagtacatgatggaactcatggatcccgctctccaactcggcgagggctcttactacctcacaaccacctacggcgctttggagcacattaagagttatgataaaattacagttactaggcagttgtctgttgaggtgcaagacagtatacatagatgggagcgcagacgcaccctgaataaagcacgcgcaagccgttcctctgttcaggattttatctgcgtgagctatctcgagcccgagcagcaggccagaactctggcctctcgcgctgatactcaggcccaggcattgtgcgctcagtgcgccgaaaagttcgcagtcgagagaccccaggctcacaggctgttcgtcctagtggatggtaggtgcttccaactggccgacgacgccttacctcactgcattaaaggctacctgctccgtagcgagccgaagagggactttcacttcgtgtataggccgcttgacgggggagggggagggggtgggggttcaccgccttgtcttgtagttcgcgagcccaacttcttatag

SEQ ID NO: 217069 - DNA, 2958 bp, Artificial Sequence
  derived and/or modified sequence
atgatcagacacgccggcgcccccgccagaggcgaccccaccggccccgtgcccgtggtgggcaagggcgaggaggaggaggaggaggacggcatgagactgtgcctgcccgccaaccccaagaactgcctgccccacagaagaggcatcagcatcctggagaagctgatcaagacctgccccgtgtggctgcagctgagcctgggccaggccgaggtggccagaatcctgcacagagtggtggccggcatgttcctggtgagaagagacagcagcagcaagcagctggtgctgtgcgtgcacttccccagcctgaacgagagcagcgccgaggtgctggagtacaccatcaaggaggagaagagcatcctgtacctggagggcagcgccctggtgttcgaggacatcttcagactgatcgccttctactgcgtgagcagagacctgctgcccttcaccctgagactgccccaggccatcctggaggccagcagcttcaccgacctggagaccatcgccaacctgggcctgggcttctgggacagcagcctgaaccccccccaggagagaggcaagcccgccgagccccccagagacagagcccccggcttccccctggtgagcagcctgagacccaccgcccacgacgccaactgcgcctgcgagatcgagctgagcgtgggcaacgacagactgtggttcgtgaaccccatcttcatcgaggactgcagcagcgccctgcccaccgaccagccccccctgggcaactgccccgccagacccctgccccccaccagcgacgccaccagccccaccagcagatgggcccccagaagaccccccccccccccccccgtgctgcccctgcagccctgcagccccgcccagccccccgtgctgcccgccctggcccccgcccccgcctgccccctgcccaccagcccccccgtgcccgccccccacgtgaccccccacgcccccggcccccccgaccaccccaaccagccccccatgatgacctgcgagagactgccctgccccaccgccggcctgggccccctgagagaggaggccatgaagcccggcgccgccagcagccccctgcagcaggtgcccgccccccccctgcccgccaagaagaacctgcccaccgccccccccagaagaagagtgagcgagagagtgagcctggaggaccagagccccggcatggccgccgagggcgaccagctgagcctgcccccccagggcaccagcgacggccccgaggacacccccagagagagcaccgagcagggccaggacaccgaggtgaaggccagcgacccccacagcatgcccgagctgcccagaaccgccaagcagccccccgtgcccccccccagaaagaagagaatcagcagacagctggccagcaccctgcccgcccccctggagaacgccgagctgtgcacccaggccatggccctggagacccccacccccggcccccccagagagggccagagccccgccagccaggccggcacccagcacccccccgcccaggccaccgcccacagccagagcagccccgagttcaagggcagcctggccagcctgagcgacagcctgggcgtgagcgtgatggccaccgaccaggacagctacagcaccagcagcaccgaggaggagctggagcagttcagcagccccagcgtgaagaagaagcccagcatgatcctgggcaaggccagacacagactgagcttcgccagcttcagcagcatgttccacgccttcctgagcaacaacagaaagctgtacaagaaggtggtggagctggcccaggacaagggcagctacttcggcagcctggtgcaggactacaaggtgtacagcctggagatgatggccagacagaccagcagcaccgagatgctgcaggagatcagaaccatgatgacccagctgaagagctacctgctgcagagcaccgagctgaaggccctggtggaccccgccctgcacagcgaggaggagctggaggccatcgtggagagcgccctgtacaagtgcgtgctgaagcccctgaaggaggccatcaacagctgcctgcaccagatccacagcaaggacggcagcctgcagcagctgaaggagaaccagctggtgatcctggccaccaccaccaccgacctgggcgtgaccaccagcgtgcccgaggtgcccatgatggagaagatcctgcagaagttcaccagcatgcacaaggcctacagccccgagaagaagatcagcatcctgctgaagacctgcaagctgatctacgacagcatggccctgggcaaccccggcaagccctacggcgccgacgacttcctgcccgtgctgatgtacgtgctggccagaagcaacctgaccgagatgctgctgaacgtggagtacatgatggagctgatggaccccgccctgcagctgggcgagggcagctactacctgaccaccacctacggcgccctggagcacatcaagagctacgacaagatcaccgtgaccagacagctgagcgtggaggtgcaggacagcatccacagatgggagagaagaagaaccctgaacaaggccagagccagcagaagcagcgtgcaggacttcatctgcgtgagctacctggagcccgagcagcaggccagaaccctggccagcagagccgacacccaggcccaggccctgtgcgcccagtgcgccgagaagttcgccgtggagagaccccaggcccacagactgttcgtgctggtggacggcagatgcttccagctggccgacgacgccctgccccactgcatcaagggctacctgctgagaagcgagcccaagagagacttccacttcgtgtacagacccctggacggcggcggcggcggcggcggcggcagccccccctgcctggtggtgagagagcccaacttcctgtag

SEQ ID NO: 217070 - protein, 642 aa, Artificial Sequence
  derived and/or modified sequence
MPCGEDWLSHPLGIVQGFFAQNGVNPDWEKKVIEYFKEKLKENNAPKWVPSLNEVPLHYLKPNSFVKFRCMIQDMFDPEFYMGVYETVNQNTKAHVLHFGKYRDVAECGPQQELDLNSPRNTTLERQTFYCVPVPGESTWVKEAYVNANQARVSPSTSYTPSRHKRSYEDDDDMDLQPNKQKDQHAGARQAGSVGGLQWCGEPKRLETEASTGQQLNSLNLSSPFDLNFPLPGEKGPACLVKVYEDWDCFKVNDILELYGILSVDPVLSILNNDERDASALLDPMECTDTAEEQRVHSPPASLVPRIHVILAQKLQHINPLLPACLNKEESKTCKFVSSFMSELSPVRAELLGFLTHALLGDSLAAEYLILHLISTVYTRRDVLPLGKFTVNLSGCPRNSTFTEHLYRIIQHLVPASFRLQMTIENMNHLKFIPHKDYTANRLVSGLLQLPSNTSLVIDETLLEQGQLDTPGVHNVTALSNLITWQKVDYDFSYHQMEFPCNINVFITSEGRSLLPADCQIHLQPQLIPPNMEEYMNSLLSAVLPSVLNKFRIYLTLLRFLEYSISDEITKAVEDDFVEMRKNDPQSITADDLHQLLVVARCLSLSAGQTTLSRERWLRAKQLESLRRTRLQQQKCVNGNEL

SEQ ID NO: 217071 - DNA, 1929 bp, Artificial Sequence
  derived and/or modified sequence
atgccatgcggcgaggattggttaagtcatcctctcgggatcgtccaaggttttttcgcccagaatggcgtgaaccctgattgggaaaaaaaggtgatcgaatattttaaagaaaaactgaaggagaacaacgcacccaagtgggtgccatcactgaatgaggtccccctgcactatctgaagcctaactcttttgtaaaatttaggtgtatgatccaagacatgttcgaccccgaattttatatgggggtgtatgagaccgtgaaccaaaatactaaggctcatgtgttacacttcggcaaatatcgcgacgttgcagaatgtggcccccagcaagaactggatctcaacagccccaggaacaccacactggaaagacaaacattttattgcgtgcctgtgccgggggagagcacatgggtgaaggaagcttatgtgaacgctaaccaagcacgagtctcccctagtacgtcttatactccaagtcgacacaaacgaagttacgaggacgatgatgacatggacttgcagccaaacaagcagaaagatcagcacgcaggcgcccggcaggctggttctgtggggggccttcaatggtgcggagagcctaagcggctggagactgaggcaagtaccgggcagcagttgaatagcctaaacctttccagcccatttgacttaaacttccccctcccaggtgaaaagggtcccgcctgtctcgttaaggtctatgaggactgggattgtttcaaggtcaatgatatactcgaactatatggtattctgtctgtggaccctgtcctgtcaattctaaataacgatgagagggacgccagtgcactgctggaccccatggaatgtacggacacagccgaggagcaaagagtccatagcccaccagcctctttggttccacgcatccacgttattttggctcaaaagctccaacacatcaatcccctgctgcctgcctgcctgaacaaagaggagagcaaaacttgcaagtttgtcagcagctttatgtctgagctgagcccagtgagggcggagctgcttgggttcttgactcatgccctgctgggcgattccctggcggccgagtatttgatcctccacctgatcagtaccgtctacaccagacgagatgtcctgccactgggtaaattcacagtaaacttgagcggttgtccccggaatagcacctttaccgagcatctgtatcgcataattcaacaccttgtcccggcgagcttccggctgcagatgacaatcgaaaacatgaatcacctgaaattcattccacataaagattacaccgccaacaggctcgtgagtggcctgctccaactgccttctaatacatctctcgttatcgatgagacgctgctggaacaagggcagctcgacacgcctggagtgcacaacgtaaccgccctttccaacctgataacctggcagaaagtagattatgatttctcataccatcagatggagtttccatgcaacataaacgtgtttatcacatcagaggggcgttcactgctgccggccgattgtcagattcatctgcagccccagctcattcctccaaatatggaggagtacatgaatagcctgttgtcagctgtacttccatccgtcctaaacaaattcaggatctatctcaccctgctgcggtttctagagtattctatctctgacgaaatcaccaaggccgtagaggatgacttcgttgagatgagaaaaaacgacccacaatcaattaccgctgatgaccttcatcagttgttggtagtagctaggtgtcttagtctctccgcgggacagaccaccctttcccgcgaacggtggctgcgtgcgaaacagttggagtccctgagaaggacgagactccaacagcaaaagtgcgtgaacggtaacgaactctag

SEQ ID NO: 217072 - DNA, 1929 bp, Artificial Sequence
  derived and/or modified sequence
atgccctgtggggaggactggctgagccaccccctgggcatcgtgcagggcttctttgcccagaatggagtgaacccagactgggagaagaaggtgattgagtacttcaaggagaagctgaaggagaacaatgcccccaagtgggtgcccagcctgaatgaggtgcccctgcactacctgaagcccaacagctttgtgaagttccgctgcatgatccaggacatgtttgatcctgagttctacatgggcgtgtatgaaacagtgaaccagaacaccaaggcccacgtgctgcactttgggaagtacagagatgtggctgaatgtggcccccagcaggagctggacctgaacagccccaggaacaccaccctggagcggcagaccttctactgtgtgcctgtgcctggagagagcacctgggtgaaggaggcctacgtgaatgccaaccaggcccgggtgagccccagcaccagctacacccccagccgccacaagaggagctatgaagatgatgatgacatggacctgcagcccaacaagcagaaggaccagcacgccggggcccggcaggccggctctgtgggcggcctgcagtggtgtggggagcccaagaggctggagacagaggccagcacaggccagcagctgaacagcctgaacctgagcagcccctttgacctgaacttccccctgcccggggagaagggccctgcctgcctggtgaaggtgtatgaggactgggactgcttcaaggtgaatgacatcctggagctgtatggcatcctgtctgtggaccctgtgctgagcatcctgaacaatgatgaaagagatgccagcgccctgctggaccccatggagtgcacagacacagctgaggagcagagggtgcacagccccccagccagcctggtgccccgcatccacgtgatcctggcccagaagctgcagcacatcaaccccctgctgcctgcctgcctgaacaaggaggagagcaagacctgcaagtttgtgtcctccttcatgtctgagctgagccctgtgcgggcagagctgctgggcttcctgacccacgccctgctgggggacagcctggccgctgagtacctgatcctgcacctgatcagcacagtgtacaccaggagagatgtgctgcccctgggcaagttcaccgtgaacctgagcggctgccccaggaacagcaccttcacagagcacctgtaccgcatcatccagcacctggtgcctgccagcttccggctgcagatgaccatcgagaacatgaaccacctgaagttcatcccccacaaggactacacagccaaccggctggtgtctggcctgctgcagctgcccagcaacaccagcctggtgattgatgagaccctgctggagcagggccagctggacaccccaggagtgcacaacgtgacagccctgagcaacctgatcacctggcagaaggtggactatgacttctcctaccaccagatggagttcccctgcaacatcaacgtgttcatcaccagcgagggccgcagcctgctgcctgctgactgccagatccacctgcagccccagctgatcccccccaacatggaggagtacatgaacagcctgctgtctgctgtgctgcccagcgtgctgaacaagttccgcatctacctgaccctgctgcgcttcctggagtacagcatcagtgatgagatcaccaaggctgtggaggatgactttgtggagatgaggaagaatgacccccagagcatcacagcagatgacctgcaccagctgctggtggtggcccgctgcctgagcctgtctgctggccagaccaccctgagccgggagcgctggctgcgggccaagcagctggagagcctgcggaggacccggctgcagcagcagaagtgtgtgaatggaaatgagctgtag

SEQ ID NO: 217073 - DNA, 4113 bp, Artificial Sequence
  derived and/or modified sequence
tgaggcgcgggaggcccgcgccccgcggctcgctgtgcgtgggagggcgcgagcgaacgcgggcgaggagcggccgagccgctgaagaggagctgggcgccggccgcccggccgcgctcggcccgcggatcgcctccgcccggtcttcgccggccccggcccctggcgagatgccgtgtggggaggattggctcagccacccgctgggaatcgtgcagggattcttcgcccaaaatggagttaatcctgactgggagaagaaagtaattgagtattttaaggaaaagctgaaggaaaataatgctcctaagtgggtaccatcactgaacgaagttccccttcattatttgaaacctaatagttttgtgaaatttcgttgcatgattcaggatatgtttgaccctgagttttacatgggagtttatgaaacggttaaccaaaacacaaaagcacatgttcttcattttggaaaatatagagatgtagcagagtgtgggcctcaacaagaacttgatttaaactctccacgaaataccactttggaaagacagactttctattgtgttccggtgcctggggaatctacgtgggtaaaagaagcctatgttaatgcaaaccaagctcgagtcagtccctcaacatcctacactcctagtcgccacaagaggagttatgaagatgatgacgatatggacctacagcccaataagcagaaagaccaacatgcaggtgccagacaagcagggagtgttggtggtcttcaatggtgtggagagccaaaacgtttagaaactgaagcttctactgggcaacagctgaactctctgaacttgtcttctccttttgatttgaattttccattgccaggagagaagggccctgcatgccttgtgaaggtttatgaagattgggattgtttcaaagtaaatgacattcttgagctatatggcatactgtctgtggatcctgtgctgagtatactgaataatgatgaaagggatgcctctgcactgctggatccgatggagtgcacagacacagcagaggagcagagagtacacagtcctcctgcttcattagtgccgagaattcatgtgatcttagcccagaagttgcaacacatcaacccattattgcctgcctgccttaacaaagaggagagcaaaacctgtaagtttgtttcaagtttcatgtccgaattgtctccagtcagagcagaacttcttgggttccttactcatgcccttctgggggatagtttggctgctgaataccttatattacatctcatctccacagtatatacaagaagagatgtccttccactaggaaaatttacagttaacttgagtggttgcccacggaatagtaccttcacagaacacttgtatcgaattattcaacatcttgttccagcatcttttcgtctgcagatgactatagagaacatgaaccatttgaaattcattccccacaaagactacacagccaatcgcttggtcagtgggctcctccagctgcccagcaatacttcccttgtaatcgatgagactctcctggaacaggggcagctggataccccaggtgttcataatgtgacagccctgagcaacctcataacgtggcagaaggtggattatgacttcagctaccatcagatggaattcccctgcaatattaacgttttcattacttcggaggggaggtcactcctcccggcagactgccagattcacttacagccccagctaattccaccaaacatggaggagtacatgaacagccttctctcagcggtgctgccttccgtgctgaacaaattccgcatttatctaactcttttgagattcttggaatatagcatatctgatgaaataaccaaggcagttgaagatgactttgtggaaatgcggaagaacgaccctcagagcatcactgctgatgatcttcaccagctgctcgtggtggctcggtgtctgtctctcagtgctggtcagacaacgctgtcaagagaacgatggctgagagcaaagcagctagagtctttaagaagaacgaggcttcagcagcaaaaatgtgtgaatggaaatgaactttaaagatgtaatacctatgaagagtaatgggcaaactgtagccacataattgtaaaattcagatattcatttataccacattgttttataggtaatttctatcacaaaccagtgacatttcctgaaatcaagcctggtaacacctgatgtttatatgatattcagtaaggacttttaccttactgatttcatggagcttttgaagtttgttttataataattatataaattagtaatgatgtaaaaaaagtatttgatattaaaagtttaatattgataatgttgctgattgtaccatttccttagcttcagctgagtcataggccagactgttgaaatgctgaaatgaagaaggttgttgcagtttcaaagtcagaggaatcgtgcttcggatttcttatgttttctagttctctgtttttccagttcacagtgggttggggtgcattcagtagtccatctttggggaacggaggcgtacttgccattgattcacatgactacatgaaattctgtactgtcatttcccagatgtttggccacagaaactttttcccacttaacatttgttaacagcctgcaaaactaaacttgtacatggcagtggttcccagacttttgtattttatggaccggtagtaatatttccaaaaatctggggtactataaggttgccaatttaccttgccaagtaatccgaataaatcactgtattatcaccatttttttcataaaaggaaaggacaatctatctctgaataagaggagtcctttaaacggaatgaatgtggcttttgggggcaaaagaaaccaagacactacattgtctttattttctcctatcccagtgcatttgagaaccatgcataagggaatgctgtgctacaaagctgtgcccaaatatgaaaacaaaataggaaacttaaaaagcaataccccctttagaaagtttttattttcttaaatgtcattgagttgctttgattctattggatttttggcattttttatgggatcatcagttggttccaagtatgttagatcagctaacatctgctactccagtaacagcctcgtacaactgcaggtaggttttctccagaccaattagttttaatagagcaaactaacaacagactgtagtagcatggttatggcaaccagaatcttcagaaaggttaggacattactttttaagctgtcagtggtatcaaataacttacctagttggaggcagataaaggatcccttacgttttttcctataaggcctaaattgaaattgttaaccaaggaaacagggtcagccttgaaaaatcaaggaattcattgtacctaataactgaagtaaaaataactagttgttcaacttttcctaaactcaaatctatttttataaacaaatgtaaataatgtttatattagagttgaactggttttcatttttataactggtagactagaccttccttaaacttttagaaataaaatgaaggcttcactggatttgtgaggataaaatacattttctttaattgtcctagagcaaagtacattagtcaccatgtgttttttgtgccaatgtaaattgtaatttaccaaagaaaaatacatacattgcttggtcttgcagaaaagttcccttgaaagaacctttccaataaataaaacgtcccaaattagcagtaccttgggctgtttttcatgagtaagaagattcaccatcccatgtgatctgtgtggaaaaagaccatgtcctcttggtggaagacatgagagagctgaactgaagtggaggaggtggtgcaagagggaccttcctgctcaaggcccgcccaggcagcggaatggagtgcagtgcttggctgcagaaaccctttgtccctcacctatatatacacggacagtcaagtttgttgctctaacgtaaggcacagcgttaatcctgtatggccaggaaactgagtagactcctgtgtaaccctgtttggaactttgccttcttaaaatgatttttc

SEQ ID NO: 217074 - DNA, 1929 bp, Artificial Sequence
  derived and/or modified sequence
atgccctgcggcgaggactggctgagccaccccctgggcatcgtgcagggattcttcgctcaaaatggcgttaatcctgactgggaaaaaaaggtgatcgaatattttaaagaaaaattaaaagaaaataacgcaccgaagtgggtcccatctctgaatgaagtgcccttacattatctcaagcccaatagcttcgtcaagtttcgatgtatgatccaggacatgttcgaccccgaattttacatgggtgtgtacgaaacagtcaaccagaacacaaaggcacacgtgctgcatttcggtaaataccgggacgtggctgagtgtggaccacagcaggagctagacctgaacagccccaggaatactaccctggagcgacagactttctattgtgttcccgtcccaggggagtcaacttgggtgaaggaggcatacgtgaatgctaatcaggcccgggtgagcccatcgacaagttatactcctagccgccacaagagatcatatgaagatgacgatgatatggatctgcagcctaacaagcagaaagatcagcacgcgggcgccaggcaggccgggagcgtgggcgggcttcagtggtgtggcgagccaaagcgattggagactgaggcaagtactggtcaacaactcaactccctgaatttgagtagcccttttgacctcaacttccctctgccaggagaaaaaggtcccgcttgcttagttaaggtatacgaggactgggattgttttaaagtcaatgatattttggagttgtatggtatcctgagcgtggatccagtcctgagtatactgaacaatgatgagagggacgcttccgctcttctcgatcccatggagtgcacagatacagcagaagaacagcgagtccactcaccccccgcgagcctggtcccacggattcatgttattctcgcccagaagttacagcacattaatccactcctcccagcctgcctcaataaggaagagagtaagacctgcaagttcgtttcatctttcatgagcgagttaagtccagtgcgcgcggagttgctcggctttctaacccacgccttgctgggagattccctggctgcagagtatctgatcctgcatctcattagtaccgtgtacactagacgcgacgtgctcccattgggaaagttcaccgtaaacctgtcaggctgtccacggaatagcacattcacggagcatctttacaggatcatccagcacctggttccggccagctttagactccaaatgaccatagagaacatgaatcatctgaaattcatccctcacaaagattataccgccaacaggctcgttagtggccttcttcaacttccttcaaacacgtctctggtgattgacgagacactgctggagcagggacagctagatacacccggggtgcacaatgtgacagctctgtcaaacctcatcacatggcagaaggttgattacgacttctcataccatcagatggagttcccctgcaatatcaatgtgttcatcacttctgagggaaggtctttgcttcccgcagattgccaaatacatttgcagcctcagctgattccgccgaacatggaggagtatatgaattcacttctttcggctgtcctaccctccgtgctgaacaaatttcggatatacctgacgctactgcggtttttagaatatagtatatccgacgagattaccaaggccgtcgaggacgattttgtggaaatgcgcaagaacgatccccagagtattactgccgatgatttgcaccagctgcttgtagtggctcgctgcttgagcctgtctgcgggtcaaactacattgtcgagagagagatggcttcgggccaagcagcttgaaagcctgcggcggacgaggctgcagcagcagaaatgtgtgaacggaaatgagctgtag

SEQ ID NO: 217075 - DNA, 1929 bp, Artificial Sequence
  derived and/or modified sequence
atgccctgcggagaagactggctgagtcaccccctggggatagtgcagggcttcttcgctcagaacggggtgaaccccgattgggagaagaaggtgattgagtatttcaaggagaaactgaaagagaataacgctccaaagtgggtgcccagtctcaatgaagtgccattgcactacctcaaaccaaatagtttcgttaaattccgctgtatgatacaggatatgttcgatcccgagttctatatgggcgtttatgagaccgttaaccagaacacaaaagcgcatgtcctacactttggcaagtatcgagacgtcgcagaatgcggtcctcagcaggaactggatctcaacagcccccgtaacacaacgctggaacgacagaccttttattgcgtgcctgtgccgggtgagtccacctgggttaaggaggcctacgtgaatgctaaccaggccagagtcagtccgagcacctcctatactccttcacggcataagagaagctacgaagacgacgatgacatggatttgcagcctaacaagcagaaggatcagcatgcaggagccagacaggctgggtcggtggggggtttgcaatggtgtggagagccgaagagactggaaaccgaggcatcgacaggacagcagctgaatagtctaaatctgtctagcccttttgacctcaactttccgttgccaggtgagaaaggacctgcctgtcttgtgaaggtttacgaagattgggactgctttaaagtgaacgatatccttgagctctacggaatcctatctgtcgaccccgtgctcagcatcctcaataacgacgaaagagacgcatcagccctgctggaccccatggaatgcactgatactgcagaagaacagagagtgcactccccacccgcttccctcgtccccagaattcatgtcattctcgcgcaaaagctgcagcacatcaaccctctgctgccggcatgcctgaacaaagaagagtcgaagacatgtaagtttgtttccagcttcatgtccgaattatctcctgtccgggcagaattattgggctttctgacccatgcacttttgggcgactcattagctgccgagtacttaatcctgcacctgatttcaacggtatatactagacgggacgtgctcccactgggcaagtttaccgtgaatctctcaggttgcccacgaaactcaacctttaccgagcacctttacaggattatccagcatcttgtgcctgcgagctttaggctccagatgaccatcgagaacatgaaccacctcaagttcatccctcataaggattatactgctaatcggctcgtgtcaggccttttgcaattgccgtccaataccagtttagttattgatgagacgcttctggaacagggccaacttgacactcctggtgttcacaacgttactgcactctctaatcttattacatggcagaaagttgattatgactttagctaccaccagatggagttcccatgtaatattaatgtgttcattacttccgagggtcgctccctgctgccggcagactgtcagattcacctgcagcctcagctgatacccccaaacatggaagagtatatgaactctttattatcagccgtgctgccgagcgttctaaataaattccgaatttacctgacactgctaaggttcctggagtacagcatttctgacgagatcaccaaagctgtggaggatgattttgtcgagatgaggaaaaacgacccacagagcattacggcagacgacctgcaccagcttttggtcgtcgcccgttgtctgtccttgagcgccggtcagacaaccctgagcagggaacggtggctgcgggcaaagcagctggagagcctcaggaggacgcgtcttcaacagcagaagtgcgtaaacggaaacgagctttag

SEQ ID NO: 217076 - DNA, 1929 bp, Artificial Sequence
  derived and/or modified sequence
atgccctgcggcgaggactggctgagccaccccctgggcatcgtgcagggcttcttcgcccagaacggcgtgaaccccgactgggagaagaaggtgatcgagtacttcaaggagaagctgaaggagaacaacgcccccaagtgggtgcccagcctgaacgaggtgcccctgcactacctgaagcccaacagcttcgtgaagttcagatgcatgatccaggacatgttcgaccccgagttctacatgggcgtgtacgagaccgtgaaccagaacaccaaggcccacgtgctgcacttcggcaagtacagagacgtggccgagtgcggcccccagcaggagctggacctgaacagccccagaaacaccaccctggagagacagaccttctactgcgtgcccgtgcccggcgagagcacctgggtgaaggaggcctacgtgaacgccaaccaggccagagtgagccccagcaccagctacacccccagcagacacaagagaagctacgaggacgacgacgacatggacctgcagcccaacaagcagaaggaccagcacgccggcgccagacaggccggcagcgtgggcggcctgcagtggtgcggcgagcccaagagactggagaccgaggccagcaccggccagcagctgaacagcctgaacctgagcagccccttcgacctgaacttccccctgcccggcgagaagggccccgcctgcctggtgaaggtgtacgaggactgggactgcttcaaggtgaacgacatcctggagctgtacggcatcctgagcgtggaccccgtgctgagcatcctgaacaacgacgagagagacgccagcgccctgctggaccccatggagtgcaccgacaccgccgaggagcagagagtgcacagcccccccgccagcctggtgcccagaatccacgtgatcctggcccagaagctgcagcacatcaaccccctgctgcccgcctgcctgaacaaggaggagagcaagacctgcaagttcgtgagcagcttcatgagcgagctgagccccgtgagagccgagctgctgggcttcctgacccacgccctgctgggcgacagcctggccgccgagtacctgatcctgcacctgatcagcaccgtgtacaccagaagagacgtgctgcccctgggcaagttcaccgtgaacctgagcggctgccccagaaacagcaccttcaccgagcacctgtacagaatcatccagcacctggtgcccgccagcttcagactgcagatgaccatcgagaacatgaaccacctgaagttcatcccccacaaggactacaccgccaacagactggtgagcggcctgctgcagctgcccagcaacaccagcctggtgatcgacgagaccctgctggagcagggccagctggacacccccggcgtgcacaacgtgaccgccctgagcaacctgatcacctggcagaaggtggactacgacttcagctaccaccagatggagttcccctgcaacatcaacgtgttcatcaccagcgagggcagaagcctgctgcccgccgactgccagatccacctgcagccccagctgatcccccccaacatggaggagtacatgaacagcctgctgagcgccgtgctgcccagcgtgctgaacaagttcagaatctacctgaccctgctgagattcctggagtacagcatcagcgacgagatcaccaaggccgtggaggacgacttcgtggagatgagaaagaacgacccccagagcatcaccgccgacgacctgcaccagctgctggtggtggccagatgcctgagcctgagcgccggccagaccaccctgagcagagagagatggctgagagccaagcagctggagagcctgagaagaaccagactgcagcagcagaagtgcgtgaacggcaacgagctgtag

SEQ ID NO: 217077 - protein, 697 aa, Artificial Sequence
  derived and/or modified sequence
MARLVAVCRDGEEEFPFERRQIPLYIDDTLTMVMEFPDNVLNLDGHQNNGAQLKQFIQRHGMLKQQDLSIAMVVTSREVLSALSQLVPCVGCRRSVERLFSQLVESGNPALEPLTVGPKGVLSVTRSCMTDAKKLYTLFYVHGSKLNDMIDAIPKSKKNKRCQLHSLDTHKPKPLGGCWMDVWELMSQECRDEVVLIDSSCLLETLETYLRKHRFCTDCKNKVLRAYNILIGELDCSKEKGYCAALYEGLRCCPHERHIHVCCETDFIAHLLGRAEPEFAGGRRERHAKTIDIAQEEVLTCLGIHLYERLHRIWQKLRAEEQTWQMLFYLGVDALRKSFEMTVEKVQGISRLEQLCEEFSEEERVRELKQEKKRQKRKNRRKNKCVCDIPTPLQTADEKEVSQEKETDFIENSSCKACGSTEDGNTCVEVIVTNENTSCTCPSSGNLLGSPKIKKGLSPHCNGSDCGYSSSMEGSETGSREGSDVACTEGICNHDEHGDDSCVHHCEDKEDDGDSCVECWANSEENDTKGKNKKKKKKSKILKCDEHIQKLGSCITDPGNRETSGNTMHTVFHRDKTKDTHPESCCSSEKGGQPLPWFEHRKNVPQFAEPTETLFGPDSGKGAKSLVELLDESECTSDEEIFISQDEIQSFMANNQSFYSNREQYRQHLKEKFNKYCRLNDHKRPICSGWLTTAGAN

SEQ ID NO: 217078 - DNA, 2803 bp, Artificial Sequence
  derived and/or modified sequence
gcgagcggctgactgcccgtagaggaaacgacattcggagctgcgctcccgcccaggccggccctgacgcgggcctcgtcagccagtaacagggagcagaggtgggagttagcgaggcgaccacgaaaacggtgaaggtcggaaccgacagcctcctccgagaagggcaggagctgggaggaggcggcagcggcggcggcagaaacagcagcggcggcggcggcggcagctgggaggaggtggtgacggtggcaacggcagcgtcggggacgatggcgcgactcgtggcagtgtgcagggacggggaggaggagttccccttcgagaggaggcagattcccctctacatagacgacaccctgacgatggtgatggaatttcctgataatgtgttaaatctcgatggacatcagaataatggtgcacagctaaagcagttcattcagcgacatggtatgcttaagcaacaggatctaagtattgccatggtggtgacatcacgcgaagtcctgagtgcactttctcagcttgtcccatgtgttggttgtcgtcgcagtgtggagcgtctcttttcccagcttgtagagtctggaaatcctgctcttgaacccctaacagtagggcccaagggagtcctgtctgtaactagaagctgcatgactgatgcaaagaagctttatacattattttatgtacatgggtccaaactaaatgacatgatagatgctattccaaaaagtaagaagaataagagatgtcagttgcactccttagatacgcacaagccaaaacctttgggaggttgttggatggatgtatgggaactaatgtcgcaggaatgcagggatgaagtagttttaattgactcgagttgtcttttagaaacactagaaacatatctgcgaaaacacaggttttgcactgattgcaaaaataaagtcctccgagcatacaatatccttattggtgaacttgactgcagcaaagaaaagggctactgtgctgcactttatgaaggcttgcggtgctgtccacatgaacgacacatacatgtttgctgtgaaacagacttcattgcacatcttttgggtcgtgctgagccagagttcgcaggagggcgaagagaaaggcatgcaaagacaatagatatagctcaagaagaagttctgacctgcttgggaattcatctttatgaaagactgcatcgaatctggcagaagctacgggcagaagagcagacatggcagatgcttttctatcttggtgttgatgctttacgcaagagttttgagatgaccgtggaaaaagtacagggtattagcagattggaacaactttgtgaggaattttcagaagaggaacgagtaagagaactcaagcaagaaaagaaacgccaaaaacggaagaatagacgaaaaaataagtgtgtgtgtgatattcctactcccttacaaacagcagatgaaaaggaagtaagccaagagaaggaaacagacttcatagaaaatagcagctgcaaagcctgtggcagcactgaagatggtaatacttgtgtagaagtaattgttaccaatgaaaatacatcatgtacctgtcctagcagtggcaatcttttggggtcccctaaaataaagaaaggcttatctccacactgtaatggtagtgattgtggatattcatctagcatggaagggagtgaaacaggttctcgggagggttcggatgttgcctgcactgaaggcatttgtaatcatgatgaacacggtgatgactcttgtgttcatcactgtgaagacaaagaggatgatggtgatagttgtgttgaatgttgggcaaattctgaagagaacgacacaaaaggaaaaaataaaaagaagaagaagaaaagcaagatactgaaatgtgatgaacatatccagaagcttggaagctgtattacagatccaggtaatcgagagacctcaggaaataccatgcacacagtgtttcaccgtgacaagaccaaagatacacatcctgaaagctgttgcagctctgaaaagggtgggcagccattgccttggtttgagcataggaaaaatgtaccacagtttgcagaacctacagaaacgttgtttggtcccgattccggaaaaggtgccaagagcttagttgaactccttgatgagtctgaatgtacttcagatgaggaaatctttatctcacaagatgaaatacagtcatttatggctaataaccagtctttctacagcaatagagaacaataccgacagcatctgaaggagaaatttaataaatactgccggttaaatgatcacaagaggcccatttgtagtggctggttgacaacggctggagcaaattaaataaataaaatagctctgtctttcaatgaaacactcacgatgactactgcgccttctctttcgaaaaactcttaatttagtgacttatggcaaaattttatcttaaatcaatgtgattctttcttgttttgggagacggtggaggtatcctcattagttctttcttcaggcttgtgtctttagttgcgtggctgcgcaggcctgccatatgatttaagccatctcttttcattaaatgtttctcttcctgtgagacttactaaagcaacttagtggcaaaaagtaatgttgtacttataattctgtacagaaatgacaatgagctgaatatatggttttacaaagtagacatccacttgcaaaatgtttggatgtaatgttaaagcgcaatgtgcaaaatttaaaataaagaatatttattaatacgcacagtaaaa

SEQ ID NO: 217079 - DNA, 2094 bp, Artificial Sequence
  derived and/or modified sequence
atggccaggctggtggcagtttgtcgggatggagaggaggaattcccattcgaaagacgccagattccgctgtacatcgacgatactttaacaatggtgatggagttccctgacaatgtattgaatctggatggtcatcagaataatggcgctcaactgaagcagttcattcagaggcacggaatgctgaaacagcaggatctcagcatcgctatggtggtcacgtcccgagaagtcctatctgccctctcccaactggtgccttgtgtgggttgccgtagatccgtggagagactgttcagccaactagtcgagtctgggaaccccgcgctcgagccccttactgtggggccgaaaggtgttctctcagtgacaagatcctgcatgactgacgctaagaaattatatactctgttctatgtgcacgggtcgaaattaaacgatatgatagatgccatacccaaaagcaaaaagaacaaacggtgccagctccattctctggacacccacaaacccaagccgctgggcggctgttggatggatgtgtgggagctaatgtctcaggagtgcagagacgaggtagtgctgattgactcgtcctgtctcttggagaccctggagacctatctacgcaaacaccgattttgtacagactgcaagaacaaggtcctcagagcctataacattctgattggtgagttggactgttccaaagagaagggatactgtgccgcactgtacgaggggctgcgctgttgcccgcacgagaggcacattcacgtctgttgcgagaccgactttatcgctcatctgcttggccgcgcagagcctgaattcgctggaggccgtcgggaaaggcacgcaaagacaatcgatatcgcccaggaggaagttctgacttgtctcggtatccatctgtatgagcgcttacaccgaatctggcagaagttgcgggcggaggagcagacctggcagatgttgttttaccttggcgtcgacgcccttcggaaaagtttcgagatgacagtggagaaagtccagggcatcagcagactggagcaactgtgtgaggagttcagtgaggaggaacgggttagggagcttaagcaggaaaagaagaggcagaagcgcaagaataggcgtaagaacaaatgcgtgtgtgacatcccgacccctctccagactgcagacgagaaagaagtgtcccaagagaaagaaactgacttcatagagaacagttcatgcaaggcctgcggaagtacagaggatggaaacacctgcgtagaagttattgtgaccaatgagaatacctcttgcacatgcccatcatctggtaatctgcttggtagccccaaaatcaaaaaggggttgtccccacactgcaatggctcagactgtggctattcttccagtatggaggggtcggaaactggctcaagggaaggctccgacgtggcctgcaccgaaggcatttgcaaccacgatgagcatggtgacgatagctgcgtgcaccactgcgaagacaaagaagatgacggcgactcctgtgtggaatgttgggccaatagcgaagaaaacgacaccaagggcaaaaataagaagaaaaagaagaaatcgaaaatcttaaagtgcgacgagcacattcagaagcttggctcttgtattacagatcccggaaatagggaaacatctggtaataccatgcacactgtattccacagagataaaactaaggatacacatccagaaagttgctgttcatcggaaaaaggcggccagccgctgccctggttcgagcaccgaaagaacgtgccgcaatttgctgagccaacagaaacactctttggccctgattcggggaaaggagctaagtctctggtggaacttctcgacgagtctgagtgtactagtgatgaggagattttcatctcacaagatgagatccaatccttcatggcaaataaccaatcattttacagtaacagggaacagtatcgccaacacctcaaggagaagtttaataaatactgtcgcctgaacgatcacaaaagacctatttgcagcggctggctgacaacggcaggggctaactag

SEQ ID NO: 217080 - DNA, 2094 bp, Artificial Sequence
  derived and/or modified sequence
atggcccggctggtggccgtgtgcagagatggagaggaggagttcccctttgaaagacggcagatccccctgtacattgatgacaccctgaccatggtgatggagttcccagacaacgtgctgaacctggatggccaccagaacaatggagcccagctgaagcagttcatccagagacatggcatgctgaagcagcaggacctgagcatcgccatggtggtgaccagccgggaggtgctgagcgccctgagccagctggtgccctgtgtgggctgcagaagatctgtggagcggctcttcagccagctggtggagagcggcaacccagccctggagcccctgactgtgggccccaagggcgtgctgtctgtgaccaggagctgcatgacagatgccaagaagctgtacaccctcttctacgtgcacggcagcaagctgaatgacatgattgatgccatccccaagagcaagaagaacaagcgctgccagctgcacagcctggacacccacaagcccaagcccctgggcggctgctggatggatgtgtgggagctgatgagccaggagtgcagagatgaggtggtgctgattgacagcagctgcctgctggagaccctggagacctacctgaggaagcaccgcttctgcacagactgcaagaacaaggtgctgcgggcctacaacatcctgattggagagctggactgcagcaaggagaagggctactgtgccgccctgtatgagggcctgcgctgctgcccccatgagcggcacatccacgtgtgctgtgaaacagacttcatcgcccacctgctgggccgggcagagcctgagtttgctgggggcagaagagaaagacatgccaagaccattgatattgcccaggaggaggtgctgacctgcctgggcatccacctgtatgagcggctgcaccgcatctggcagaagctgcgggcagaggagcagacctggcagatgctgttctacctgggcgtggatgccctgaggaagagctttgagatgacagtggagaaggtgcagggcatcagccggctggagcagctgtgtgaggagttcagcgaggaggagcgggtgcgggagctgaagcaggagaagaagaggcagaagaggaagaacagaaggaagaacaagtgtgtgtgtgacatccccacccccctgcagacagcagatgagaaggaggtgtcccaggagaaggagacagacttcatcgagaacagcagctgcaaggcctgtggcagcacagaagatggcaacacctgtgtggaggtgattgtgaccaatgaaaacaccagctgcacctgccccagcagcggcaacctgctgggcagccccaagatcaagaagggcctgagcccccactgcaatggaagtgactgtggctacagcagctccatggagggcagcgagaccggcagccgggagggcagtgatgtggcctgcacagagggcatctgcaaccatgatgaacatggagatgacagctgtgtgcaccactgtgaggacaaggaggatgatggagacagctgtgtggagtgctgggccaacagtgaagaaaatgacaccaagggcaagaacaagaagaagaagaagaagagcaagatcctgaagtgtgatgagcacatccagaagctgggcagctgcatcacagaccccggcaaccgggagaccagcggcaacaccatgcacacagtgttccaccgggacaagaccaaggacacccaccctgagagctgctgcagcagcgagaagggcggccagcccctgccctggtttgagcacaggaagaatgtgccccagtttgctgagcccacagagaccctgtttggaccagattctggaaaaggagccaagagcctggtggagctgctggatgaaagtgagtgcaccagtgatgaggagatcttcatcagccaggatgagatccagagcttcatggccaacaaccagagcttctacagcaaccgggagcagtaccggcagcacctgaaggagaagttcaacaagtactgccgcctgaatgaccacaagaggcccatctgcagcggctggctgaccacagctggggccaactag

SEQ ID NO: 217081 - DNA, 2094 bp, Artificial Sequence
  derived and/or modified sequence
atggcccggctggtggccgtgtgccgggacggcgaggaggagttcccgttcgagcgcaggcagatccccctatacatcgacgacacgctaaccatggtgatggagtttcctgacaatgtgctgaacctggacggtcatcaaaataacggcgcgcaactaaagcaatttattcaacgccacgggatgctgaagcagcaagacctttctattgcaatggtggtcacttctcgggaggtgctgtcggctctgagccagctggtcccatgcgtcgggtgtcggagatccgtggagaggcttttttcacagttagttgagagtggcaaccctgctcttgagcccctgaccgtgggccctaagggcgtgctgagcgttacgagatcttgtatgactgatgcaaagaagctttacaccctgttctatgtccacgggtccaaactgaacgatatgatcgatgcaattccaaagagcaaaaaaaacaagcgctgtcagctgcatagcctggatactcacaagcctaaaccactgggcggttgctggatggacgtctgggagttgatgtctcaggagtgcagagatgaagttgttctgatcgattccagttgtctgttggagacgttggagacctatctgcgaaagcaccggttttgtacagactgcaaaaataaggtgctgagagcttacaatatcttaattggagaactggactgcagcaaagaaaagggatactgtgctgccctgtacgaggggctgcgttgttgcccccacgaacgccatatccatgtttgctgcgagactgattttatcgcccacttattggggagagccgagccagagtttgctggaggacgcagggaacggcacgccaagacgatagatattgcacaggaggaggttctgacgtgcctgggaatacacctgtacgaacggctgcaccggatctggcagaagttgagagcagaagaacagacatggcagatgttattctatttaggcgtggacgctctaagaaaatcatttgaaatgacagtcgagaaagtgcagggtatttctagactagagcaattgtgcgaagaattttcagaagaagagagggttagggaattgaagcaagagaagaagcgacagaagcggaagaatagaagaaagaataagtgtgtttgtgatattcccactcccttgcaaaccgctgatgagaaagaggtgagtcaggagaaagaaaccgacttcatcgagaactccagctgtaaggcatgcggctccactgaagacgggaacacgtgtgttgaggtaatcgtgacgaacgaaaacaccagctgtacctgtccctcatccggaaatctcctcggctctccgaagataaagaaaggccttagccctcattgcaacggctcggactgcgggtacagttcgtctatggaaggctcagagacaggaagtcgtgaggggtccgatgtggcctgtacagagggtatctgcaaccacgacgaacacggggacgactcgtgcgttcaccactgtgaggataaagaagacgacggtgactcgtgcgtggaatgttgggctaatagcgaggagaacgacacgaagggcaaaaacaagaagaaaaaaaagaaatccaagatcctgaaatgtgacgaacacattcagaagctcggatcatgtatcacagatcctggaaatcgggaaacgtcaggaaataccatgcacaccgtgttccatcgggacaagactaaagacactcatcctgagtcttgctgctctagcgagaagggaggacaacccctgccgtggttcgagcaccgaaagaatgtgccgcagtttgctgaaccaaccgagaccctgtttggtcctgactcaggaaaaggggctaagtccttggtggaacttctggacgagagtgagtgcacctccgatgaggaaattttcatctcacaggacgagattcagagtttcatggccaataatcagagcttctacagtaaccgagagcagtacagacagcacctgaaggagaaatttaataagtactgccgactgaacgaccacaaaagaccaatttgcagtggttggctgaccacagctggcgcaaattag

SEQ ID NO: 217082 - DNA, 2094 bp, Artificial Sequence
  derived and/or modified sequence
atggcccgacttgttgccgtatgcagggacggggaggaagagtttcccttcgaaagacgtcagatacctctgtacattgacgatacactgaccatggtgatggagtttcccgataatgtgctgaacctggacggacaccagaacaacggcgcacaactgaaacagttcattcagaggcacggcatgcttaaacagcaggacctttcgattgccatggtggtaacgagcagggaggtgctgtcagctctttcacaattggtgccctgtgtaggatgtagacggtctgtcgaacgccttttcagccagctagttgagagcggaaatcccgcactggagccccttacagtaggcccaaagggcgttcttagcgtgaccagatcttgtatgactgatgctaagaagctttacacgctgttttacgtgcatggaagcaagctgaatgatatgatcgacgctatacctaagtcaaaaaaaaataaaagatgtcagctgcatagccttgacactcataagcctaagcctcttggtggctgctggatggatgtatgggaactgatgtcgcaggaatgcagagacgaggtggtcctgatagactcttcatgtttgctggaaacccttgaaacttacctgaggaagcacagattttgtacagactgtaaaaataaagtattgagggcatataacattttgatcggcgaactggactgctcaaaagaaaaagggtactgcgccgcactgtacgaaggtctcagatgttgcccccacgaaagacatattcatgtctgctgcgagactgactttatcgcacacctgttaggtcgggctgagcctgagtttgcgggtggcagacgagagagacatgccaaaaccatcgacattgctcaggaggaagtactgacctgtctcgggattcacctgtacgagcgactacacaggatctggcagaaactacgggcagaagaacagacctggcagatgcttttttatctaggtgtggatgccctcaggaagagcttcgagatgacggtcgagaaggtgcagggtatttcccgacttgaacagctctgtgaagaattcagtgaggaagagagagtccgggagctcaaacaagaaaagaaaagacaaaaacgtaagaaccgccgtaagaacaagtgtgtgtgcgacattcctacgccgttacagacggcggatgagaaagaagtgtcacaggaaaaagagactgacttcatcgaaaacagttcttgcaaagcctgcgggtcaactgaagacggcaatacatgtgtggaggtgatagtaactaatgaaaatacaagttgcacttgtccctcctctgggaacctgttagggagtccaaaaattaaaaaaggactcagcccccattgtaacggatcagattgtgggtattcctcatccatggaaggctcggagacagggtccagagaagggagtgacgttgcgtgtactgagggcatatgtaaccacgacgagcatggagacgacagttgcgttcatcattgcgaggataaggaagatgacggcgactcctgcgtggagtgctgggcaaactcagaagaaaatgatactaagggcaagaacaagaagaaaaagaagaaatcaaaaatcctgaagtgcgacgagcatattcagaagctgggaagctgtataactgaccctggtaaccgcgagacttccggaaatactatgcataccgtgtttcaccgcgacaagacaaaggacactcacccggagagctgctgcagctctgaaaaaggcggtcagccactgccctggttcgagcaccgtaagaatgtaccccaatttgcagagccaactgagaccctcttcggacctgactcaggaaagggggctaagagcctagtggagttattggacgaatccgagtgcacctccgacgaggaaattttcatttctcaagacgaaattcaaagtttcatggccaacaatcaatcattctactctaatcgcgaacagtatcgacagcacctgaaggagaagttcaacaaatactgtcgtttgaatgatcacaagcggcctatttgcagcggttggctcacaacagctggagccaattag

SEQ ID NO: 217083 - DNA, 2094 bp, Artificial Sequence
  derived and/or modified sequence
atggccagactggtggccgtgtgcagagacggcgaggaggagttccccttcgagagaagacagatccccctgtacatcgacgacaccctgaccatggtgatggagttccccgacaacgtgctgaacctggacggccaccagaacaacggcgcccagctgaagcagttcatccagagacacggcatgctgaagcagcaggacctgagcatcgccatggtggtgaccagcagagaggtgctgagcgccctgagccagctggtgccctgcgtgggctgcagaagaagcgtggagagactgttcagccagctggtggagagcggcaaccccgccctggagcccctgaccgtgggccccaagggcgtgctgagcgtgaccagaagctgcatgaccgacgccaagaagctgtacaccctgttctacgtgcacggcagcaagctgaacgacatgatcgacgccatccccaagagcaagaagaacaagagatgccagctgcacagcctggacacccacaagcccaagcccctgggcggctgctggatggacgtgtgggagctgatgagccaggagtgcagagacgaggtggtgctgatcgacagcagctgcctgctggagaccctggagacctacctgagaaagcacagattctgcaccgactgcaagaacaaggtgctgagagcctacaacatcctgatcggcgagctggactgcagcaaggagaagggctactgcgccgccctgtacgagggcctgagatgctgcccccacgagagacacatccacgtgtgctgcgagaccgacttcatcgcccacctgctgggcagagccgagcccgagttcgccggcggcagaagagagagacacgccaagaccatcgacatcgcccaggaggaggtgctgacctgcctgggcatccacctgtacgagagactgcacagaatctggcagaagctgagagccgaggagcagacctggcagatgctgttctacctgggcgtggacgccctgagaaagagcttcgagatgaccgtggagaaggtgcagggcatcagcagactggagcagctgtgcgaggagttcagcgaggaggagagagtgagagagctgaagcaggagaagaagagacagaagagaaagaacagaagaaagaacaagtgcgtgtgcgacatccccacccccctgcagaccgccgacgagaaggaggtgagccaggagaaggagaccgacttcatcgagaacagcagctgcaaggcctgcggcagcaccgaggacggcaacacctgcgtggaggtgatcgtgaccaacgagaacaccagctgcacctgccccagcagcggcaacctgctgggcagccccaagatcaagaagggcctgagcccccactgcaacggcagcgactgcggctacagcagcagcatggagggcagcgagaccggcagcagagagggcagcgacgtggcctgcaccgagggcatctgcaaccacgacgagcacggcgacgacagctgcgtgcaccactgcgaggacaaggaggacgacggcgacagctgcgtggagtgctgggccaacagcgaggagaacgacaccaagggcaagaacaagaagaagaagaagaagagcaagatcctgaagtgcgacgagcacatccagaagctgggcagctgcatcaccgaccccggcaacagagagaccagcggcaacaccatgcacaccgtgttccacagagacaagaccaaggacacccaccccgagagctgctgcagcagcgagaagggcggccagcccctgccctggttcgagcacagaaagaacgtgccccagttcgccgagcccaccgagaccctgttcggccccgacagcggcaagggcgccaagagcctggtggagctgctggacgagagcgagtgcaccagcgacgaggagatcttcatcagccaggacgagatccagagcttcatggccaacaaccagagcttctacagcaacagagagcagtacagacagcacctgaaggagaagttcaacaagtactgcagactgaacgaccacaagagacccatctgcagcggctggctgaccaccgccggcgccaactag

SEQ ID NO: 217084 - DNA, 3579 bp, Artificial Sequence
  derived and/or modified sequence
atgttctgcagcgagaagaagctgagagaggtggagagaatcgtgaaggccaacgacagagagtacaacgagaagttccagtacgccgacaacagaatccacaccagcaagtacaacatcctgaccttcctgcccatcaacctgttcgagcagttccagagagtggccaacgcctacttcctgtgcctgctgatcctgcagctgatccccgagatcagcagcctgacctggttcaccaccatcgtgcccctggtgctggtgatcaccatgaccgccgtgaaggacgccaccgacgactacttcagacacaagagcgacaaccaggtgaacaacagacagagcgaggtgctgatcaacagcaagctgcagaacgagaagtggatgaacgtgaaggtgggcgacatcatcaagctggagaacaaccagttcgtggccgccgacctgctgctgctgagcagcagcgagccccacggcctgtgctacgtggagaccgccgagctggacggcgagaccaacctgaaggtgagacacgccctgagcgtgaccagcgagctgggcgccgacatcagcagactggccggcttcgacggcatcgtggtgtgcgaggtgcccaacaacaagctggacaagttcatgggcatcctgagctggaaggacagcaagcacagcctgaacaacgagaagatcatcctgagaggctgcatcctgagaaacaccagctggtgcttcggcatggtgatcttcgccggccccgacaccaagctgatgcagaacagcggcaagaccaagttcaagagaaccagcatcgacagactgatgaacaccctggtgctgtggatcttcggcttcctgatctgcctgggcatcatcctggccatcggcaacagcatctgggagagccagaccggcgaccagttcagaaccttcctgttctggaacgagggcgagaagagcagcgtgttcagcggcttcctgaccttctggagctacatcatcatcctgaacaccgtggtgcccatcagcctgtacgtgagcgtggaggtgatcagactgggccacagctacttcatcaactgggacagaaagatgtactacagcagaaaggccatccccgccgtggccagaaccaccaccctgaacgaggagctgggccagatcgagtacatcttcagcgacaagaccggcaccctgacccagaacatcatgaccttcaagagatgcagcatcaacggcagaatctacggcgaggtgcacgacgacctggaccagaagaccgagatcacccaggagaaggagcccgtggacttcagcgtgaagagccaggccgacagagagttccagttcttcgaccaccacctgatggagagcatcaagatgggcgaccccaaggtgcacgagttcctgagactgctggccctgtgccacaccgtgatgagcgaggagaacagcgccggcgagctgatctaccaggtgcagagccccgacgagggcgccctggtgaccgccgccagaaacttcggcttcatcttcaagagcagaacccccgagaccatcaccatcgaggagctgggcaccctggtgacctaccagctgctggccttcctggacttcaacaacaccagaaagagaatgagcgtgatcgtgagaaaccccgagggccagatcaagctgtacagcaagggcgccgacaccatcctgttcgagaagctgcaccccagcaacgaggtgctgctgagcctgaccagcgaccacctgagcgagttcgccggcgagggcctgagaaccctggccatcgcctacagagacctggacgacaagtacttcaaggagtggcacaagatgctggaggacgccaacgccgccaccgaggagagagacgagagaatcgccggcctgtacgaggagatcgagagagacctgatgctgctgggcgccaccgccgtggaggacaagctgcaggagggcgtgatcgagaccgtgaccagcctgagcctggccaacatcaagatctgggtgctgaccggcgacaagcaggagaccgccatcaacatcggctacgcctgcaacatgctgaccgacgacatgaacgacgtgttcgtgatcgccggcaacaacgccgtggaggtgagagaggagctgagaaaggccaagcagaacctgttcggccagaacagaaacttcagcaacggccacgtggtgtgcgagaagaagcagcagctggagctggacagcatcgtggaggagaccatcaccggcgactacgccctgatcatcaacggccacagcctggcccacgccctggagagcgacgtgaagaacgacctgctggagctggcctgcatgtgcaagaccgtgatctgctgcagagtgacccccctgcagaaggcccaggtggtggagctggtgaagaagtacagaaacgccgtgaccctggccatcggcgacggcgccaacgacgtgagcatgatcaagagcgcccacatcggcgtgggcatcagcggccaggagggcctgcaggccgtgctggccagcgactacagcttcgcccagttcagatacctgcagagactgctgctggtgcacggcagatggagctacttcagaatgtgcaagttcctgtgctacttcttctacaagaacttcgccttcaccctggtgcacttctggttcggcttcttctgcggcttcagcgcccagaccgtgtacgaccagtggttcatcaccctgttcaacatcgtgtacaccagcctgcccgtgctggccatgggcatcttcgaccaggacgtgagcgaccagaacagcgtggactgcccccagctgtacaagcccggccagctgaacctgctgttcaacaagagaaagttcttcatctgcgtgctgcacggcatctacaccagcctggtgctgttcttcatcccctacggcgccttctacaacgtggccggcgaggacggccagcacatcgccgactaccagagcttcgccgtgaccatggccaccagcctggtgatcgtggtgagcgtgcagatcgccctggacaccagctactggaccttcatcaaccacgtgttcatctggggcagcatcgccatctacttcagcatcctgttcaccatgcacagcaacggcatcttcggcatcttccccaaccagttccccttcgtgggcaacgccagacacagcctgacccagaagtgcatctggctggtgatcctgctgaccaccgtggccagcgtgatgcccgtggtggccttcagattcctgaaggtggacctgtaccccaccctgagcgaccagatcagaagatggcagaaggcccagaagaaggccagaccccccagcagcagaagacccagaaccagaagaagcagcagcagaagaagcggctacgccttcgcccaccaggagggctacggcgagctgatcaccagcggcaagaacatgagagccaagaaccccccccccaccagcggcctggagaagacccactacaacagcaccagctggatcgagaacctgtgcaagaagaccaccgacaccgtgagcagcttcagccaggacaagaccgtgaagctgtag

SEQ ID NO: 217085 - DNA, 3579 bp, Artificial Sequence
  derived and/or modified sequence
atgttttgcagcgagaagaagctgcgagaagtggagagaattgtgaaggccaatgatcgtgagtacaacgaaaagttccagtatgccgacaacagaatacataccagcaagtataatatattgacttttttgccaatcaatcttttcgagcagttccagagagtggccaatgcttacttcctttgcctgctcattttgcagctgataccagagatttcttctctgacgtggttcacaacaatcgtccctctcgttctcgttattacaatgaccgccgtcaaggatgcaacagatgactacttcagacacaagagcgacaaccaggtgaataatcggcagtccgaagtcctcattaattcgaagttacagaatgagaagtggatgaatgtgaaggtcggcgacatcatcaagctggagaacaatcagttcgtcgccgctgatcttctgttactctcatctagtgagccgcatgggctgtgctatgtggaaacagccgaactagacggggaaaccaatctgaaggtcaggcacgcactctctgtcacgagtgaactcggggctgatatatctaggctcgcaggctttgacggaattgtcgtttgtgaggttccgaacaacaagctggacaagttcatgggtatcctgtcgtggaaggattctaagcactctctgaataacgagaaaattattctacgtgggtgtatcctgaggaatacaagctggtgctttggtatggtgatcttcgccggccccgatacaaaactgatgcaaaacagtggcaaaacaaagttcaaaaggacgtccatagacagactgatgaatactttggttctttggatttttggcttccttatttgtctgggaattatcttagccatcgggaacagtatatgggagagccagaccggtgaccaattcaggactttccttttttggaacgaaggagagaagagttccgtcttctctgggtttttaacgttttggagctatatcatcatcctgaacaccgttgttcctatttcgctctatgtgtctgtggaggtgatacgactaggacacagctactttatcaattgggacagaaagatgtattactctaggaaggctatacccgccgtagcacgaaccaccacactgaacgaggagctgggccagatcgaatacattttttccgataagacaggcactttgactcagaacattatgacatttaagcggtgctcaatcaacggacgcatctatggcgaagtgcacgatgatctcgaccaaaaaaccgaaatcacccaagagaaggagccagtggacttctctgttaagtcacaagcggatcgagagttccagtttttcgatcatcatttgatggagtccatcaaaatgggggaccccaaggtgcacgagtttctcagactccttgcactctgtcacaccgtgatgtcggaggagaattccgccggcgaactgatataccaggtgcagagtccggacgaaggggccctggtaactgcggcccggaattttgggtttatcttcaagtcccggacccccgagactattaccatcgaggaactcgggaccctggtcacctatcagcttctggccttccttgacttcaacaatacgaggaagcgaatgtctgtcattgtaaggaacccagaagggcaaatcaaactgtacagcaagggggcagacacaattctgttcgaaaaactccatccttctaatgaggtgcttctgagcttgacaagcgatcacctttcagaatttgctggtgagggattgcgcaccctagcaattgcttatcgcgacttggatgacaaatacttcaaagagtggcacaagatgttggaagacgccaacgccgccactgaggaaagagatgagaggattgctggactctacgaggaaatagaacgggacctcatgctgctgggagctacagcagtcgaggacaagttgcaggaaggcgtgatagaaaccgtgaccagcctgagcctagccaatattaagatctgggtgttaacgggtgataagcaagagactgccatcaatattggttatgcctgtaacatgctgactgatgatatgaacgacgtgttcgtgatagcaggtaacaatgccgtcgaggttagagaggagcttaggaaggccaagcagaatctctttggacagaatagaaacttctctaacggacacgtggtctgtgagaagaagcagcagttagagctagattcaatagtggaggaaacaattaccggggactatgctttaatcataaatggacactccctggcccacgcattagaatctgatgtgaaaaacgaccttcttgaactggcctgtatgtgtaagacagtgatctgctgtcgggtcactccgttgcagaaggctcaggtggttgagcttgtaaagaaatatcggaacgcggtgaccctggctattggggatggagcgaatgacgtgagtatgatcaaatctgctcatatcggggtggggatatccgggcaagaaggacttcaggcggtactcgcatcggactactctttcgcccaattcaggtatctgcagcggctcttgctcgtgcacggacggtggagctactttcgaatgtgcaagtttctctgctattttttttataagaactttgcatttaccctggtgcacttttggtttggattcttctgtgggttcagtgcccagaccgtgtacgaccagtggttcattacactgtttaacatagtgtatacgtccctgcctgtgctagccatgggtatattcgaccaggacgtgagcgaccagaattctgtggactgcccccagctctataagcctggtcagctgaacctcctttttaacaaacgtaaattcttcatctgtgtgctgcacggcatctacacctcgcttgtgttattctttatcccgtacggcgctttctataacgtcgccggcgaagacggccagcatatcgccgactaccagtcttttgctgtgaccatggccacctcactggtgatagtggtgtccgtccagatagctttggacaccagctattggacgtttatcaaccacgtgttcatctggggaagcatcgctatttatttctccatcctattcacaatgcacagtaacggtatttttggcattttccccaatcagtttccgtttgtaggtaatgcgcggcatagtctcacacagaaatgtatctggttggtcattttgctgaccacagtggcaagcgtcatgcctgtggtcgcttttcggtttctaaaagtcgacctctacccgacgcttagcgaccagatcagaagatggcagaaggcacagaaaaaggcgcggcccccttcctccaggagacctcgtacaagaaggtcttcttcacgtcggagcgggtacgctttcgcccatcaggaagggtatggggaactgattacctcgggcaaaaacatgagggctaaaaatcccccacccacctccgggctagagaaaacacattacaactcaacttcctggatcgaaaacctttgcaaaaagaccacagatactgtgagtagtttcagccaggacaagactgttaagctatag

SEQ ID NO: 217086 - DNA, 3579 bp, Artificial Sequence
  derived and/or modified sequence
atgttctgctctgaaaagaagctgagagaagtcgagcgtatagtgaaggccaacgaccgtgaatacaatgagaagttccagtacgccgacaacaggatccacacttctaaatataatatcttaacctttttgcccataaaccttttcgaacagttccagcgcgtcgcaaatgcttactttctctgccttcttatcctgcagctgattccagagattagctccttaacatggtttactacaatcgtgcctctggtcctggtgataacaatgacggccgtgaaagatgcaaccgacgattacttccgccataaatccgacaaccaagttaataatcggcagtctgaggtgctgatcaatagtaagctgcagaatgagaagtggatgaacgtgaaggtgggcgatatcatcaagcttgaaaataatcagtttgtggctgccgacctcctccttctgtccagttctgagccacacggtctgtgttacgtggaaactgcggaacttgacggtgaaactaatctgaaggtgcggcacgccctgtccgttacgtccgaactcggcgctgatatcagccgcctggcgggctttgatggtatagtggtctgtgaggtgcccaataacaaacttgataaatttatggggatcctcagctggaaggattcgaagcattctctaaataacgagaaaattattctgcggggatgcatcctcaggaacacctcatggtgcttcggcatggtgatctttgccggacctgatacaaaactgatgcagaatagtggaaagaccaagtttaaacgcaccagtatagacagactgatgaataccttggtgctgtggatcttcggcttcctgatctgtcttggcatcatccttgcgattggcaacagcatatgggagagccagaccggcgaccagtttcggacttttttattctggaacgaaggggagaagagtagtgtcttcagcggcttcctcactttctggagctatattatcatcctcaacaccgtggttccaatttcattgtacgtaagcgtagaagttatccgactcggccattcatacttcatcaattgggatcgtaaaatgtactattcacgaaaagccataccagccgtggctcgaaccacaacactgaacgaagaactgggacagattgagtatatcttctcggataaaactgggaccctgacacagaacattatgacctttaaacgctgttcaataaacgggcgcatttatggtgaggtgcatgatgatctcgaccaaaaaactgaaatcactcaggagaaggagcctgttgacttctccgtgaaaagccaggcagatagagaatttcagttctttgaccaccacctgatggagtccatcaaaatgggagacccgaaagtccatgaattcctgcgcttattggctttatgtcacacagtgatgtcagaagagaactccgcaggagaattaatttatcaggtgcagtcccctgacgagggggctctcgtgacagctgctagaaattttggtttcatattcaagtctcggactcccgaaaccattacaattgaggagcttgggacactggttacataccagctgctggcctttctagattttaacaacactcgaaagagaatgtctgtgatcgtcagaaatcctgaggggcagattaaactctactccaagggggccgatactatactcttcgaaaagctccacccaagcaatgaggtgcttctgtccctgacctcagaccacttgagcgaattcgccggggaagggctcagaaccctggccatagcttatagggatttggacgataaatattttaaagaatggcacaagatgctcgaggacgctaatgccgctactgaggagagagacgaaagaatcgcggggctgtatgaagaaatagaaagggacctcatgctcctgggcgcaaccgcagtggaggataagcttcaggagggtgtcatcgagaccgtcacctcgctttccctcgccaatattaaaatctgggtgttaaccggagataagcaagagacagctataaacatcggttacgcttgcaacatgcttaccgacgacatgaatgacgtatttgtgatcgcgggcaacaatgccgttgaagtgcgggaggaattgagaaaggcaaagcagaatctattcggtcagaaccgaaacttctctaacggacacgtcgtctgcgagaagaaacagcagctcgaattggatagcattgtcgaggagacgattactggcgactatgctctgatcatcaacggccattctcttgctcacgccctggaatcggacgtgaagaacgaccttctggaactagcatgcatgtgcaaaacggttatatgttgcagagttacgccattgcagaaggcccaggtcgttgaattagtcaagaagtaccggaacgctgtcaccctggctatcggtgacggggccaatgacgttagtatgatcaaaagcgcacacatcggagtcggaatatccggccaagaggggctccaggccgttcttgccagcgactacagctttgcccagtttcgctatcttcaacggctcctgttggttcatgggcgttggagctattttcggatgtgtaagtttttatgctattttttttataagaacttcgcttttacccttgtgcacttttggtttggcttcttttgcggctttagcgcccagaccgtatatgaccagtggttcattacactgttcaacattgtgtatacctcgttgccagtgctagctatgggaatcttcgatcaggatgtgtctgaccagaacagcgtggactgtccccagctctataaacccggtcagctgaatcttctctttaataaaaggaaatttttcatctgtgtccttcatggaatttatacaagtcttgtccttttcttcattccctatggcgcattctacaacgtggccggtgaggacggccagcacattgccgactaccagagttttgcagtcaccatggccactagcctggtgatcgttgtgagcgtgcagattgctcttgatactagttactggactttcataaaccatgttttcatctggggctctatcgctatttattttagcatcctattcactatgcacagtaacgggatatttggtatcttccccaatcagttcccattcgtgggtaatgcaagacacagcctgacacagaaatgcatttggctggtcatcctgctgactaccgtcgcctcggtgatgccagtcgtagctttcaggtttctgaaagtcgacttgtatcctactctgagtgatcagatccgtaggtggcaaaaagcccagaagaaggctcgacccccaagttcacgtaggccaaggacccgcaggagttctagcaggcgttctgggtacgcatttgcacatcaggaaggctatggagagctaataacatctgggaagaatatgcgggccaaaaaccccccacctaccagcgggcttgagaagacccactacaactccacttcttggattgaaaacctctgcaagaagacaactgatactgtgtcgagttttagtcaagacaaaacagtgaagctgtag

SEQ ID NO: 217087 - DNA, 3579 bp, Artificial Sequence
  derived and/or modified sequence
atgttctgcagcgagaagaagctgcgggaggtggagcgcatcgtgaaggccaatgaccgggagtacaatgagaagttccagtatgctgacaaccgcatccacaccagcaagtacaacatcctgaccttcctgcccatcaacctgtttgagcagttccagagggtggccaatgcctacttcctgtgcctgctgatcctgcagctgatccctgagatcagcagcctgacctggttcaccaccatcgtgcccctggtgctggtgatcaccatgacagctgtgaaggatgccacagatgactacttccgccacaagagtgacaaccaggtgaacaaccggcagagcgaggtgctgatcaacagcaagctgcagaatgagaagtggatgaatgtgaaggtgggggacatcatcaagctggagaacaaccagtttgtggccgctgacctgctgctgctgagcagcagcgagccccacggcctgtgctacgtggagacagctgagctggatggagagaccaacctgaaggtgagacatgccctgtctgtgaccagcgagctgggcgctgacatcagccggctggccggctttgatggcatcgtggtgtgtgaggtgcccaacaacaagctggacaagttcatgggcatcctgtcctggaaggacagcaagcacagcctgaacaatgagaagatcatcctgcggggctgcatcctgaggaacacctcctggtgcttcggcatggtgatctttgctggccctgacaccaagctgatgcagaacagcggcaagaccaagttcaagaggaccagcattgaccggctgatgaacaccctggtgctgtggatcttcggcttcctgatctgcctgggcatcatcctggccatcggcaacagcatctgggagagccagacaggagaccagttccgcaccttcctgttctggaatgaaggagagaagagctctgtgttcagcggcttcctgaccttctggagctacatcatcatcctgaacacagtggtgcccatcagcctgtatgtgtctgtggaggtgatccggctgggccacagctacttcatcaactgggacaggaagatgtactacagcaggaaggccatcccagctgtggcccggaccaccaccctgaatgaggagctgggccagatcgagtacatcttcagtgacaagacaggcaccctgacccagaacatcatgaccttcaagcgctgcagcatcaatggccgcatctacggggaggtgcatgatgacctggaccagaagacagagatcacccaggagaaggagcctgtggacttctctgtgaagagccaggccgaccgggagttccagttctttgaccaccacctgatggagagcatcaagatgggagaccccaaggtgcatgagttcctgcggctgctggccctgtgccacacagtgatgtctgaagaaaattctgctggggagctgatctaccaggtgcagagcccagatgaaggagccctggtgacagctgccaggaactttggcttcatcttcaagagcaggaccccagagaccatcaccatcgaggagctgggcaccctggtgacctaccagctgctggccttcctggacttcaacaacaccaggaagaggatgtctgtgattgtgagaaatcctgagggccagatcaagctgtacagcaaaggagctgacaccatcctgtttgagaagctgcaccccagcaatgaggtgctgctgagcctgaccagtgaccacctgtctgaatttgctggggagggcctgcggaccctggccatcgcctacagagacctggatgacaagtacttcaaggagtggcacaagatgctggaggatgccaatgctgccacagaggagagagatgaaagaattgctggcctgtatgaggagattgaaagagacctgatgctgctgggcgccacagctgtggaggacaagctgcaggagggcgtgattgaaacagtgaccagcctgagcctggccaacatcaagatctgggtgctgaccggggacaagcaggagacagccatcaacatcggctacgcctgcaacatgctgacagatgacatgaatgatgtgtttgtgattgctggcaacaatgctgtggaggtgcgggaggagctgaggaaggccaagcagaacctgtttggccagaacagaaacttcagcaatggacatgtggtgtgtgagaagaagcagcagctggagctggacagcatcgtggaggagaccatcactggagactatgccctgatcatcaatggccacagcctggcccacgccctggagagtgatgtgaagaatgacctgctggagctggcctgcatgtgcaagacagtcatctgctgccgggtgacccccctgcagaaggcccaggtggtggagctggtgaagaagtacagaaatgctgtgaccctggccatcggagatggagccaatgatgtgtccatgatcaagagcgcccacatcggcgtgggcatcagcggccaggagggcctgcaggccgtgctggccagtgactacagctttgcccagttccgctacctgcagaggctgctgctggtgcacggccgctggagctacttcaggatgtgcaagttcctgtgctacttcttctacaagaactttgccttcaccctggtgcacttctggtttggcttcttctgtggcttcagcgcccagacagtgtatgaccagtggttcatcaccctcttcaacatcgtgtacaccagcctgcctgtgctggccatgggcatctttgaccaggatgtgtctgaccagaacagcgtggactgcccccagctgtacaagccaggccagctgaacctgctcttcaacaagaggaagttcttcatctgtgtgctgcacggcatctacaccagcctggtgctcttcttcatcccctacggggccttctacaacgtggccggagaagatggccagcacatcgctgactaccagagctttgctgtgaccatggccaccagcctggtgattgtggtgtctgtgcagatcgccctggacaccagctactggaccttcatcaaccacgtgttcatctggggcagcatcgccatctacttcagcatcctcttcaccatgcacagcaatggcatcttcggcatcttccccaaccagttcccctttgtgggcaatgcccggcacagcctgacccagaagtgcatctggctggtgatcctgctgaccaccgtggcctctgtgatgcctgtggtggccttccgcttcctgaaggtggacctgtaccccaccctgagtgaccagatccgccgctggcagaaggcccagaagaaggcccggccccccagcagccggcggcccaggaccaggaggagcagcagccgccgcagcggctacgcctttgcccaccaggagggctacggggagctgatcaccagcggcaagaacatgagggccaagaaccccccacccaccagcggcctggagaagacccactacaacagcacctcctggattgagaacctgtgcaagaagaccacagacacagtgtcctccttcagccaggacaagacagtgaagctgtag

SEQ ID NO: 217088 - DNA, 3579 bp, Artificial Sequence
  derived and/or modified sequence
atgttctgcagcgagaagaagctgcgggaggtggagcggatcgtgaaggctaatgatagagagtacaatgaaaaatttcagtacgccgataataggattcacacatctaagtataacatcctcacattcctgccgattaatttgtttgagcagtttcagcgagtcgccaatgcctacttcctctgcctcctcattctgcaactgataccagaaatcagcagccttacgtggttcaccaccatcgttccccttgtgttagtaattacaatgaccgccgtgaaagatgccacggacgactattttcggcataagtctgacaatcaggtcaacaacagacagtctgaggtcctgatcaactccaagctccagaatgagaagtggatgaatgtgaaggtgggggacattatcaaattagaaaacaaccaatttgttgccgctgacctgctactcttgagcagctccgaacctcatggcctttgttatgttgagaccgcggagctggatggggaaaccaatctgaaagtgagacatgccctgtctgtcacatcagaactgggagccgacatcagtcggttggcaggatttgatgggatcgtggtctgtgaggtccccaacaacaagctcgacaaatttatgggtattctgagttggaaagacagcaagcacagcctcaataatgagaaaatcatcctgaggggctgcattctgaggaacaccagctggtgtttcgggatggtgatctttgcaggaccagacaccaaattgatgcagaactctgggaagaccaagtttaaacggacctctattgacagacttatgaatacacttgtgctctggatctttggcttcctgatttgcctcggcatcatcttagccataggcaatagtatttgggagagtcaaacaggtgatcagttcagaaccttcttgttctggaatgaaggcgaaaagtctagcgtgttcagcggttttttgactttttggtcttacatcataatccttaacactgtggtacctatcagtctgtatgtgtccgtggaagtaatccgcctgggtcactcatacttcataaactgggacaggaagatgtactactcacggaaagccattcccgctgtggccagaactacaactctgaatgaagagctcgggcaaatcgagtacatattttcagataagaccggcacactgactcagaacatcatgacatttaagagatgctcgattaacgggcgcatctatggtgaggtccatgatgatctcgaccaaaagaccgagattacacaagagaaggagccagtggattttagcgtcaaaagtcaggctgaccgggaattccagtttttcgatcaccacctgatggaatctatcaagatgggcgaccccaaagtgcatgaattcctccgcctcttagccctgtgtcatactgtcatgagcgaggagaactcagccggtgagttgatttatcaggtgcagtcaccagatgaaggtgctctagtaactgctgctcgcaacttcggattcattttcaagtctaggacaccagagaccatcactatcgaagaactgggaacactggtgacctatcagctgctagcgttcctggactttaacaatacaagaaagagaatgtccgtcatagtcagaaaccccgagggccagatcaagctctactcaaagggtgcagatactattctgtttgagaaacttcatcctagcaacgaagtgttactatccctgacctcagatcatctgagcgaatttgccggcgagggattacggacactggcaattgcatatagagacctagatgataagtacttcaaggaatggcacaagatgttggaggatgcaaatgcagcaacagaagagcgcgacgagcgcattgctgggctgtatgaagagatagaacgggatttgatgctcttaggagcgaccgccgtggaggacaagcttcaggagggcgtgatcgagaccgtaacctctttaagcctcgcaaacatcaagatctgggtgctcactggtgacaagcaggagacggctattaacatcggttatgcatgtaatatgttaacggacgatatgaatgacgttttcgtgatagctggcaataacgccgttgaggttagagaggagctgagaaaggctaagcagaacctgtttggccagaatcgtaacttctccaacggtcacgtggtctgtgaaaagaaacagcagcttgaactcgattccatagtggaggagactatcaccggagattatgcgctgattatcaatgggcacagcttagcccatgccctggaaagcgatgttaaaaatgacctgttggaactagcctgtatgtgtaaaacagttatatgctgccgggtcacaccactgcagaaagcccaagttgtggaactcgtgaagaagtacagaaatgccgtgacccttgccatcggggacggcgcgaatgacgtgagcatgataaaaagcgcccacatcggcgttggaatctccggacaagaaggcctccaggcggtactggctagtgattattcattcgcccagtttaggtacctgcagagattgctgctcgttcacgggcgatggagctattttagaatgtgtaaatttctgtgttactttttctacaaaaactttgccttcacccttgtgcacttctggttcggcttcttctgtggatttagcgcccaaactgtctacgatcagtggtttataactttgttcaatatcgtttacacgtcacttccggtgctggccatgggtatcttcgatcaggatgtgagcgaccagaactcagtggattgcccacagctttataagccagggcagctgaatcttctgttcaataagcggaagttttttatctgcgtgttacacgggatctacactagtttggtcctgttttttattccatacggggcattttataatgtggccggcgaggacggtcagcatatagccgattatcaatctttcgcagttactatggcaacatcgctagtgatcgtggtgagtgtccaaattgctctcgacacatcttactggacgttcattaatcacgtgtttatctggggtagcatcgccatttactttagtattctgtttaccatgcatagtaacggcatatttgggatttttcccaaccagtttccgtttgtggggaacgcaaggcatagcctgacccagaagtgcatttggctcgtaatactactcactacagtggcaagcgtcatgccagttgtcgcttttcgctttctgaaggtggacctatatcccactctatcagatcagatccgtaggtggcagaaagctcagaagaaggctcggcccccttcttcccgtcgccccagaacccggcggtcatcctccagacgctctgggtacgccttcgcgcaccaggagggttatggggagctaattacatctggaaaaaacatgcgcgcaaaaaatcccccaccaacatcagggctagaaaagactcattataattccaccagctggatcgaaaacttgtgcaaaaaaaccaccgacaccgtaagttcattctcccaggacaagaccgtgaagttgtag

SEQ ID NO: 217089 - DNA, 3579 bp, Artificial Sequence
  derived and/or modified sequence
atgttctgcagcgagaagaagctgcgggaggtggagcggatcgtgaaagccaatgatagagaatataacgagaaattccaatacgccgataatcgcatccacacaagcaaatataacattctgacttttcttcctatcaatctgttcgagcagtttcaaagggtggctaacgcctattttctgtgcttgttgatcctccagttgattcccgaaatttcctccctgacatggttcacgacaatagtgcctttggtgctggtcattacaatgactgcagtgaaagacgctacagatgactatttcagacataagtcggataatcaggtcaataatcgacagtccgaagttctaatcaatagtaagctgcaaaacgagaagtggatgaatgtcaaagtgggagacatcatcaagctcgaaaataaccagtttgttgctgccgaccttctcctgctgtcttcttcagagccacatgggttatgttacgtggagaccgccgaacttgacggagaaaccaatctgaaggtgcgccacgctctttctgtgacatctgagctgggagctgatatctccagactcgccggttttgatgggatagtggtgtgcgaggttccgaataacaagctggataagttcatgggaattttaagctggaaggatagtaaacacagcttgaataacgagaaaattatcctgcgggggtgtatcctgaggaataccagctggtgtttcgggatggtgattttcgcaggccctgatacaaagctcatgcagaatagcggcaagacaaagttcaagaggacttctatagacaggcttatgaacacccttgttttgtggattttcggcttcctgatctgtcttggcataatactggctataggaaatagtatctgggaatcccagactggggaccaatttaggaccttcctgttctggaatgaaggtgagaaaagctcagtgtttagtggctttctgaccttctggtcttatataattatcttgaataccgtggtgccaatctcactgtatgtttctgtggaggtgataagacttgggcactcttacttcatcaattgggatcgcaagatgtattactcacgcaaggccattcctgcagtagcccggacaacaactttaaatgaggaactgggccagattgaatacatctttagtgataaaacagggacactaacccagaacataatgactttcaagagatgctccatcaatgggcgaatttacggcgaggtccacgatgatctagaccaaaaaactgagatcacccaggaaaaggagcctgtggatttcagtgttaagtcccaggctgatagagagtttcagttcttcgatcaccatctcatggaatctatcaagatgggggatcccaaggtccacgagtttctgaggctgctcgccctgtgccacacagtgatgagcgaggagaattccgccggcgagctgatataccaagtgcaaagtccggatgagggagcactcgtgacagctgctcgcaacttcggcttcattttcaagagccggactccagagacaatcactatcgaagagcttggcactctggtgacctaccaattattagctttcctcgactttaacaacacgcgcaagcgcatgtctgtaatcgtgcgcaatccagagggccaaataaaactttatagcaagggtgcggacactatactgttcgagaaactccatcccagcaacgaggtgctactcagtcttacctctgatcatctgagtgaattcgcaggcgagggactcagaacactggccatagcctatcgagatctggacgataaatatttcaaggaatggcacaaaatgctggaggatgccaacgcggccaccgaggagcgtgacgaacggattgccggattatacgaagaaattgaacgggaccttatgttgctgggggcgactgctgtggaagataagctgcaggagggggttatagagactgttacaagtctgagcctggccaatataaagatctgggtgctcaccggtgataagcaggagaccgcaattaacatcggatatgcttgtaacatgctgacagatgacatgaacgatgtatttgtcatcgcaggaaacaatgccgttgaggttagagaggaactgagaaaagcaaaacagaatctcttcggacagaacaggaacttttctaacgggcatgttgtctgcgagaaaaagcaacagcttgagctggacagcatcgtcgaggaaaccatcacaggggactacgcacttatcatcaatggccactcactggcacacgccctagagagcgacgtcaagaacgacttgctggagctggcgtgcatgtgcaagacagtgatatgttgcagggtgacacccctgcagaaagcccaggtggtggagctggtcaagaagtacaggaacgccgtgaccctggctatcggggatggcgccaatgatgtttccatgattaagtccgcacacattggcgtagggattagcggccaagaaggtctgcaagccgttcttgcctcagattactccttcgcccaatttaggtatctccagcggttgctactggtccatgggcggtggtcttacttcagaatgtgtaaatttctgtgctactttttttataaaaattttgcctttactctggtgcacttctggttcgggtttttctgtggattttctgcccaaacagtatacgatcagtggttcattacgctctttaacatcgtctatacatccctgccagtgctggcgatgggaatcttcgaccaggatgtgagtgatcagaactctgtagattgccctcagctgtacaaacccggccagctgaacctactcttcaataagcgcaagttttttatttgtgtgttgcatggcatttatacctctctggtcctgtttttcattccctacggagccttctacaacgtggcaggcgaggatggacagcacattgcagactatcagtctttcgccgtcaccatggccactagtctcgttatagtagtgagcgtgcagatcgctcttgatacctcatactggactttcattaaccacgtcttcatatggggttcaatcgcaatctacttcagcatactttttacgatgcacagcaacggcatttttggaatcttccccaaccagttccccttcgttgggaacgcaaggcactctctcacccaaaagtgcatttggctcgttatcctgcttaccactgtcgcatccgtgatgcccgtagttgcgttcaggttcctgaaagtcgacctatatcccacattgtctgatcagattaggcggtggcagaaggctcaaaagaaggcccggcctccgagcagtcgaagacctagaacgaggcgctcaagctcaagacgctctgggtacgcattcgcgcaccaggaaggctatggggagctgatcacatccgggaaaaacatgagagcgaagaaccctccccctacaagtgggttggagaagacccattacaactccaccagttggatcgagaatctgtgcaagaaaacgacagacactgttagttccttttcacaagacaaaactgttaagttgtag

SEQ ID NO: 217090 - DNA, 3579 bp, Artificial Sequence
  derived and/or modified sequence
atgttttgctcagagaagaaactgagagaggtggagcgcatagtgaaagccaatgatagagaatacaacgaaaaatttcagtatgccgacaacaggatccacacttctaagtacaatatcctgacgttcttgccaatcaatctgttcgaacagtttcagagagtagcaaatgcttatttcctgtgcttgctcatactacaactcatacctgaaataagctcacttacatggttcactacaatcgtgccgttggtcctcgttatcactatgaccgcagtgaaggacgcaaccgatgattactttagacacaagtctgacaaccaggttaacaatcggcaatcagaggtgcttatcaactcaaagctgcagaatgagaagtggatgaatgttaaggttggcgatataatcaagctggagaacaaccagttcgtagccgctgacttactgctgttatctagctcggaaccccatggcctctgctatgttgagacggcggagctggacggcgaaacaaatttgaaggtgcgacatgcgctgtctgttacaagcgaactcggtgccgacatctcgagactcgcagggttcgatggcatagttgtttgtgaagtccctaataataaactggacaagtttatgggaatactgagttggaaagattcaaaacatagcctaaataatgagaagattatattgcgcggatgcattctacggaacaccagttggtgtttcggcatggtgatctttgcagggcctgacaccaaactgatgcagaactccgggaagactaagttcaagaggacatctatcgatcgtttgatgaatacgttagtgttgtggatctttggcttcctgatctgtctgggcatcatcctggccattggtaattcaatctgggaaagtcagacgggcgaccagtttaggaccttcctgttctggaatgagggggaaaaaagttctgtgttctctgggtttttaaccttctggagctatatcattatcttaaatactgttgtaccaatctccctgtatgtcagcgtagaagtgatcagactgggtcattcttattttataaattgggaccgtaaaatgtactactcccggaaggctatccccgcagtggccagaactactactttgaacgaggaactgggacaaatcgagtacatcttctccgataaaaccggtacgctaacccaaaatatcatgacctttaagaggtgcagtataaacggacgcatatacggcgaagtccacgatgacttagaccagaaaacggaaattactcaggagaaagaaccggtggactttagcgtgaagtcccaggccgaccgggagtttcaatttttcgatcaccatctaatggaaagcataaaaatgggcgaccctaaggttcatgagtttctccggttactggcgttgtgccacacggtaatgagcgaggaaaacagcgccggagagttgatttaccaagtacagagtccggacgagggtgcgctggtgacggcggctagaaactttggcttcatcttcaagtctagaacacctgaaaccattaccatcgaggaacttgggacgctggtgacttaccagctgcttgcttttctggactttaacaacacccggaagagaatgagtgtgatagtcaggaacccggagggccagattaaactttattcaaagggagccgataccatcttgttcgagaagctgcacccatcaaatgaagttttacttagtctaacttctgaccatctgtccgagtttgccggagaaggccttaggaccttagccatcgcctatcgagacttggatgataagtatttcaaagagtggcataagatgctggaagatgctaacgcagccactgaggaaagagacgaacgcattgctggactgtacgaggagatcgagagagaccttatgctcttaggggctacagcggtggaagacaaactccaggaaggcgtgattgagactgtgacttcacttagcctggcaaatatcaaaatctgggtccttaccggcgacaaacaggaaactgccatcaatatcgggtacgcctgcaacatgctcactgatgacatgaacgacgtgttcgtgattgctggcaataacgctgtggaggtacgggaggaactgcgtaaggctaaacaaaatctgttcgggcagaacagaaacttttcaaatggccatgtggtttgtgaaaagaagcagcagttagagttagacagtattgtggaagagaccatcaccggcgactacgccctcattattaatgggcactcgctggcacacgccctagagtctgacgttaagaatgacctgctggaactcgcttgcatgtgtaagacagtgatttgttgccgagtcaccccactgcagaaggcgcaagtggttgaattggtcaaaaagtatcggaacgcggtaactttggcaatcggagatggagctaacgacgtgtccatgatcaagtctgcgcacataggagttggcataagcggtcaagaaggtctgcaggccgttctggctagtgactactctttcgcccagtttaggtacctgcaacgactcctgctagtccacggacggtggtcatatttccgcatgtgtaaattcctctgctattttttttacaaaaattttgcttttacactcgtgcacttttggttcggcttcttttgcggattttccgcccagaccgtgtacgaccaatggtttattacactgttcaatatcgtttataccagccttccggtgctggctatggggatatttgatcaagacgtctcagaccagaatagtgtcgattgtccccaactatacaagcccggtcagcttaatcttctgtttaacaaaaggaagttctttatctgtgtcttgcacggcatttacacgtcactagttcttttctttattccttatggcgctttctacaacgtagccggtgaggacgggcagcacatagcggactatcagagtttcgcagtgacaatggcaacatccctcgtcatcgtcgtgtcagttcagatcgcccttgacacaagctactggacttttattaaccatgtgttcatctggggttcaatcgctatatatttctctatactgtttacgatgcattctaacggcatctttggcatctttcctaaccaattcccctttgtaggcaatgctcgccactcccttactcagaagtgtatttggttggtaattctgctgacaaccgtagcttccgtcatgcccgtggtggcctttcgtttcctgaaggtggacctgtatcctacccttagcgaccaaatccggcgatggcaaaaggctcagaagaaagccaggcccccatcaagtagacgtcccaggactaggaggtcctcgtccaggcggtctgggtacgcgttcgctcatcaggagggctatggcgaactgatcactagcggaaaaaacatgcgagccaagaaccctccgcctactagcggtctcgaaaaaacacactataatagcacaagctggattgagaatctttgcaagaagactaccgataccgtgagctcgttctcacaggataagaccgttaagctgtag

SEQ ID NO: 217091 - DNA, 3579 bp, Artificial Sequence
  derived and/or modified sequence
atgttttgtagtgagaaaaagctccgcgaagtcgaacgcattgttaaggcaaacgacagagaatataatgagaaattccaatatgccgataaccgaatacacactagcaagtacaatatactcacattcctgcctattaatcttttcgaacagttccagagagtggctaacgcctatttcctttgcttgctcatcttacaattgatccctgaaatctctagcctcacttggtttacaacaattgtgccactcgtccttgtgatcactatgacggccgtgaaggacgccaccgatgactacttccgccacaagagtgacaaccaggttaacaaccggcagtccgaggtgctgataaatagcaagctccagaatgaaaaatggatgaacgtgaaagtaggggacataatcaaactcgaaaacaatcaattcgtggccgcagatctgctgttattgtcctcctcggagccgcacggactctgttacgtggaaactgcggagctggacggcgagacaaatctcaaagttcgtcatgctctctccgtcacgtctgaactaggagccgacatatctcgtttggccggattcgatggcattgtggtgtgcgaggttcccaataacaaactggacaagttcatggggattctgtcatggaaagattctaagcattctctcaataatgaaaagattatcttaagaggatgcattctcagaaatacgtcctggtgttttggaatggttatcttcgcagggccagacaccaaattaatgcagaatagtggcaaaacgaagttcaaacgtacttctatcgacagacttatgaatactctggtcttgtggatctttgggtttttgatatgtcttggcatcatcctggcaatagggaattccatttgggagagccagacaggggatcagtttagaacatttctgttttggaatgagggcgagaagtcatcagtcttctccggatttttgacattctggagttacattatcattctaaacacagtggtccccatctctctgtatgtatccgtggaagtgattaggcttgggcattcatactttattaattgggataggaaaatgtattacagtcgaaaggctattcctgccgttgcacggaccacaactctgaacgaggagctcgggcagatcgagtacatcttcagtgacaaaactggtaccctgacccagaacataatgacattcaagaggtgttcgatcaacggcaggatctacggtgaagtccacgatgaccttgaccagaaaacagagattacccaagaaaaggaaccagtggacttttcggtgaagtcccaggccgaccgcgaattccagttcttcgatcaccatctgatggagtctataaagatgggtgaccctaaggtgcacgagttcctgcgcctgctcgccctttgtcacaccgtgatgtccgaagaaaactcagccggagagctcatctatcaggttcaatctcccgacgagggcgctctagtcacagccgcacggaacttcgggttcatcttcaaaagccggacccctgagacaattacaatcgaggagctggggacacttgttacatatcagctcctggcatttcttgacttcaataatacccggaagcggatgagcgtcatcgtccggaacccggagggacagatcaagttgtacagcaagggtgccgacacgattctgttcgaaaagctgcatccaagcaatgaggttctgctatcccttacctcagaccatctgagcgagtttgctggggaagggctaaggacactggctatcgcatacagagatctggacgataagtatttcaaggaatggcataagatgcttgaggacgcgaatgccgctacagaagagagggacgagcgcattgcagggctgtacgaggagatagagagggatctcatgctgttaggtgcaaccgccgtggaagacaaacttcaagaaggcgttattgagaccgtaacaagtctgagcctggctaatataaagatctgggtgctcaccggcgataagcaggaaaccgctatcaacatcggatacgcttgtaacatgctcaccgatgatatgaacgacgtgttcgtcatcgctggcaataacgctgtggaagtacgtgaagagctgagaaaggcaaaacagaacttattcggacagaatcgcaatttctcaaatggtcacgtggtgtgtgagaagaagcagcagttggagttggactccattgtggaagagactatcaccggcgattacgctttaataattaacggacatagccttgcacatgcgctggaaagcgacgtaaagaacgacctgctggaactggcttgcatgtgtaaaactgtcatttgttgcagggtcacccccctccaaaaagcccaggtggtggaactggttaaaaagtaccgaaacgccgtgaccctggcgattggggacggagcaaacgacgtgtcgatgataaagagcgcgcacatcggtgtggggatatccggacaagaggggctccaggccgtgctggctagtgactatagtttcgcccagttccggtatctgcagcgtctgttgctggtgcatggaagatggtcgtattttcgaatgtgtaaatttctgtgctattttttttacaaaaacttcgctttcaccctggtgcatttctggttcggattcttctgtggcttttccgctcagaccgtgtatgaccaatggttcatcacactctttaatatcgtgtacacttccctgcctgttctggccatgggaatcttcgaccaggacgtgtcggaccagaatagcgtagactgccctcagttgtataaacccggtcagctaaatcttctcttcaacaaacgcaagttcttcatatgcgttctccatgggatttataccagcctcgtcttgttctttatcccatacggtgcattttacaatgttgccggagaggacgggcaacacatagccgactaccaaagtttcgcagttaccatggcaacctccctggtgatcgtggtgtccgtccagatcgctctggacactagttattggaccttcattaatcatgtgttcatttggggttccatcgccatctacttcagtatcctattcactatgcactccaatgggattttcggcatcttccccaatcagtttcctttcgttggaaatgccagacattccctgacacagaaatgcatttggttggtcatattgctaaccacagtcgcatctgttatgcccgtcgtggctttccggtttttgaaagtcgacttgtaccctactctttctgaccagatacggcgatggcagaaggcccagaagaaagcacggccaccgagttctcggagaccccgaacacgacgctcatcttccaggcgctcaggatatgcctttgcacaccaggaaggctatggtgagcttattacatcaggcaagaacatgcgcgctaagaacccccctcccaccagtggtctggagaagactcactacaattctacatcctggatagaaaacctctgtaaaaagacaaccgatacagtgtcttcctttagtcaagacaagacggtcaagttgtag

SEQ ID NO: 217092 - protein, 743 aa, Artificial Sequence
  derived and/or modified sequence
MLHFNRCHHLKKITQKCFSSIHVKTDKHAQRFLSRTFALAELRKSWYSTHSLVGDKNIILMGPPGAGKTTVGRIIGQKLGCCVIDVDDDILEKTWNMSVSEKLQDVGNEQFLEEEGKAVLNFSASGSVISLTGSNPMHDASMWHLKKNGIIVYLDVPLLDLICRLKLMKTDRIVGQNSGTSMKDLLKFRRQYYKKWYDARVFCESGASPEEVADKVLNAIKRYQDVDSETFISTRHVWPEDCEQKVSAKFFSEAVIEGLASDGGLFVPAKEFPKLSCGEWKSLVGATYVERAQILLERCIHPADIPAARLGEMIETAYGENFACSKIAPVRHLSGNQFILELFHGPTGSFKDLSLQLMPHIFAHCIPPSCNYMILVATSGDTGSAVLNGFSRLNKNDKQRIAVVAFFPENGVSDFQKAQIIGSQRENGWAVGVESDFDFCQTAIKRIFNDSDFTGFLTVEYGTILSSANSINWGRLLPQVVYHASAYLDLVSQGFISFGSPVDVCIPTGNFGNILAAVYAKMMGIPIRKFICASNQNHVLTDFIKTGHYDLRERKLAQTFSPSIDILKSSNLERHLHLMANKDGQLMTELFNRLESQHHFQIEKALVEKLQQDFVADWCSEGECLAAINSTYNTSGYILDPHTAVAKVVADRVQDKTCPVIISSTAHYSKFAPAIMQALKIKEINETSSSQLYLLGSYNALPPLHEALLERTKQQEKMEYQVCAADMNVLKSHVEQLVQNQFI

SEQ ID NO: 217093 - DNA, 2232 bp, Artificial Sequence
  derived and/or modified sequence
atgctgcacttcaacagatgccaccacctgaagaagatcacccagaagtgcttcagcagcatccacgtgaagaccgacaagcacgcccagagattcctgagcagaaccttcgccctggccgagctgagaaagagctggtacagcacccacagcctggtgggcgacaagaacatcatcctgatgggcccccccggcgccggcaagaccaccgtgggcagaatcatcggccagaagctgggctgctgcgtgatcgacgtggacgacgacatcctggagaagacctggaacatgagcgtgagcgagaagctgcaggacgtgggcaacgagcagttcctggaggaggagggcaaggccgtgctgaacttcagcgccagcggcagcgtgatcagcctgaccggcagcaaccccatgcacgacgccagcatgtggcacctgaagaagaacggcatcatcgtgtacctggacgtgcccctgctggacctgatctgcagactgaagctgatgaagaccgacagaatcgtgggccagaacagcggcaccagcatgaaggacctgctgaagttcagaagacagtactacaagaagtggtacgacgccagagtgttctgcgagagcggcgccagccccgaggaggtggccgacaaggtgctgaacgccatcaagagataccaggacgtggacagcgagaccttcatcagcaccagacacgtgtggcccgaggactgcgagcagaaggtgagcgccaagttcttcagcgaggccgtgatcgagggcctggccagcgacggcggcctgttcgtgcccgccaaggagttccccaagctgagctgcggcgagtggaagagcctggtgggcgccacctacgtggagagagcccagatcctgctggagagatgcatccaccccgccgacatccccgccgccagactgggcgagatgatcgagaccgcctacggcgagaacttcgcctgcagcaagatcgcccccgtgagacacctgagcggcaaccagttcatcctggagctgttccacggccccaccggcagcttcaaggacctgagcctgcagctgatgccccacatcttcgcccactgcatcccccccagctgcaactacatgatcctggtggccaccagcggcgacaccggcagcgccgtgctgaacggcttcagcagactgaacaagaacgacaagcagagaatcgccgtggtggccttcttccccgagaacggcgtgagcgacttccagaaggcccagatcatcggcagccagagagagaacggctgggccgtgggcgtggagagcgacttcgacttctgccagaccgccatcaagagaatcttcaacgacagcgacttcaccggcttcctgaccgtggagtacggcaccatcctgagcagcgccaacagcatcaactggggcagactgctgccccaggtggtgtaccacgccagcgcctacctggacctggtgagccagggcttcatcagcttcggcagccccgtggacgtgtgcatccccaccggcaacttcggcaacatcctggccgccgtgtacgccaagatgatgggcatccccatcagaaagttcatctgcgccagcaaccagaaccacgtgctgaccgacttcatcaagaccggccactacgacctgagagagagaaagctggcccagaccttcagccccagcatcgacatcctgaagagcagcaacctggagagacacctgcacctgatggccaacaaggacggccagctgatgaccgagctgttcaacagactggagagccagcaccacttccagatcgagaaggccctggtggagaagctgcagcaggacttcgtggccgactggtgcagcgagggcgagtgcctggccgccatcaacagcacctacaacaccagcggctacatcctggacccccacaccgccgtggccaaggtggtggccgacagagtgcaggacaagacctgccccgtgatcatcagcagcaccgcccactacagcaagttcgcccccgccatcatgcaggccctgaagatcaaggagatcaacgagaccagcagcagccagctgtacctgctgggcagctacaacgccctgccccccctgcacgaggccctgctggagagaaccaagcagcaggagaagatggagtaccaggtgtgcgccgccgacatgaacgtgctgaagagccacgtggagcagctggtgcagaaccagttcatctag

SEQ ID NO: 217094 - DNA, 2232 bp, Artificial Sequence
  derived and/or modified sequence
atgctgcacttcaataggtgccatcacctgaaaaaaataacccaaaagtgttttagcagcattcatgtgaaaaccgacaaacatgcccagcggttccttagccgaacctttgccctggccgagctgagaaaatcatggtactctactcacagtctagtcggagataaaaatatcattttgatgggccccccaggtgccgggaaaaccactgtggggcggatcatcggtcaaaaattgggatgttgcgtgatcgacgtcgatgacgacatcctggaaaagacttggaacatgagcgtgtcagaaaagctgcaagatgttggaaacgagcagttcctggaggaagagggtaaggccgtgctcaatttctctgccagtggatcggttatctcactgaccggaagtaacccaatgcacgacgcgtctatgtggcaccttaaaaaaaatggcattattgtctacctggacgtcccgcttctggacctcatttgtcgcttgaaactcatgaagactgacagaatagttggccaaaattctggaactagtatgaaagacctgttgaaatttcgcagacagtactacaagaaatggtatgatgcccgcgtattttgtgagtccggagcctcccccgaggaggtggcagacaaggtgctcaatgccataaagcggtaccaggatgtggactccgagacctttatctctaccagacacgtgtggcccgaagactgtgaacagaaggtttctgccaaatttttctccgaggcggtcatcgagggcctggcatcagacggcggtttgtttgtgccagccaaggaattcccaaaactgtcatgtggcgaatggaagtccttggttggtgccacctacgtggaaagggcacagatcttgctagaaagatgcatacatcctgccgacattcctgctgcacgtttgggagaaatgattgagacagcttacggcgagaacttcgcctgttcgaaaatcgcgcccgtgcggcacttgtctgggaatcagttcatcttggaactgtttcatggccctacaggctccttcaaagacttgagccttcaactgatgcctcatatctttgcacactgcatcccaccctcctgtaattacatgattttggtggcgacttcaggagacacaggttctgctgtgttaaacggattttcacgcttgaacaagaacgacaagcaaaggatcgccgtggtcgccttcttcccagagaatggcgtatccgacttccagaaagcccagattattgggtcgcaacgggaaaacggttgggcagtgggtgtggaatcagacttcgacttctgtcagaccgccatcaaaagaatattcaacgactcagacttcaccggtttcctcacggtcgaatacggtaccatactctcgtccgccaacagcatcaactggggtcgcctacttccccaggtggtctaccatgccagcgcttatctggatcttgtaagtcagggtttcatctcctttgggtcacctgtcgatgtatgcatccctactggcaacttcggcaacatcctggccgctgtgtacgctaagatgatgggaatcccgatacgaaagtttatctgcgccagcaatcagaaccacgtactgaccgacttcataaagactgggcattacgacctgcgtgagcggaaactagctcaaacctttagtccatcaatcgatatcctgaaatcatctaatctcgagaggcacctgcacctgatggccaataaggacggacagcttatgactgagctttttaaccgcctggagtcccagcatcacttccagattgaaaaagcgcttgtcgagaaactacagcaggactttgtggcggactggtgtagcgagggcgagtgtctggccgccatcaatagcacgtacaatacatcaggttatatccttgatccccatacagccgttgcaaaggtagtagccgatcgcgtacaagacaagacctgtccggttattatctcctccaccgcacactacagcaaattcgcacccgccatcatgcaggctctgaaaatcaaggagattaatgaaacatcctctagccagttgtatcttctcggctcctacaacgccctgcctccactgcacgaagcactgctggagcgaaccaaacaacaggaaaagatggagtatcaagtgtgtgctgcggacatgaacgttctgaagtcccacgtggaacagctcgtacagaatcagttcatctag

SEQ ID NO: 217095 - DNA, 2232 bp, Artificial Sequence
  derived and/or modified sequence
atgctccacttcaatagatgtcaccatcttaaaaagatcacccagaagtgcttttcctctattcatgttaaaacagataaacacgcccagcgctttttgtctcgcaccttcgcactggccgaactgaggaaaagctggtactccacgcattccctcgtgggggataagaacattatcctgatgggcccaccaggagcgggcaaaacgacggttggcagaatcattggccagaaactcggctgctgcgtgatcgatgtcgacgatgacattctagagaaaacatggaacatgtcagtctccgaaaaactccaggacgtgggaaacgaacagtttctggaagaagaggggaaagccgtcctgaacttctccgcatctggtagcgttataagtcttacagggagcaacccgatgcacgacgcttctatgtggcacctgaaaaagaacggaattattgtgtacctcgatgtgcccctgctcgacttaatctgtagactgaagttgatgaaaacggaccggatagtgggacaaaattcaggaacctctatgaaggacttactcaaatttcggcggcagtattacaagaaatggtatgatgctcgagtcttctgcgagtccggagcttcccctgaggaggttgctgacaaggttcttaacgccattaaacggtatcaggatgtggactccgaaaccttcattagcacacgacacgtgtggcccgaggactgcgaacagaaggtgagtgcaaagttcttcagtgaggctgttattgaaggattagcttccgatgggggtctgttcgtccctgccaaggaatttcccaaactgtcttgtggtgaatggaagagtctggtgggagctacgtacgtggagcgggcgcagatcctgcttgagcggtgtatccacccagccgacattcctgccgcccgtctcggggagatgattgaaactgcctacggtgagaacttcgcctgctccaaaatagcacccgtcagacacctgtccggaaatcagtttatcctggagctcttccacgggcccacgggtagcttcaaggatctgtctctccagctcatgcctcatattttcgcccattgtatccccccaagctgtaattacatgatcctggtagcaacatctggcgatacaggcagtgccgtgctcaacgggttcagtagactgaataagaacgataagcagcgaatcgccgttgtggctttctttcctgaaaatggagtgagtgatttccaaaaggctcagataattgggtctcagcgggagaatggctgggctgtcggggttgagtctgatttcgatttttgccagacggctattaagaggatatttaacgattcagattttacgggctttctgacagttgagtatggcacaattctctcttccgcaaacagcattaattggggcaggctcctaccccaggtagtgtaccacgcatccgcttatttagacctcgtatcacagggattcatctcctttggctctccagtggatgtttgtattcccacgggtaattttggcaacatattggctgcggtctacgctaaaatgatggggattccaatccgcaagttcatctgtgcttccaaccagaaccacgtcctcaccgacttcatcaaaaccggacattatgacctgcgagagcggaagttggctcagactttttccccaagcatcgacattctcaaatcctctaatctagaaaggcacctgcatttgatggccaacaaagacgggcaacttatgacagaactcttcaatcgcctggagtcccagcaccactttcaaattgaaaaagcactcgtggagaaactgcagcaggacttcgtggctgactggtgcagtgagggagagtgcttggctgccattaattccacatataacacatccggttatatactggatcctcacacagctgttgcaaaggtggtggccgaccgcgtacaggacaagacctgccctgtaatcattagctcgaccgcccactattcaaaattcgccccggcaattatgcaggcactcaagattaaagagattaacgagaccagcagctcacagctgtatctactcgggagctacaacgccctacccccactgcacgaggccctgttagagcgaaccaaacagcaagagaagatggaataccaggtatgcgctgctgatatgaacgtgctgaagagtcatgttgagcagttagtccaaaaccagtttatctag

SEQ ID NO: 217096 - DNA, 2232 bp, Artificial Sequence
  derived and/or modified sequence
atgctgcacttcaaccgctgccaccacctgaagaagatcacccagaagtgcttcagcagcatccacgtgaagacagacaagcacgcccagcgcttcctgagcaggacctttgccctggccgagctgaggaagtcctggtacagcacccacagcctggtgggggacaagaacatcatcctgatgggccccccaggggccggcaagaccaccgtgggccgcatcatcggccagaagctgggctgctgcgtgattgatgtggatgatgacatcctggagaagacctggaacatgtctgtgtctgagaagctgcaggatgtgggcaatgagcagttcctggaggaggagggcaaggctgtgctgaacttcagcgccagcggcagcgtcatcagcctgaccggcagcaaccccatgcatgatgcctccatgtggcacctgaagaagaatggcatcatcgtgtacctggatgtgcccctgctggacctgatctgccgcctgaagctgatgaagacagacagaattgtgggccagaacagcggcacctccatgaaggacctgctgaagttccggcggcagtactacaagaagtggtatgatgcccgggtcttctgtgagagcggggccagccctgaggaggtggccgacaaggtgctgaatgccatcaagcgctaccaggatgtggacagcgagaccttcatcagcaccaggcatgtgtggccagaggactgtgagcagaaggtgtctgccaagttcttcagcgaggccgtcatcgagggcctggccagtgatggcggcctgtttgtgcctgccaaggagttccccaagctgagctgtggggagtggaagagcctggtgggcgccacctacgtggagcgggcccagatcctgctggagcgctgcatccaccctgctgacatcccagctgcccggctgggggagatgattgaaacagcctacggggagaactttgcctgcagcaagatcgcccctgtgcgccacctgagcggcaaccagttcatcctggagctgttccacggccccaccggcagcttcaaggacctgagcctgcagctgatgccccacatctttgcccactgcatcccccccagctgcaactacatgatcctggtggccaccagcggggacaccggcagcgctgtgctgaatggcttcagccggctgaacaagaatgacaagcagagaattgctgtggtggccttcttcccagaaaatggagtgtctgacttccagaaggcccagatcatcggcagccagcgggagaatggctgggccgtgggcgtggagagtgactttgacttctgccagacagccatcaagaggatcttcaatgacagcgacttcaccggcttcctgactgtggagtatggcaccatcctgagcagcgccaacagcatcaactggggccgcctgctgccccaggtggtgtaccacgccagcgcctacctggacctggtgtcccagggcttcatcagctttggcagccctgtggatgtgtgcatccccaccggcaactttggaaacatcctggccgctgtgtatgccaagatgatgggcatccccatcaggaagttcatctgtgccagcaaccagaaccacgtgctgacagacttcatcaagacaggccactatgacctgcgggagaggaagctggcccagaccttcagccccagcattgacatcctgaagagcagcaacctggagcggcacctgcacctgatggccaacaaggatggccagctgatgacagagctgttcaaccggctggagagccagcaccacttccagatcgagaaggccctggtggagaagctgcagcaggactttgtggccgactggtgcagtgaaggagaatgtctggccgccatcaacagcacctacaacaccagcggctacatcctggacccccacacagctgtggccaaggtggtggccgacagagtgcaggacaagacctgccctgtgatcatcagcagcacagcccactacagcaagtttgccccagccatcatgcaggccctgaagatcaaggagatcaatgagaccagcagcagccagctgtacctgctgggcagctacaatgccctgccccccctgcacgaggccctgctggagaggaccaagcagcaggagaagatggagtaccaggtgtgtgccgctgacatgaatgtgctgaagagccacgtggagcagctggtgcagaaccagttcatctag

SEQ ID NO: 217097 - DNA, 2232 bp, Artificial Sequence
  derived and/or modified sequence
atgctgcacttcaaccggtgccaccacctgaagaagatcacccagaaatgcttctcctccattcatgtgaaaacagataagcacgcccagcgtttcctttcaaggaccttcgctttggcagagctgcgcaagtcttggtactctacccattctctagtgggcgacaaaaacatcatcctgatggggcccccaggggccggaaagacaaccgtgggacgtatcataggacaaaagcttgggtgttgcgttattgatgttgacgatgacattctagaaaaaacctggaacatgtccgtgtcagaaaagttgcaggacgtcggtaatgaacagttcctggaggaagaggggaaggccgtacttaatttttcagcaagcggaagtgtgattagtctgaccggctcaaacccaatgcatgacgcatcaatgtggcacctgaaaaagaacggaatcatcgtgtatctagatgttccacttctcgatctgatatgcaggcttaagttaatgaagactgaccggatcgtcgggcagaacagcgggacatcaatgaaagacttactgaaattcagacggcaatactacaagaagtggtatgacgcccgggtattctgtgaatccggggcctcccctgaggaagtcgctgacaaagtgctgaatgcaatcaagaggtaccaggatgtcgacagcgagacctttatcagcacacgccatgtgtggcctgaagactgtgaacagaaagtttccgcaaagttcttctccgaagcggtgatcgagggcctcgctagcgacgggggcctattcgtgccggcaaaggagtttcccaaattgtcttgtggagaatggaaaagtctagtgggcgcgacctacgtggaaagagcccagattcttcttgaacgttgcattcatccagcggatatccccgccgcaagacttggggaaatgatcgaaacggcctacggagagaactttgcgtgttctaaaatagcacccgtgaggcatcttagcggaaatcaatttatcctcgagctgtttcacgggccaaccggatcgtttaaggatttgtcgctccagctcatgcctcatattttcgcacattgcatcccacctagctgcaactacatgatactggtagctacctccggtgacactgggagtgccgtccttaatgggttcagccgcctcaacaagaatgacaaacagcgtattgcagtcgtcgccttcttccctgaaaatggggtctctgatttccagaaggctcagattatcggttctcaacgcgagaacgggtgggcagtaggtgtagaatccgacttcgatttttgccagacagccattaaacgtatcttcaatgacagcgatttcactgggtttctgactgtggaatacgggactatactgtctagtgccaacagcatcaattggggacgcctgttgcctcaagtagtgtaccatgcaagcgcatacctggacttagttagtcagggctttatctcctttgggtcccctgttgacgtctgcatccctaccgggaactttggaaatattctggcggcggtatacgctaaaatgatgggcatcccaatccggaaatttatctgtgccagcaatcagaaccacgtccttactgatttcataaagacaggccattatgacttgcgggagcggaagctcgcccagacctttagtcccagtattgatatcctcaaatcaagcaatctggaacgtcacttacacctcatggcgaataaggacggccagctgatgacagagctgttcaaccggctggaaagtcaacatcattttcagatcgagaaagccctggtggaaaagctgcagcaggactttgttgccgattggtgcagcgaaggtgagtgtctggcggccatcaactcaacttataacacaagcggctacatcctagaccctcacactgccgtcgctaaggtggtcgccgaccgagtgcaggacaagacatgtcccgtgatcatcagctctacagcccactatagtaagttcgccccagctatcatgcaagcgctcaagatcaaagagataaacgagaccagctcttcacagctgtacttacttggtagctacaacgcgctccctcctttacacgaggcactgttagagcgcacaaaacagcaagagaaaatggaataccaagtctgtgctgcggatatgaacgttctcaagtcacacgtcgagcaacttgtccaaaatcagttcatctag

SEQ ID NO: 217098 - DNA, 2232 bp, Artificial Sequence
  derived and/or modified sequence
atgctgcacttcaaccggtgccaccacctgaagaagatcacccagaaatgcttttcctcaatccacgtgaagaccgataagcacgcgcagcgattcctctctagaacgtttgcactggcagaactgaggaagtcatggtacagcactcactcactcgtcggcgacaagaatattatactcatgggaccgccgggggccggtaaaaccaccgttggccgtattataggccagaagctcggatgttgtgtaattgacgtggacgacgacatcttagaaaagacatggaacatgtcagtcagtgaaaagctgcaggacgttggaaacgagcagtttctggaggaggagggcaaggccgtgctgaattttagtgcctccggatctgtgatttctttgacagggtcgaatcctatgcacgatgcaagtatgtggcacctgaagaaaaatggaataatcgtgtatctagatgtgcctctgctagacttgatctgccggctgaaactgatgaagaccgataggatcgtcggtcagaactctggcacatccatgaaagacttgctgaagttcaggcggcagtactacaaaaaatggtacgatgcacgagtcttttgtgagtcaggtgccagcccggaggaagtggccgacaaggtgctgaatgcgataaagaggtaccaggatgtggattcagaaacgttcattagtacccggcatgtttggcctgaggactgtgaacagaaagtgtcggccaagttcttctcagaggcagttatagaaggactcgcctccgatggaggactcttcgttccagcgaaggagtttcccaaactgtcctgcggcgaatggaaaagcttagtcggggctacttacgttgaacgagcacagatcctgctggagcggtgcattcaccctgccgacatccccgcggccagactaggtgaaatgattgagaccgcgtacggtgaaaatttcgcctgcagtaagatcgcacccgtgagacacctgagcgggaaccagtttatcctggagttgttccatgggcctaccggctcatttaaggaccttagccttcagctgatgcctcatattttcgcccattgcatccccccatcttgtaattacatgatcctggtggctacatccggtgatactggcagtgctgttctgaatggtttctcaagattgaataagaatgacaagcagaggatcgccgttgtcgccttctttcctgaaaatggtgtgagcgatttccagaaggcacaaatcatcgggtcccaacgggaaaacggctgggccgttggcgtcgagagtgactttgacttttgtcagaccgccattaaacgaatctttaatgacagcgactttactgggtttctaacagtggaatacgggacaatcctgagtagcgctaatagcatcaattggggtcggctcctgccacaggttgtatatcatgccagtgcttacctggatctggtgtcacagggcttcatttccttcggtagcccagtagacgtttgtattccaacaggtaacttcggcaatattctggccgccgtatatgccaagatgatgggcatccctatccggaaatttatttgtgcatctaatcagaatcacgtgctgacagatttcatcaagaccggccactatgacctgcgcgagcggaaattggcgcaaactttctcccccagtattgatattctgaaatccagcaacttggaacgacatctgcacctgatggcaaacaaggacggccagcttatgacagaactgttcaataggttagaaagtcagcatcacttccagatcgagaaggcactggtggagaaacttcagcaggacttcgtggccgactggtgcagcgaaggcgagtgtctagccgctattaactcaacgtacaatacatccggctatattctggatccccacacagcggtcgccaaagttgtggccgaccgggtccaggacaagacttgtcctgtaatcatctccagcactgcacactactcaaagttcgcacccgcaattatgcaggccttgaagattaaagagatcaatgagacttctagtagccagctgtatctgctcggctcttataatgccttgcctccactgcacgaggcccttttggaacgcactaagcaacaggagaaaatggaatatcaggtttgtgcagccgacatgaacgtactcaaatcccatgttgagcaactggtgcaaaaccagtttatttag

SEQ ID NO: 217099 - DNA, 2232 bp, Artificial Sequence
  derived and/or modified sequence
atgctccactttaatagatgccatcatctcaagaagatcacccagaaatgcttttccagcattcacgtcaaaacagacaaacacgcgcagaggtttctgtctaggacctttgcattggctgagctccgcaagtcctggtactctacacacagcctggtgggagacaaaaatatcatactgatgggccctccgggtgcgggaaaaaccactgtggggagaattatcggccaaaagctgggatgttgtgttatcgatgtggatgatgatattctcgaaaaaacctggaacatgtcagtttcagaaaagctgcaggacgttggtaacgaacagttcctggaagaggaagggaaggccgtcctgaatttctccgcctcaggatctgtcatatcactcaccggatcaaatcctatgcatgacgctagcatgtggcacctgaagaagaacggcattattgtatatctagacgtgccgcttcttgatctgatctgtcgactcaagctcatgaagacggacagaatcgttgggcagaacagcggaacctctatgaaggatctgttaaaattcaggcgtcagtattacaagaaatggtatgacgcacgggtgttctgcgagtctggtgctagccccgaagaagtggctgataaggtgcttaatgccattaagcgataccaagatgtagactctgaaacattcatctctaccagacacgtctggcctgaagactgcgaacaaaaggtctccgccaaatttttcagcgaggcggtcatagagggactcgcatctgatggcggacttttcgtgcccgctaaggagttccctaagctctcatgcggagaatggaagtcactagttggggcaacctatgtcgagcgcgctcaaattctgctggaacggtgtatccaccccgctgacatacctgctgcccgtttaggagagatgattgaaactgcttatggggagaattttgcttgttctaaaatagcaccggtccggcatctgagtgggaaccaatttattttggagttgtttcacggaccaaccggctcctttaaggatctgtctttgcaactcatgcctcacatatttgcccactgtattccaccatcttgtaattacatgatccttgttgccaccagtggagatacagggtccgccgtgctcaatgggtttagtcgtctgaacaagaacgacaaacagcgtatcgccgttgtggctttttttcccgaaaatggagtgtcagacttccagaaggcgcagatcatcggctctcagcgagagaacgggtgggctgttggcgtggaaagcgacttcgatttttgccagactgccattaagcgtatcttcaatgactctgatttcaccggcttcttgacagtggaatacggcacaatcctgtcatcagcaaacagtataaactggggacgcctcctgcctcaagtcgtgtatcacgccagcgcatatttggacttagtttctcagggcttcatatccttcggatcaccggtggatgtgtgcatcccaacaggcaattttggaaatatcctcgccgctgtgtatgccaagatgatgggcattcccatcaggaaattcatatgcgcttcgaaccagaatcatgtgctgaccgactttatcaagacaggccactacgacctgcgggagaggaaactcgcgcagacctttagcccgtccatcgatattctgaagagctcgaatctggaaagacatctgcatttgatggcaaataaggatggccaactgatgaccgaactgtttaataggctggagagccagcaccacttccaaatcgaaaaagctctggtggaaaagctccagcaggattttgtcgcagattggtgtagcgagggggagtgcctagccgctattaacagcacctacaatactagcggctatatcctcgatcctcacacagcggtagccaaggtggttgccgatcgcgttcaggacaagacatgccctgttatcatctcatcaacggcacattattctaagtttgccccagcaattatgcaagcgctaaagattaaagaaattaatgagacgagctcttcccagctttacctcctgggatcctataacgccctccccccactgcacgaagcactgctcgagaggacgaagcaacaggagaagatggagtaccaagtgtgcgctgctgatatgaacgtgctaaaaagccatgtggagcaattagtgcagaaccagtttatttag

SEQ ID NO: 217100 - DNA, 2232 bp, Artificial Sequence
  derived and/or modified sequence
atgttacacttcaatcgctgccatcacctgaaaaaaattacacagaagtgcttttcctccatccacgtgaaaactgataaacacgctcagagattcctgtcaaggaccttcgctctggcagaactgagaaaatcttggtatagcacccacagccttgtgggcgacaaaaacattattctaatgggcccaccaggagctggaaaaaccaccgtgggcaggattattgggcaaaagctcggctgttgtgtgattgatgtggacgatgacatactggaaaaaacctggaacatgagtgtaagtgaaaaacttcaggacgttgggaacgagcagttcctggaagaagaaggtaaggcggtactgaattttagcgcgtctggatccgtgatctcactgaccggctctaatcccatgcatgacgcgagtatgtggcatctgaagaagaatgggattattgtttatttagatgtgccacttctggacctgatatgccgtctcaagttgatgaaaactgaccggatcgtagggcagaatagtggcaccagcatgaaggacctactcaagttcaggcggcagtattacaagaagtggtatgacgcccgagttttctgtgaaagtggcgcttccccggaagaagtagccgataaagtgcttaacgcaatcaagcgctaccaggatgtggacagcgagacatttataagtactaggcacgtctggcccgaagactgcgaacagaaggtctccgccaagtttttttccgaggctgttattgagggtctcgcttcagatggcggtctgttcgtcccagctaaagaatttcccaaactctcttgtggtgagtggaaatctctggtgggcgcaacctacgtggaaagggcgcagatcttgctggaacgctgcattcaccctgcggacatccccgctgcacggctgggtgaaatgatcgagaccgcgtacggtgagaattttgcgtgttcaaaaattgctccggtgaggcacttgagcggcaaccagtttatcctcgagctgtttcacggccctaccggcagctttaaggacctctcacttcagctcatgccccatatcttcgcccactgcatcccaccatcatgtaattatatgatcctggtggctacatcaggggatactggatccgccgtgctcaacgggtttagccggctgaacaagaatgataagcagaggatcgccgtggtggcattctttcccgagaacggagtgagcgactttcagaaggctcaaatcattggctctcaaagagagaatgggtgggctgtgggcgtggagagtgatttcgatttttgtcagactgccatcaaaagaatctttaacgacagcgatttcaccggttttttaacggttgagtatggcacgatcctcagttccgcaaacagcattaattggggcaggctgctgccgcaggtggtctaccacgcttctgcctacctggacctcgtatcacagggattcatttccttcgggtcccccgtggatgtgtgtatcccaactggcaattttggaaacattctagcagccgtctacgccaagatgatggggattccaattcgtaaattcatttgtgcttccaaccagaaccacgtcctcacggatttcatcaagactgggcattatgacctgcgcgagagaaaactggcccagacttttagccccagtattgatattctgaaaagttctaacttggaacgccacctgcaccttatggccaataaagatggacagcttatgaccgaactctttaatagactggagtctcaacatcactttcagatcgagaaagccttggtcgaaaaactgcagcaggactttgtcgccgattggtgttctgagggggaatgtctcgctgccatcaattccacttataacacttcaggatacatactggaccctcatactgcagtcgctaaggtggtcgcggacagagtccaggataagacatgtcccgtcatcatttcttccaccgctcactacagtaagtttgcacccgctatcatgcaagcgctcaaaataaaagagattaatgaaacatcttcctctcagttatacctcctgggtagttacaacgccctccccccattgcacgaggccctcctggagcgaacgaagcagcaggaaaagatggagtatcaggtgtgcgcggctgacatgaacgtccttaaaagccacgtcgagcagctcgttcaaaatcagttcatatag

SEQ ID NO: 217101 - DNA, 3691 bp, Artificial Sequence
  derived and/or modified sequence
actgcgcgggggcgggaccggggagctagctgcagactccacgttttgcaaagatcggttttgcctcagagtcaacaaactcttcagattggttccggtgtgtcctatgtttacaagtcagtggaaattaagcacaacacatataaattgaaaagtcaaataaggaaatgaattacctcccttgacggctctaattttacttggctaaagccaatttttaggttggcttgggcagaaaagtgaaaagagaatgctccactttaaccgatgtcatcatctgaaaaagataacacagaaatgtttttctagtatacatgttaaaacggataaacatgcacagcgatttctttcaagaacctttgcacttgcggaattgaggaagtcatggtattcaacccactctcttgttggagacaaaaatattatcctgatgggacctcctggtgctgggaaaacaacagtaggcagaataataggtcagaaactaggttgttgtgtcatagatgtggatgatgatatccttgaaaaaacctggaatatgagtgtgtctgaaaaattacaggatgttggtaatgagcaatttttagaagaggaaggaaaagctgtgttaaacttctctgcatctggaagtgtgatttcccttactgggtccaatccaatgcatgatgctagcatgtggcatctgaagaaaaatggaataattgtatacctggatgtacctctactagatctaatttgtcgtctaaaattaatgaagacagataggattgtaggtcagaattctggaacatctatgaaagacttacttaaatttagaagacagtattataagaagtggtatgatgctcgtgttttctgtgaaagtggggcttccccagaggaggtagctgacaaagtgctgaatgcaattaaaagataccaagatgtggactcggaaacattcatttcaacaagacacgtttggcctgaagactgtgaacagaaggtttcagcaaaattctttagtgaagctgtaattgaggggttggcttctgatggtggcctctttgttcctgcaaaggagtttccaaaattaagctgcggggagtggaaaagcctagtaggagcaacctacgtagaaagagcacagatactgttggaaagatgtatccatcctgcagacatacctgctgccaggttgggagaaatgattgaaactgcttatggggaaaactttgcctgctcaaaaattgctcctgtcaggcacctttcaggcaaccagttcatcctggagttgtttcatggaccaacaggatcatttaaagatttgtctttacagcttatgcctcatatttttgcacactgtatcccaccaagttgcaattatatgatacttgtagctacttcaggagacacagggagtgcagtcttaaatggttttagtcgtctaaataagaatgataagcaaaggatagctgtggttgcattttttcctgagaatggagtaagtgattttcaaaaagcacaaataattggcagtcagagagaaaatggatgggcagtgggtgttgagtcagattttgatttttgccagacagctataaaaagaatttttaatgattctgattttactggctttcttactgtggaatatggaacaatcttaagttcggctaactccataaactggggccgactacttccgcaggtagtttatcatgcttccgcatatcttgatcttgttagtcaaggatttatttcttttggaagcccagtcgatgtctgtattcccacaggaaactttggtaacattttagcagcagtgtatgccaaaatgatgggaatcccgattcgaaaatttatctgtgcctctaatcagaaccatgttttgactgattttataaaaacaggacattatgatctaagggaaagaaaactagcacaaaccttttcaccgtcaatagatattctcaaatcttcaaacctagaacgacatttacacttgatggctaataaagatggacagctaatgacagaattatttaatcgattagaaagtcagcatcatttccagatagaaaaggctctagttgagaaacttcagcaggattttgtagctgactggtgctctgagggagagtgcctagcagctattaactccacctataatacttcagggtatattttggatccacacactgctgttgcaaaagtggttgcagatagggtgcaagacaaaacttgccctgtgattatctcatctacagcccattactcaaagtttgcacctgctatcatgcaggctttaaagattaaagaaatcaatgagacttcatcaagtcagctctatttgctgggttcatacaatgcattacctccactgcatgaggctttattagagagaacaaaacagcaagagaagatggagtaccaggtctgtgcagctgatatgaatgtcttgaagagtcatgtggaacaacttgtccaaaatcaattcatatgaaagctttcagagtaaatttttttttctagctataagcatgcaataataaatctcaaacactgatttggagtacagtagcattttgtcttttatgtaaatatctctatatctgtttggaatttcaaaagtctgatctctagggctgacatgagaactccatgtcacctcctcagatctttaatctggaagtgacaaaaggtaacacagtgcacggacctttgagctatcatacttttgccttctgctcatgaggggtgtatcaatttccactcccacaccctcactgttatgtggaccaaaatgtctggtatactatttggcgattaaaatatttaagcccagttttcaggtactacatctgtaactagtgaatactctgttgattagaaagttaatttaccactcaaaatggctaacttgaatggaggaagtagtaaactcttctattaggatttgggccagtgttttttgtttgttttttggtgcagtttcagctcactgcaacctccgcctcccaggttcaagtgattctcctgcctcagcctcccaggtagctgggattacaggcatgcaacaccacacatggctaatttttttatttttaatagagatgaggtttcgccatgttttccaggctgatcttgaacctctgacctcaggtgatccatccacctcggcctcccaaagtgctaggattacaggcgtgagcctctgcacctggctagggccagtgtttttaaccctcctcaaattccattttggactacaactaatgtgtatctcacactgtccaaattaaagatgtactctgtccttcactctcctttggatgtgtacggttagggtgacgatgtttgaaaatcaacacataactgaaatccaggatgaaacagtaagcagaactacttagaagtgaatacagaaatgatctatttcaagaggaaggttttccaaaattaagagtacttgagtagtctcaataggagtgtatttgtagacagcagtttccctatattatttggagtcaattcttacgtaatttgttgtttatttcttcagtgaacattgtctttttctggcagctgaaactgcacacaactgatacacatatttaatttgtattcctttgtagtaatacattttaaccatgatttatgtttgtgaatttactggatgttttctttctgaattaaagattgtcaagaccaa

SEQ ID NO: 217102 - DNA, 3788 bp, Artificial Sequence
  derived and/or modified sequence
actgcgcgggggcgggaccggggagctagctgcaggtacggtgctccgtctcctgtggaggctttagcggctcgtggacactgctcccccatttcctttcatttcccccgtcttctcagtgagatttccttgactccacgttttgcaaagatcggttttgcctcagagtcaacaaactcttcagattggttccggtgtgtcctatgtttacaagtcagtggaaattaagcacaacacatataaattgaaaagtcaaataaggaaatgaattacctcccttgacggctctaattttacttggctaaagccaatttttaggttggcttgggcagaaaagtgaaaagagaatgctccactttaaccgatgtcatcatctgaaaaagataacacagaaatgtttttctagtatacatgttaaaacggataaacatgcacagcgatttctttcaagaacctttgcacttgcggaattgaggaagtcatggtattcaacccactctcttgttggagacaaaaatattatcctgatgggacctcctggtgctgggaaaacaacagtaggcagaataataggtcagaaactaggttgttgtgtcatagatgtggatgatgatatccttgaaaaaacctggaatatgagtgtgtctgaaaaattacaggatgttggtaatgagcaatttttagaagaggaaggaaaagctgtgttaaacttctctgcatctggaagtgtgatttcccttactgggtccaatccaatgcatgatgctagcatgtggcatctgaagaaaaatggaataattgtatacctggatgtacctctactagatctaatttgtcgtctaaaattaatgaagacagataggattgtaggtcagaattctggaacatctatgaaagacttacttaaatttagaagacagtattataagaagtggtatgatgctcgtgttttctgtgaaagtggggcttccccagaggaggtagctgacaaagtgctgaatgcaattaaaagataccaagatgtggactcggaaacattcatttcaacaagacacgtttggcctgaagactgtgaacagaaggtttcagcaaaattctttagtgaagctgtaattgaggggttggcttctgatggtggcctctttgttcctgcaaaggagtttccaaaattaagctgcggggagtggaaaagcctagtaggagcaacctacgtagaaagagcacagatactgttggaaagatgtatccatcctgcagacatacctgctgccaggttgggagaaatgattgaaactgcttatggggaaaactttgcctgctcaaaaattgctcctgtcaggcacctttcaggcaaccagttcatcctggagttgtttcatggaccaacaggatcatttaaagatttgtctttacagcttatgcctcatatttttgcacactgtatcccaccaagttgcaattatatgatacttgtagctacttcaggagacacagggagtgcagtcttaaatggttttagtcgtctaaataagaatgataagcaaaggatagctgtggttgcattttttcctgagaatggagtaagtgattttcaaaaagcacaaataattggcagtcagagagaaaatggatgggcagtgggtgttgagtcagattttgatttttgccagacagctataaaaagaatttttaatgattctgattttactggctttcttactgtggaatatggaacaatcttaagttcggctaactccataaactggggccgactacttccgcaggtagtttatcatgcttccgcatatcttgatcttgttagtcaaggatttatttcttttggaagcccagtcgatgtctgtattcccacaggaaactttggtaacattttagcagcagtgtatgccaaaatgatgggaatcccgattcgaaaatttatctgtgcctctaatcagaaccatgttttgactgattttataaaaacaggacattatgatctaagggaaagaaaactagcacaaaccttttcaccgtcaatagatattctcaaatcttcaaacctagaacgacatttacacttgatggctaataaagatggacagctaatgacagaattatttaatcgattagaaagtcagcatcatttccagatagaaaaggctctagttgagaaacttcagcaggattttgtagctgactggtgctctgagggagagtgcctagcagctattaactccacctataatacttcagggtatattttggatccacacactgctgttgcaaaagtggttgcagatagggtgcaagacaaaacttgccctgtgattatctcatctacagcccattactcaaagtttgcacctgctatcatgcaggctttaaagattaaagaaatcaatgagacttcatcaagtcagctctatttgctgggttcatacaatgcattacctccactgcatgaggctttattagagagaacaaaacagcaagagaagatggagtaccaggtctgtgcagctgatatgaatgtcttgaagagtcatgtggaacaacttgtccaaaatcaattcatatgaaagctttcagagtaaatttttttttctagctataagcatgcaataataaatctcaaacactgatttggagtacagtagcattttgtcttttatgtaaatatctctatatctgtttggaatttcaaaagtctgatctctagggctgacatgagaactccatgtcacctcctcagatctttaatctggaagtgacaaaaggtaacacagtgcacggacctttgagctatcatacttttgccttctgctcatgaggggtgtatcaatttccactcccacaccctcactgttatgtggaccaaaatgtctggtatactatttggcgattaaaatatttaagcccagttttcaggtactacatctgtaactagtgaatactctgttgattagaaagttaatttaccactcaaaatggctaacttgaatggaggaagtagtaaactcttctattaggatttgggccagtgttttttgtttgttttttggtgcagtttcagctcactgcaacctccgcctcccaggttcaagtgattctcctgcctcagcctcccaggtagctgggattacaggcatgcaacaccacacatggctaatttttttatttttaatagagatgaggtttcgccatgttttccaggctgatcttgaacctctgacctcaggtgatccatccacctcggcctcccaaagtgctaggattacaggcgtgagcctctgcacctggctagggccagtgtttttaaccctcctcaaattccattttggactacaactaatgtgtatctcacactgtccaaattaaagatgtactctgtccttcactctcctttggatgtgtacggttagggtgacgatgtttgaaaatcaacacataactgaaatccaggatgaaacagtaagcagaactacttagaagtgaatacagaaatgatctatttcaagaggaaggttttccaaaattaagagtacttgagtagtctcaataggagtgtatttgtagacagcagtttccctatattatttggagtcaattcttacgtaatttgttgtttatttcttcagtgaacattgtctttttctggcagctgaaactgcacacaactgatacacatatttaatttgtattcctttgtagtaatacattttaaccatgatttatgtttgtgaatttactggatgttttctttctgaattaaagattgtcaagaccaa

SEQ ID NO: 217103 - protein, 154 aa, Artificial Sequence
  derived and/or modified sequence
MAGPVKDREAFQRLNFLYQAAHCVLAQDPENQALARFYCYTERTIAKRLVLRRDPSVKRTLCRGCSSLLVPGLTCTQRQRRCRGQRWTVQTCLTCQRSQRFLNDPGHLLWGDRPEAQLGSQADSKPLQPLPNTAHSISDRLPEEKMQTQGSSNQ

SEQ ID NO: 217104 - protein, 154 aa, Artificial Sequence [sequence omitted]

SEQ ID NO: 217105 - protein, 154 aa, Artificial Sequence
  derived and/or modified sequence
MAGPVKDREAFQRLNFLYQAAHCVLAQDPENQALARFYCYTERTIAKRLVLRRDPSVKRTLCRGCSSLLVPGLTCTQRQRRCRGQRWTVQTCLTCQRSQRFLNDPGHLLWGDRPEAQLGSQADSKPLQPLPNTAHSISDRLPEEKMQTKGSSNQ

SEQ ID NO: 217106 - DNA, 465 bp, Artificial Sequence
  derived and/or modified sequence
atggctggccccgtcaaagaccgggaagcttttcaacgccttaatttcctgtatcaggctgcccactgtgtcttagcccaagaccctgagaaccaggcactcgctcgtttctattgttacacggagaggactattgcaaagagactggttcttagacgtgatcctagcgtgaagcgaacgctgtgccgtgggtgttcatctcttctcgttcccggactgacctgtacacagcgccagagaagatgtaggggccagcggtggacggtgcagacatgcctgacttgccaacgcagccagcgctttttaaacgatcctggacacctcttatggggcgaccgtccggaggctcagttgggatctcaggcagattccaagccactccaaccattgccaaacaccgcgcactcgattagcgataggctgcccgaggaaaagatgcagacccagggaagctcgaatcaatag

SEQ ID NO: 217107 - DNA, 534 bp, Artificial Sequence
  derived and/or modified sequence
atggcaggcccagtgaaggatcgggaagcattccaaaggctgaattttctctatcaggtcagcctacgccagggaccccacggcgacggcgccagaagacccagggtgacggcgccgctgccccaagctgctcactgcgtgctggcacaggaccctgaaaaccaggctcttgcacgcttctattgctataccgagagaacaattgctaagcgcctcgtgctgcggagggatccttctgtgaagagaacactctgtcgtggatgctctagcctgctcgttcccggcctcacgtgtacccagcggcaacggaggtgcagggggcagaggtggactgtgcagacctgtctgacgtgtcaaaggtcacagagatttctgaacgaccccggtcacctcctttggggtgatcggccagaagcgcagttgggctcccaggccgacagcaagcctttgcagccacttcctaacaccgcgcactccattagcgacaggctgcccgaagagaaaatgcaaacccaaggctcctcaaaccagtag

SEQ ID NO: 217108 - DNA, 534 bp, Artificial Sequence
  derived and/or modified sequence
atggccggccccgtgaaggatagggaagctttccagcgactcaattttctttatcaggtttctctgcgacagggccctcacggcgacggcgctagacgaccccgagttactgctcccctgccgcaggcagcccactgcgtgctagcccaagaccccgagaaccaggccctggcgcgtttctactgttacacagaaaggaccatcgctaaacgactcgttcttaggagagaccccagcgtcaagcggactctgtgccgcggatgctcctcacttttggttccagggctaacttgcactcaaaggcagcgtaggtgccgggggcagaggtggacagtgcagacatgtctgacctgccaacgctcccagcggttcctgaacgatcccgggcatcttctgtggggcgataggcctgaagcgcagctgggctcccaggcggactcaaaaccattgcagccgttacccaatactgcccacagtattagtgatcggctgccagaagagaaaatgcagacgaagggctctagcaatcaatag

SEQ ID NO: 217109 - DNA, 465 bp, Artificial Sequence
  derived and/or modified sequence
atggccggaccggtaaaagaccgagaagcatttcagaggcttaacttcttgtaccaagccgcccattgcgtattggctcaggatcccgagaaccaagccctcgcccgattctactgttacacagaaagaaccattgctaagcgtttggtcctgaggcgggatcccagcgtcaaaagaaccttatgtagaggctgctcctctctgttggttccgggcctgacttgtacccacaggcagcgtaggtgtcggggccaaagatggactgtccaaacttgtctcacttgtcagagatctcagcgcttcttaaatgaccctggccatctgttgtggggggatagaccggaagcccaactaggcagtcaagccgacagtaagcctctccagcccttgcctaacaccgctcatagcatttcggatcgactgcccgaagagaaaatgcagacacagggcagttcgaatcagtag

SEQ ID NO: 217110 - DNA, 465 bp, Artificial Sequence
  derived and/or modified sequence
atggctgggccagtaaaagatcgggaagcatttcagcgactgaattttctgtaccaggctgcccactgcgtacttgctcaagatcccgagaaccaggcactggccagattctattgctacacagagcggacaatcgccaagcgcctggtcctacgcagggacccttccgtaaaaagaactctgtgcagaggttgttcatcattacttgtcccggggctcacatgcacacacagacaacgccgctgccgaggccagcgctggactgtccagacttgcctgacatgccagcggtcacaaagatttctgaatgatccaggtcaccttctgtggggagatcgtcccgaggcccaactcggatcgcaagcggactctaagccactgcagcccctgcctaacaccgcccattccatctcagatagacttcccgaggaaaagatgcaaacacagggatcatcaaatcagtag

SEQ ID NO: 217111 - DNA, 465 bp, Artificial Sequence
  derived and/or modified sequence
atggcgggccctgtcaaggatcgcgaagccttccaacggctcaattttctgtatcaagcggcccactgcgtgcttgctcaagatccggagaatcaagccctggctcgcttttactgctacacagagagaacaattgcaaaaaggctggtgcttcggcgagatcccagcgtgaagcggacgctttgtagggggtgtagttctctgctcgtccccggcctgacgtgtactcagagacagcggaggtgtagaggacagcggtggacagtacagacgtgtctcacctgtcaacggtcccagagattcttaaacgacccaggccatttgttgtggggcgatcgcccagaggcacagctgggctcccaagcggacagcaagcccctgcagccactacctaataccgcccatagcataagtgatcggttgcctgaggaaaaaatgcagaccaagggcagctccaaccagtag

SEQ ID NO: 217112 - DNA, 534 bp, Artificial Sequence
  derived and/or modified sequence
atggccggtccagtgaaagatcgcgaagccttccaacggctgaacttcttataccaagtaagcctgagacagggcccccacggcgatggagcgagacggccacgggttacagccccgctgccacaggctgcacactgtgtcctggctcaggatcccgaaaatcaggctcttgcccgcttctattgctacactgagaggacaatagctaagaggttggtgctgaggcgtgatcctagcgttaaaaggaccttatgtagaggatgttccagtcttctcgttccagggttgacctgcacacaccgacaaagaagatgcagggggcaacgttggacggttcaaacgtgccttacatgtcaaagatctcaacgtttcctaaacgatcctgggcatttgctgtggggtgataggccggaggcacagttgggatctcaggcagattccaaaccactgcagcccctgcctaacactgcacattccataagtgaccggctgcccgaagagaagatgcaaacacagggctcctcaaatcagtag

SEQ ID NO: 217113 - DNA, 465 bp, Artificial Sequence
  derived and/or modified sequence
atggcgggcccggttaaagacagggaggcctttcaacgcctcaatttcttatatcaagccgctcactgcgtgctggcacaagatccagaaaatcaggccctcgcgagattctattgttatactgagaggaccattgcaaagcggctggtcctccgcagagacccaagtgtcaagagaactctttgtcgcggttgcagctctctcttagtgccaggtttgacttgtacacagcggcaacgccgctgcaggggccagagatggaccgtgcaaacctgcctgacgtgtcagaggagtcaacgattcctcaatgacccgggccatctgctctggggagatagaccagaggcgcagctgggctctcaagcggacagcaagcctcttcagcccctgccgaacaccgctcactccatcagtgatcggcttccagaggagaaaatgcagactcaggggagcagcaatcagtag

SEQ ID NO: 217114 - DNA, 534 bp, Artificial Sequence
  derived and/or modified sequence
atggccggcccggtgaaagacagggaagctttccaacgcctgaactttctgtatcaagtgtctcttcgccagggacctcatggggatggtgcccggaggcctcgcgtcactgcccccctgccccaggccgctcattgcgttttggctcaggaccccgagaatcaggctttagcacgtttctactgttatactgagcgcacaatagcaaaaagactggtactcaggcgtgatcccagcgtgaagcgcaccctctgcagaggctgcagctctctgctcgtgcccgggctgacttgtacccagagacaaagacgatgtcgtggccaacgttggaccgttcagacttgcctgacctgccagagatcccagcgcttcctgaacgatcctggacatttgctatggggagaccgccccgaggcgcaattaggaagccaggctgacagtaagcccctccaaccgcttcccaacaccgcgcacagtatttctgatcggctgcccgaggaaaaaatgcagactcagggctcatcaaaccaatag

SEQ ID NO: 217115 - DNA, 534 bp, Artificial Sequence
  derived and/or modified sequence
atggcaggccctgtgaaagaccgcgaggcatttcaacgtctgaactttctatatcaggtgtcccttagacaggggccccatggagatggggccagacgacctcgagtcacggcgccacttcctcaagccgcgcactgtgtgctggcacaagacccagaaaatcaggctttggcccgcttctactgctacacagagcggacgatagctaagagactggttctcagacgcgacccgtctgtgaaacgtacgctttgtcgcgggtgcagttccctactggtaccagggttaacttgcacgcagagacagcggagatgtagggggcagcgctggacagtccaaacctgcctcacttgccagcggagtcagcgctttctcaatgatcctggccatctactttggggggatcgccccgaggctcagttgggttcccaggctgacagcaagcctctgcagcccctgccaaatactgcccactccatctccgatcgccttcctgaggagaagatgcaaactcagggctccagtaatcagtag

SEQ ID NO: 217116 - DNA, 465 bp, Artificial Sequence
  derived and/or modified sequence
atggctggacccgtaaaggaccgggaggccttccagagacttaacttcctgtaccaagctgctcactgcgtcctggcacaggacccagaaaaccaggctctcgctcggttctactgctataccgaaaggaccattgcgaaaagactggtactccgccgtgaccctagtgtaaagagaacactctgcaggggatgctcctcattgctggttcccggcctcacctgtactcatcgacaaaggcggtgtcggggccaaagatggacggtccagacctgcctgacctgccagcgaagtcagcggttcttgaatgatccagggcacctactgtggggagatcgccccgaggcgcaactggggtcccaagccgacagcaagcccctgcagcccctgccaaacacggctcactctatttcagacaggctccccgaagagaagatgcagacccagggctctagcaatcaatag

SEQ ID NO: 217117 - DNA, 534 bp, Artificial Sequence
  derived and/or modified sequence
atggccggcccagtcaaggatagagaggcattccagagactcaactttttatatcaggtatctctacgccagggaccccacggagacggagcgagacgccctcgcgtgactgcaccactgccccaagctgcccattgtgtgctagctcaggacccagagaaccaagccttggccagattctactgctacacagaaagaacaattgctaaaaggcttgtgctgcgcagagacccatctgtgaagagaaccctttgtagagggtgctccagccttttggtgcctggactcacttgcactcaccgccagcgccgttgtagaggccagcggtggaccgtgcagacctgtctgacgtgtcagaggtcccagagattccttaacgatcctgggcacttgctatggggggataggccggaagctcagctggggtctcaggcagatagcaagcccttgcagccactgcctaacacagcgcatagtatcagtgatcgactcccggaagagaagatgcagacacagggctccagcaaccagtag

SEQ ID NO: 217118 - DNA, 465 bp, Artificial Sequence
  derived and/or modified sequence
atggccgggcccgtgaaggatagagaagctttccagcgactcaacttcctgtaccaggccgcccactgtgtcctggcccaggatcccgaaaaccaagctctggcccgcttctattgctacaccgagagaaccatcgccaaacgtttggttcttcgccgcgacccttctgtcaaacgaactctgtgcagaggatgctcatctctactcgtgcctggcctgacctgcacccagagacagcggaggtgcaggggacagcgatggaccgtccagacctgcctgacgtgtcagcggagccaaagatttctgaacgacccaggccatctcctgtggggggaccgccccgaagcacagctgggatcacaagctgattctaagccgctgcaacccctgcccaacacagcccatagtatcagcgacagattgcccgaggaaaagatgcaaacacaagggagctccaaccagtag

SEQ ID NO: 217119 - DNA, 534 bp, Artificial Sequence
  derived and/or modified sequence
atggccggcccagttaaggatcgtgaggccttccaaagacttaattttctatatcaagtctccctccggcaaggaccccacggtgacggagcccgacggccacgcgtgactgcacccttgcctcaggctgcacattgcgtccttgcccaggatcctgagaaccaggccctggccagattttattgctacactgaacgtaccatcgctaagcgtcttgttctccgaagggatcctagtgtaaaaagaacactgtgcagaggctgcagcagtctactggttcctggcctcacgtgcactcacaggcagagacgctgccgcggacagaggtggaccgttcagacatgcttgacatgccagcgttcccaacggttcctgaacgacccgggacacttactctggggagatagacctgaggcgcagctcggctcacaggcagactctaaaccattgcaacccctccccaacaccgctcactccatctcagacagactccccgaggaaaaaatgcagacccaggggtcgtccaaccagtag

SEQ ID NO: 217120 - DNA, 465 bp, Artificial Sequence
  derived and/or modified sequence
atggccggccctgtgaaggaccgggaggccttccagaggctgaacttcctgtaccaggccgcccactgtgtgctggcccaggaccctgagaaccaggccctggcccgcttctactgctacacagagaggaccatcgccaagaggctggtgctgcggcgggaccccagcgtgaagaggaccctgtgccggggctgcagcagcctgctggtgcccggcctgacctgcacccagaggcagaggcgctgccggggccagcgctggacagtgcagacctgcctgacctgccagaggagccagcgcttcctgaatgaccccggccacctgctgtggggagacaggcctgaggcccagctgggcagccaggccgacagcaagcccctgcagcccctgcccaacacagcccacagcatcagtgaccggctgcctgaggagaagatgcagacccagggcagcagcaaccagtag

SEQ ID NO: 217121 - DNA, 534 bp, Artificial Sequence
  derived and/or modified sequence
atggccggccctgtgaaggaccgggaggccttccagaggctgaacttcctgtaccaggtgtccctgcggcagggcccccatggagatggagcccggcggccccgggtgacagcccccctgccccaggccgcccactgtgtgctggcccaggaccctgagaaccaggccctggcccgcttctactgctacacagagaggaccatcgccaagaggctggtgctgcggcgggaccccagcgtgaagaggaccctgtgccggggctgcagcagcctgctggtgcccggcctgacctgcacccagaggcagaggcgctgccggggccagcgctggacagtgcagacctgcctgacctgccagaggagccagcgcttcctgaatgaccccggccacctgctgtggggagacaggcctgaggcccagctgggcagccaggccgacagcaagcccctgcagcccctgcccaacacagcccacagcatcagtgaccggctgcctgaggagaagatgcagacccagggcagcagcaaccagtag

SEQ ID NO: 217122 - DNA, 534 bp, Artificial Sequence
  derived and/or modified sequence
atggccggccctgtgaaggaccgggaggccttccagaggctgaacttcctgtaccaggtgtccctgcggcagggcccccatggagatggagcccggcggccccgggtgacagcccccctgccccaggccgcccactgtgtgctggcccaggaccctgagaaccaggccctggcccgcttctactgctacacagagaggaccatcgccaagaggctggtgctgcggcgggaccccagcgtgaagaggaccctgtgccggggctgcagcagcctgctggtgcccggcctgacctgcacccagaggcagaggcgctgccggggccagcgctggacagtgcagacctgcctgacctgccagaggagccagcgcttcctgaatgaccccggccacctgctgtggggagacaggcctgaggcccagctgggcagccaggccgacagcaagcccctgcagcccctgcccaacacagcccacagcatcagtgaccggctgcctgaggagaagatgcagaccaagggcagcagcaaccagtag

SEQ ID NO: 217123 - DNA, 465 bp, Artificial Sequence
  derived and/or modified sequence
atggccggccctgtgaaggaccgggaggccttccagaggctgaacttcctgtaccaggccgcccactgtgtgctggcccaggaccctgagaaccaggccctggcccgcttctactgctacacagagaggaccatcgccaagaggctggtgctgcggcgggaccccagcgtgaagaggaccctgtgccggggctgcagcagcctgctggtgcccggcctgacctgcacccaccggcagaggcgctgccggggccagcgctggacagtgcagacctgcctgacctgccagaggagccagcgcttcctgaatgaccccggccacctgctgtggggagacaggcctgaggcccagctgggcagccaggccgacagcaagcccctgcagcccctgcccaacacagcccacagcatcagtgaccggctgcctgaggagaagatgcagacccagggcagcagcaaccagtag

SEQ ID NO: 217124 - DNA, 465 bp, Artificial Sequence
  derived and/or modified sequence
atggccggccctgtgaaggaccgggaggccttccagaggctgaacttcctgtaccaggccgcccactgtgtgctggcccaggaccctgagaaccaggccctggcccgcttctactgctacacagagaggaccatcgccaagaggctggtgctgcggcgggaccccagcgtgaagaggaccctgtgccggggctgcagcagcctgctggtgcccggcctgacctgcacccagaggcagaggcgctgccggggccagcgctggacagtgcagacctgcctgacctgccagaggagccagcgcttcctgaatgaccccggccacctgctgtggggagacaggcctgaggcccagctgggcagccaggccgacagcaagcccctgcagcccctgcccaacacagcccacagcatcagtgaccggctgcctgaggagaagatgcagaccaagggcagcagcaaccagtag

SEQ ID NO: 217125 - DNA, 534 bp, Artificial Sequence
  derived and/or modified sequence
atggccggccctgtgaaggaccgggaggccttccagaggctgaacttcctgtaccaggtgtccctgcggcagggcccccatggagatggagcccggcggccccgggtgacagcccccctgccccaggccgcccactgtgtgctggcccaggaccctgagaaccaggccctggcccgcttctactgctacacagagaggaccatcgccaagaggctggtgctgcggcgggaccccagcgtgaagaggaccctgtgccggggctgcagcagcctgctggtgcccggcctgacctgcacccaccggcagaggcgctgccggggccagcgctggacagtgcagacctgcctgacctgccagaggagccagcgcttcctgaatgaccccggccacctgctgtggggagacaggcctgaggcccagctgggcagccaggccgacagcaagcccctgcagcccctgcccaacacagcccacagcatcagtgaccggctgcctgaggagaagatgcagacccagggcagcagcaaccagtag

SEQ ID NO: 217126 - DNA, 465 bp, Artificial Sequence
  derived and/or modified sequence
atggccggccccgtgaaggaccgggaggccttccagcggctgaactttctgtaccaggccgcacactgcgtcctcgcccaagaccctgagaaccaggccctcgcccggttttattgttacacagaaaggaccatcgcaaagcgcctcgtgctccgtagagacccttcagtgaagcggacactttgcagggggtgctcatcactgctagtccccggcctgacctgcacccagcgccagcgacgatgtaggggacagcgctggacagttcagacttgccttacttgtcagcgttcccaacgattcttgaacgatcccggccaccttctgtggggagatcggcccgaggcccagctgggatctcaggcagacagtaagccattacagccactccctaatacagcccacagtatttccgatcggttgccggaagagaaaatgcaaacacagggcagcagcaatcagtag

SEQ ID NO: 217127 - DNA, 534 bp, Artificial Sequence
  derived and/or modified sequence
atggccggccccgtgaaggaccgggaggccttccagcggctgaactttttataccaggtgtctctgcgacagggaccacatggtgatggcgcccggagaccgagggtgactgcaccgctgccccaagccgctcattgtgtcctcgcacaggaccctgaaaaccaagctctcgcccgcttctactgttacacagaaagaactattgcaaaacggttagtgctccgcagagacccatcagtgaagagaacactgtgcagaggctgttcttctttgcttgtcccagggttaacttgtacacagagacagcgaagatgccgcggccagagatggacagttcagacatgtctcacctgccagcggtcccaaaggtttctgaatgatcccggccaccttctgtggggcgacagaccggaagcccaactgggctcccaagccgactcgaagccgttgcagccgctgcccaataccgcccactccatctctgatcggctccctgaggagaaaatgcagactcaggggagtagtaaccagtag

SEQ ID NO: 217128 - DNA, 534 bp, Artificial Sequence
  derived and/or modified sequence
atggccggccccgtgaaggaccgggaggccttccagcggctgaactttctctaccaggtgtccttgagacagggcccccacggagatggcgctcggaggcctagggtgaccgcaccactcccacaggcagcacactgtgtattggcccaggatcccgagaatcaggcactagcacgcttctactgctataccgaacgcacaatcgccaagcgactggtcctgcgccgagacccatccgtgaagagaacactatgtaggggctgttcatccctcctcgtcccaggacttacgtgcacccagaggcaacggcgctgtcggggccagcgctggacggtccaaacctgcctcacctgtcagcggtcccagcgttttctgaacgacccaggacatctgctgtggggtgatcggcccgaggcgcagttgggttcccaggctgattccaaacccctgcaaccactaccgaacacagcccattccatttccgacagactgcccgaggaaaagatgcaaaccaaaggatcaagtaaccagtag

SEQ ID NO: 217129 - DNA, 465 bp, Artificial Sequence
  derived and/or modified sequence
atggccggccccgtgaaggaccgggaggccttccagcggctgaacttcctgtatcaggctgcccactgtgtgctcgcccaggaccctgagaaccaggccctggcccgtttttattgctacaccgaaaggacaatcgcaaaaagattggtcctcaggagggaccctagcgtaaagagaactctctgcagagggtgctcttccctactggttcctggactcacttgcactcataggcagagacggtgtaggggtcagcggtggaccgtacagacttgcctgacctgccagcgatcacagcggttcttaaacgatcccggtcatcttctttggggcgaccgcccggaggctcaacttgggtcccaggctgactccaaacctcttcagcccctgccaaatacagcccactctatctctgaccgcctgcccgaggaaaagatgcaaactcagggaagttcaaatcaatag

SEQ ID NO: 217130 - DNA, 465 bp, Artificial Sequence
  derived and/or modified sequence
atggccggccccgtgaaggaccgggaggccttccagcggctgaacttcttgtaccaggccgcccattgtgttctcgcccaggaccccgaaaatcaagctctggcccgtttctactgctatacagagcggactatcgccaagaggttagtactaagaagggatccttcagtgaagcgtaccctttgtcgcggatgctcaagtctgcttgtgcccggtctgacctgtacgcatcggcagcgcagatgcagaggccagaggtggacagtccagacgtgtcttacctgccagaggtctcagagatttttgaatgacccgggacacttgctgtggggagaccgtcccgaagctcagctcggcagtcaggctgacagcaaacctttacaaccgttgccaaacacagcacattcgattagcgatcgcctgccggaggaaaaaatgcagacccagggtagttctaaccagtag

SEQ ID NO: 217131 - DNA, 465 bp, Artificial Sequence
  derived and/or modified sequence
atggccggccccgtgaaggaccgggaggccttccagcggctgaacttcctgtaccaagcagcccattgcgttctggctcaggatcctgaaaaccaagcgcttgcaagattctattgttacacggaacggaccatcgccaagagactagtgcttcgccgtgacccaagcgtgaagcgtacactctgtcgcgggtgttccagtctactggtacctgggctcacgtgtacccagcggcagaggcggtgtaggggacagcggtggactgtacaaacctgcctgacttgtcagcggtcacaacggttcctgaacgaccctggacacctcttatggggagaccgacctgaggcccaactcggttcgcaagctgattccaaacccctccagccccttcctaacactgcccattccatttccgacaggttgcccgaggagaagatgcagactaaggggtcatcgaaccaatag

SEQ ID NO: 217132 - DNA, 534 bp, Artificial Sequence
  derived and/or modified sequence
atggccggccccgtgaaggaccgggaggccttccagcggctgaactttctgtaccaggtctcccttaggcagggcccccacggagatggcgcgcgcagacctcgggttacagctccgcttccccaggctgcgcattgtgtgctggcccaagatccagagaatcaggcactggcgcggttctattgctacacggagcggaccattgcaaagcggcttgtgctgcgccgcgacccctctgtgaagcgcaccctctgcagaggctgttccagtctcctggtgccaggcctgacttgcactcacagacagcgcagatgcaggggacagcggtggaccgttcaaacctgcctgacttgccagaggtctcagaggttcctcaatgatcccggacatctgttatggggagatcgacccgaagctcagcttggtagccaggccgattctaagccactgcaacccctgcctaatactgcacacagtatcagcgatagactccccgaggagaagatgcaaacgcaaggctcctccaatcagtag

SEQ ID NO: 217133 - DNA, 465 bp, Artificial Sequence
  derived and/or modified sequence
atggccggccccgtgaaggaccgggaggccttccagcggctgaactttctgtatcaggcagctcattgcgtgcttgcacaggaccccgagaaccaggctcttgccagattctattgttatacagagcgcacaattgcaaagcggttggtcctgagaagagacccaagcgtaaagagaactctctgccgcggatgtagctcacttctggtccctggacttacatgcactcagcgccagcggcgatgtagggggcagcgctggacagtgcagacttgtctcacatgccaaagaagccaaaggtttctgaatgatcctgggcatctgctgtggggcgacaggccagaagcccaactgggatctcaagcagattctaagccactccagccattgcctaacactgcacatagtatttccgaccgactgccagaggaaaagatgcaaacccaggggtcaagcaaccaatag

SEQ ID NO: 217134 - DNA, 534 bp, Artificial Sequence
  derived and/or modified sequence
atggccggccccgtgaaggaccgggaggccttccagcggctgaactttctgtaccaggtgagtctgaggcaggggccacatggggatggggcgcgccgtccccgcgtaacggctcctctgccccaggctgcacattgcgtcctagcccaagacccggagaatcaggctttggcacgcttttactgctacacggagagaacaatcgctaaacggctagtgctgagacgagacccgagcgttaaacgcacactgtgccgcggctgttcatctctgcttgtgcccggcctcacgtgtacccaacggcagcggcgttgcaggggccagaggtggaccgtgcagacctgcttgacttgtcaacggagccagaggttcttaaatgaccccggacatctgctgtggggcgaccggcccgaggcgcagctgggttctcaggcggacagcaagcctcttcagcccctccccaacacagcacattcaataagtgatcggcttccggaggagaaaatgcagactcaaggctcgtccaatcaatag

SEQ ID NO: 217135 - DNA, 534 bp, Artificial Sequence
  derived and/or modified sequence
atggccggccccgtgaaggaccgggaggccttccagcggctgaacttcctgtatcaggtttcactgcggcagggaccacacggagatggcgcccggaggccaagagtgaccgcgcctctgccccaggctgcacactgtgtcctggctcaggaccctgagaatcaggcactggctcgattttactgttataccgagcgcacgatcgcaaagcggctggttcttcgccgcgatcccagcgtcaaaagaaccctgtgtcggggatgtagcagcctgctagtcccgggactgacttgcacccagaggcagcgccgctgtcggggccagcgttggacggtacagacttgtctgacatgtcagcgctcacaacggttcctcaacgaccctgggcacctcttgtggggagatagacccgaagcgcagctgggcagccaggcggacagcaaaccactacagcccctcccaaacacggcacattctattagtgatcgcctacccgaggaaaaaatgcagacgcaggggtcaagtaatcagtag

SEQ ID NO: 217136 - DNA, 465 bp, Artificial Sequence
  derived and/or modified sequence
atggccggccccgtgaaggaccgggaggccttccagcggctgaactttctttaccaggccgcccactgtgtacttgctcaggacccagagaatcaggccctagctcgattctactgctacaccgagaggacaatagccaaaagacttgttctgagacgggacccgagcgtcaagagaacgctctgtaggggatgctcttctctgctcgtgcccggtctcacttgcactcatcgccaaagacgctgccgcggacagcggtggactgttcagacctgtctaacatgccaacggtctcagcggtttttaaacgatcctgggcacctgttgtggggtgatcggcctgaggctcagttggggtcacaggccgactccaaacctttacagcccctccccaacacggcccatagtatctctgatcgcctccccgaagagaaaatgcaaactcagggttcctccaaccagtag

SEQ ID NO: 217137 - DNA, 534 bp, Artificial Sequence
  derived and/or modified sequence
atggccggccccgtgaaggaccgggaggccttccagcggctgaactttctctaccaggtgtccctgcgccaggggcctcatggcgacggcgctaggaggcccagggtcactgctccactcccccaagcagcccactgcgtcttggcccaggatcctgagaaccaggccctggccagattttactgctacacagagaggacgattgcgaagcgactggttctgcgcagagaccctagcgtgaagagaacactatgtcggggatgctcctccctgctggtgcctggacttacgtgtactcatagacagcggcgctgccggggacagcgttggactgtccaaacctgtcttacctgccagaggtctcagaggtttttgaatgatcccggccacctgctctggggagaccgcccagaagcccaactgggaagccaagcggacagcaagcccttgcagcctctcccgaacacagctcactcgattagcgaccggctcccggaggagaagatgcagacccaggggagctctaatcagtag

SEQ ID NO: 217138 - DNA, 465 bp, Artificial Sequence
  derived and/or modified sequence
atggccggccccgtgaaggaccgggaggccttccagcggctgaactttctctaccaagccgcccactgtgtgttggcccaggatcctgaaaaccaagctctggccagattctactgttataccgaacgaaccattgccaagcgcctggtcttgcgtagagatcccagtgtaaagcggacactctgtcggggatgctccagcctgctggtgcctggtctcacttgcacccagaggcagcggcgatgtagaggccagagatggaccgtgcagacatgtcttacttgtcagaggagccagcggttcttgaacgaccctgggcatctgctctggggagacaggcccgaggctcagctggggtctcaggccgatagcaaacccctgcagccattaccaaataccgcacactcgatatctgacaggcttcctgaagagaagatgcagactcagggatcatcgaaccagtag

SEQ ID NO: 217139 - DNA, 534 bp, Artificial Sequence
  derived and/or modified sequence
atggccggccccgtgaaggaccgggaggccttccagcggctgaacttcctctatcaggtgtctctgcgacaagggccacacggggacggtgctaggcgaccccgggttaccgctcccctgccacaggctgcacactgtgtgcttgcccaggatcctgaaaaccaggccctggcccggttttattgctacacagagaggactattgcgaagcggctggttctgagaagagatccttccgtgaagcgaaccttgtgtcggggctgtagcagcctcttagtgcctggcctaacctgtacccaccgccagcggcggtgtagaggccagagatggacagtccagacatgtctgacatgtcagaggtcccagaggttcttgaacgatccaggccatcttttatggggcgaccggcctgaagctcagctggggagccaggcagattccaaacccttgcaacctctgccaaatacagcacacagcatatctgacaggctccccgaagagaaaatgcagacccaggggagttcgaatcagtag

SEQ ID NO: 217140 - DNA, 465 bp, Artificial Sequence
  derived and/or modified sequence
atggctggtcctgttaaggaccgggaggcttttcagcggttaaacttcttgtaccaggccgcacactgtgtgctagctcaggatccggagaaccaggctctggctcgattttattgctacacagaaagaaccatcgccaaaaggctcgttctccgaagggacccgagcgtgaagcgtactctatgtaggggctgctcttcactcttagtgccgggattaacatgtacccagcgtcagaggcgctgtcgtgggcaacggtggactgtgcagacctgccttacgtgccagaggagtcagcgattcctgaatgatcccggacaccttctgtggggagatcgcccagaggcgcaactgggatcacaggctgatagtaagcctcttcagcccttgcccaataccgctcattccatttcagatcgcttacccgaggagaaaatgcaaacacagggctcgtccaaccagtag

SEQ ID NO: 217141 - DNA, 534 bp, Artificial Sequence
  derived and/or modified sequence
atggctgggcctgtgaaagacagagaagcgttccagcgcttgaatttcctttaccaggtgtcgttgaggcaaggcccacatggcgacggggctaggcgacctagagtcaccgcccctctgcctcaggccgctcactgtgtgctggctcaagatcccgaaaaccaggcattggccagattctattgctatactgagaggacaatcgcaaagcgcctggtgttgcgtcgagatccatcggtgaagcgcacgctgtgccgaggctgctcttccttactggttccaggcttaacgtgcacccagcgtcagcgtaggtgcagaggccagcgctggaccgtgcagacttgcctgacgtgtcaacggagtcagcggttcctgaacgatccaggccaccttctgtggggtgaccgacccgaggctcagttgggatctcaggccgattccaaaccgctgcagcccctacctaacacagctcattctatttcggatagattgcctgaagagaagatgcaaactcaggggtcctctaaccaatag

SEQ ID NO: 217142 - DNA, 534 bp, Artificial Sequence
  derived and/or modified sequence
atggctggccctgtgaaggaccgtgaggcatttcaacgactgaacttcttgtatcaagtgtctcttaggcaggggccacacggtgatggcgctcggcgacctcgggtgacggcccctctcccccaggccgcacattgtgtgctggcacaggacccagagaaccaggcgttagctcggttctactgttatactgaaaggaccatagctaagcgcctggtcttaaggcgggaccccagcgtgaagcgcaccctttgtaggggctgttcaagcttgctcgtgccaggcctaacttgcacccagcggcaaaggagatgccgagggcagaggtggacggtgcagacctgtctgacctgccagaggtcgcaacgtttcctgaatgatccgggacatctcctgtggggcgacaggcctgaggctcagctcggatcccaggctgactcaaaaccactgcaacctttgcctaacacagcccattcaatcagcgatcgccttccagaggagaagatgcagactaaagggtcctctaaccaatag

SEQ ID NO: 217143 - DNA, 465 bp, Artificial Sequence
  derived and/or modified sequence
atggctggacccgtgaaagaccgggaggcttttcagcgtctcaattttttataccaagcagcccactgtgtcctggctcaggatccggagaaccaggccctggccagattctattgttatacagagagaacaatcgcaaagagactggtgcttagacgtgacccatctgtcaaaaggacgctgtgtcggggttgctcatcccttctggttcccggattgacttgtacccacagacagcgcaggtgtcggggtcagaggtggaccgttcagacctgcctaacttgccagcggagccagcggttccttaacgatcctggccacctcctctggggggacaggcccgaagctcaacttggcagccaagcggattccaaaccgttgcagcccctgcccaatacagctcactcgattagcgaccggctgccggaggaaaagatgcagacacagggcagcagtaaccagtag

SEQ ID NO: 217144 - DNA, 465 bp, Artificial Sequence
  derived and/or modified sequence
atggcaggtcctgtcaaagacagagaggcatttcagaggctgaactttctgtatcaggcggcacactgcgtcctggctcaggacccggaaaaccaggcactagcacgcttctattgctatacagaacgtaccatagccaagcgcctcgtgctacgcagagacccatctgtaaaaaggaccctgtgcagaggctgttccagcctgctggtccccggattgacctgtactcaccgacagcgaaggtgtagagggcagcgatggacggtccagacttgcttgacctgtcagagatcacagcgattccttaacgatccaggccatctgctgtggggcgataggcctgaggctcagcttggaagccaggctgatagcaaacccttacagcccttacctaacacggcccactccatctccgacagactgccagaggaaaaaatgcagacacaggggtcttcaaatcagtag

SEQ ID NO: 217145 - DNA, 465 bp, Artificial Sequence
  derived and/or modified sequence
atggcaggtccagtgaaagaccgggaggcctttcagcgcttgaattttctgtatcaagccgcacactgcgttcttgcccaggatcctgagaatcaggctctcgccaggttttactgttatactgagcggaccatcgccaaaagattagttctccgcagagatccatcagtgaagcgcactctgtgcaggggctgttcctctctccttgttccaggcctgacttgcactcagcgccagagaaggtgtaggggacagcgctggaccgtgcagacatgtttgacttgtcaacggagccaaagatttctcaacgacccaggtcacctcctgtggggcgatcgtcctgaggctcaactgggcagccaagcagattctaaaccgctgcagcctctgccaaataccgcccattccattagcgacaggctgccagaggagaagatgcagacaaaaggctcatctaatcagtag

SEQ ID NO: 217146 - DNA, 534 bp, Artificial Sequence
  derived and/or modified sequence
atggctggtccggtcaaggatcgcgaagcctttcagcgcctcaattttctgtaccaagtgagtttaagacagggaccacacggagacggagctcgaagaccgagggtaaccgcccctctcccacaggccgctcattgcgtcctcgctcaggaccctgaaaatcaagccctggcacgcttttactgttacaccgagcgtacaattgcaaagagattagtgcttaggagagatccttctgtcaagcgtaccctctgtcgaggctgctcatccctgctggttcccggactcacgtgtactcaccgtcagcgcagatgtagaggccagaggtggaccgtgcagacttgcttgacatgtcagcgttctcaacgattcctcaacgatcccggacatctgctctggggggatcgcccagaagcacagttggggagccaggcggactccaaacccctgcaacctttgccaaatacagcacacagtatatccgatcggctgccagaggaaaaaatgcagactcagggtagctcaaatcagtag

SEQ ID NO: 217147 - DNA, 465 bp, Artificial Sequence
  derived and/or modified sequence
atggcaggccctgtcaaagaccgcgaggccttccagcgcctgaatttcctataccaggccgctcattgtgtgctggctcaggaccccgaaaaccaggcactggccagattctattgctatactgagcgtacgattgctaaacgtcttgtgctacggagagacccaagcgtaaagcgcacactttgtcggggatgtagttctctactggtgcctggcctgacatgcacacaacgccagcgtcgctgtaggggccaaaggtggaccgtgcaaacttgtctgacttgccagcggagtcagcggttcctcaacgatcccggtcatctgctgtggggcgaccgccctgaagctcagctcggaagtcaagcagattcaaagccacttcagccattaccgaacaccgctcactcaatcagcgaccgccttcccgaggagaagatgcaaactcagggtagttccaaccagtag

SEQ ID NO: 217148 - DNA, 534 bp, Artificial Sequence
  derived and/or modified sequence
atggccggtccggtcaaggacagagaggcattccagaggctcaacttcctttatcaagtatctttaagacaggggccacacggagatggcgcacggaggcctagggtcaccgcgccactccctcaggccgcacactgtgtcctggctcaggatccagagaatcaggccttggcccgtttttactgctacacggaacgcacaattgccaaaaggcttgtcctgcggcgagatccttccgtcaaacgcactctgtgtcgagggtgctcatctttgcttgtgccaggactgacatgtactcagcgccagcggcgatgccgtggtcagcggtggaccgttcagacctgcctcacatgtcagagaagtcaacggttcttgaatgatcctggacatctgctgtggggtgacagaccagaggctcaactaggatcacaggcagactcaaaaccactccagccgctacctaatacggctcactccatctccgatagactccccgaagagaagatgcagacccagggctcgagcaatcagtag

SEQ ID NO: 217149 - DNA, 534 bp, Artificial Sequence
  derived and/or modified sequence
atggcagggccagtgaaagatcgggaagcctttcaacgcctaaattttctgtaccaagtcagtctacgccaaggccctcatggtgatggcgcaagacggccacgcgtcaccgccccactcccccaggccgcacattgcgttctggcgcaggaccctgagaatcaagcactggcaagattttactgctacaccgaaagaacgattgcaaaaagactggtgctccggagagatccatctgttaagcgcactctctgtagagggtgctccagtctgctggtccccggtctcacctgcacccaaagacagcggcgatgtcgcggacagcgctggaccgtgcaaacatgtttgacctgccagagatcccagaggtttttgaatgacccgggtcacctgctctggggagacaggccagaagcacagctggggagccaggcggattctaaaccactgcagccactcccaaacaccgcacactccatctctgaccggctccctgaagagaagatgcagacacaggggtcgtccaaccagtag

SEQ ID NO: 217150 - DNA, 465 bp, Artificial Sequence
  derived and/or modified sequence
atggcaggacccgtgaaagatcgggaggccttccagaggctcaacttcctctaccaggcagctcattgcgtcctggcacaggacccggagaatcaagctttggctcgattctactgctacaccgaaagaactatagcgaaacggttggtcttaagaagagatccatccgtgaaacggacactgtgtagggggtgcagctctttgctggtgcccggtcttacctgcacgcatcgccagagacgctgccgcggacagcggtggacagtccagacctgcctgacatgtcagcgctcccagcggttcctcaacgacccaggtcacttgctttggggagatcgtccagaagctcagctgggcagccaggcagacagcaagccattacagccactgcctaacacggcccattctatttcagatagactccctgaggagaagatgcagactcagggaagcagtaaccagtag

SEQ ID NO: 217151 - DNA, 534 bp, Artificial Sequence
  derived and/or modified sequence
atggcagggccagttaaagacagggaggcattccaacggctgaatttcctgtaccaagtaagcctgcgtcagggcccacacggcgatggagcaaggcgtccacgagtgaccgccccactgcctcaggctgcccactgtgtgctggcccaggaccctgagaaccaagcactggctcggttttattgctacacagaaaggacgattgccaaacggctcgtcctgcggcgtgatccctcggtcaagagaactctgtgcagggggtgttcttccctgttggtcccaggactgacctgcactcaccgccagcgccgatgtcgtggccagaggtggaccgtgcaaacctgcttgacctgccaaagatcgcagaggtttcttaacgacccaggccatctgctgtggggcgaccggcctgaggcccagcttgggagccaggccgattcgaagcctctccaaccactaccaaatacagctcacagcatcagcgataggttgcccgaggagaagatgcagacacaaggctcatcaaaccagtag

SEQ ID NO: 217152 - DNA, 465 bp, Artificial Sequence
  derived and/or modified sequence
atggccggacccgttaaggatagggaggcttttcaacggttaaatttcctgtatcaagcggctcactgtgtcctggctcaagatcctgaaaatcaggctctggcccgtttctactgctatacagaacgaaccattgccaagagactcgttctgcgtcgcgatccttcagtgaagaggaccctatgtcggggttgcagcagtcttctggtaccaggtctgacatgtactcagagacagcgccgttgcaggggacagcggtggactgtgcaaacttgtctgacatgccagcggagccaaaggttcctgaatgatcctgggcacctgctttggggcgataggcctgaagcgcagctcgggagccaggctgacagtaagcccttgcagccgctaccgaataccgcacattctatttccgataggttgcccgaagagaaaatgcagacccaggggtcttccaaccagtag

SEQ ID NO: 217153 - DNA, 534 bp, Artificial Sequence
  derived and/or modified sequence
atggcgggacccgttaaagatcgggaggctttccagagactgaatttcttataccaggtttctctaagacaggggcctcatggagatggggctcggaggccgagagtcactgcccctctcccgcaggccgctcactgtgtgctcgcacaggatccagagaatcaggcattagccagattctactgctacaccgaacggacgatcgcaaaaaggctggttctgcgacgggaccctagtgttaaacgcaccctatgtcgaggctgcagttccttgttggtcccaggcctgacatgtacccacagacagcggagatgtcgaggccagcgctggacggtgcagacatgtttaacttgtcagcgctctcagcgcttccttaatgatccgggacacttgctgtggggcgaccgcccagaggcccagctggggagccaggctgattccaaaccactgcagcccctccccaatactgcccattccattagtgaccggctgcccgaggaaaagatgcagacccaggggagtagcaaccaatag

SEQ ID NO: 217154 - DNA, 525 bp, Artificial Sequence
  derived and/or modified sequence
gagcgcggcggtgatggcggggccggtgaaggaccgcgaggccttccagaggctcaacttcctgtaccaggccgcccattgtgtccttgcccaggaccccgagaaccaggcgctggcgaggttttactgctacactgagaggaccattgcgaagcggctcgtcttgcggcgagatccctcggtgaagaggactctctgtcgaggctgctcttccctcctcgtcccgggcctcacctgcacccagcgccagagacgctgcaggggacagcgctggaccgtacagacctgcctaacatgccagcgcagccaacgcttcctcaatgatcccgggcatttactctggggagacaggcctgaggcccagctcgggagccaagcagattccaaaccactacaacccttgccaaacacagcccactccatttcagaccgccttcctgaggagaaaatgcagactcagggttccagtaaccagtgatggattcaccccatctcccaaataaagtttacttgttttacattcca

SEQ ID NO: 217155 - DNA, 594 bp, Artificial Sequence
  derived and/or modified sequence
gagcgcggcggtgatggcggggccggtgaaggaccgcgaggccttccagaggctcaacttcctgtaccaggtgagtctgcgacaagggccccacggggacggtgctcggcgtcccagagtgactgctcccctcccgcaggccgcccattgtgtccttgcccaggaccccgagaaccaggcgctggcgaggttttactgctacactgagaggaccattgcgaagcggctcgtcttgcggcgggatccctcggtgaagaggactctctgtcgaggctgctcttccctcctcgtcccgggcctcacctgcacccagcgccagagacgctgcaggggacagcgctggaccgtacagacctgcctaacatgccagcgcagccaacgcttcctcaatgatcccgggcatttactctggggagacaggcctgaggcccagctcgggagccaagcagattccaaaccactacaacccttgccaaacacagcccactccatttcagaccgccttcctgaggagaaaatgcagactcagggttccagtaaccagtgatggattcaccccatctcccaaataaagtttacttgttttacattcca

SEQ ID NO: 217156 - DNA, 594 bp, Artificial Sequence
  derived and/or modified sequence
gagcgcggcggtgatggcggggccggtgaaggaccgcgaggccttccagaggctcaacttcctgtaccaggtgagtctgcgacaagggccccacggggacggtgctcggcgtcccagagtgactgctcccctcccgcaggccgcccattgtgtccttgcccaggaccccgagaaccaggcgctggcgaggttttactgctacactgagaggaccattgcgaagcggctcgtcttgcggcgggatccctcggtgaagaggactctctgtcgaggctgctcttccctcctcgtcccgggcctcacctgcacccagcgccagagacgctgcaggggacagcgctggaccgtacagacctgcctaacatgccagcgcagccaacgcttcctcaatgatcccgggcatttactctggggagacaggcctgaggcccagctcgggagccaagcagattccaaaccactacaacccttgccaaacacagcccactccatttcagaccgccttcctgaggagaaaatgcagacgaagggttccagtaaccagtgatggattcacctcatctcccaaataaagtttacttgttttacattcca

SEQ ID NO: 217157 - DNA, 525 bp, Artificial Sequence
  derived and/or modified sequence
gagcgcggcggtgatggcggggccggtgaaggaccgcgaggccttccagaggctcaacttcctgtaccaggccgcccattgtgtccttgcccaggaccccgagaaccaggcgctggcgaggttttactgctacactgagaggaccattgcgaagcggctcgtcttgcggcgggatccctcggtgaagaggactctctgtcgaggctgctcttccctcctcgtcccgggcctcacctgcacccaccgccagagacgctgcaggggacagcgctggaccgtacagacctgcctaacatgccagcgcagccaacgcttcctcaatgatcccgggcatttactctggggagacaggcctgaggcccagctcgggagccaagcagattccaaaccactacaacccttgccaaacacagcccactccatttcagaccgccttcctgaggagaaaatgcagactcagggttccagtaaccagtgatggattcaccccatctcccaaataaagtttacttgttttacattcca

SEQ ID NO: 217158 - DNA, 525 bp, Artificial Sequence
  derived and/or modified sequence
gagcgcggcggtgatggcggggccggtgaaggaccgcgaggccttccagaggctcaacttcctgtaccaggccgcccattgtgtccttgcccaggaccccgagaaccaggcgctggcgaggttttactgctacactgagaggaccattgcgaagcggctcgtcttgcggcgggatccctcggtgaagaggactctctgtcgaggctgctcttccctcctcgtcccgggcctcacctgcacccagcgccagagacgctgcaggggacagcgctggaccgtacagacctgcctaacatgccagcgcagccaacgcttcctcaatgatcccgggcatttactctggggagacaggcctgaggcccagctcgggagccaagcagattccaaaccactacaacccttgccaaacacagcccactccatttcagaccgccttcctgaggagaaaatgcagacgaagggttccagtaaccagtgatggattcacctcatctcccaaataaagtttacttgttttacattcca

SEQ ID NO: 217159 - DNA, 594 bp, Artificial Sequence
  derived and/or modified sequence
gagcgcggcggtgatggcggggccggtgaaggaccgcgaggccttccagaggctcaacttcctgtaccaggtgagtctgcgacaagggccccacggggacggtgctcggcgtcccagagtgactgctcccctcccgcaggccgcccattgtgtccttgcccaggaccccgagaaccaggcgctggcgaggttttactgctacactgagaggaccattgcgaagcggctcgtcttgcggcgggatccctcggtgaagaggactctctgtcgaggctgctcttccctcctcgtcccgggcctcacctgcacccaccgccagagacgctgcaggggacagcgctggaccgtacagacctgcctaacatgccagcgcagccaacgcttcctcaatgatcccgggcatttactctggggagacaggcctgaggcccagctcgggagccaagcagattccaaaccactacaacccttgccaaacacagcccactccatttcagaccgccttcctgaggagaaaatgcagactcagggttccagtaaccagtgatggattcaccccatctcccaaataaagtttacttgttttacattcca

SEQ ID NO: 217160 - DNA, 525 bp, Artificial Sequence
  derived and/or modified sequence
gagcgcggcggtgatggcggggccggtgaaggaccgcgaggccttccagaggctcaacttcctgtaccaggccgcccattgtgtccttgcccaggaccccgagaaccaggcgctggcgaggttttactgctacactgagaggaccattgcgaagcggctcgtcttgcggcgggatccctcggtgaagaggactctctgtcgaggctgctcttccctcctcgtcccgggcctcacctgcacccagcgccagagacgctgcaggggacagcgctggaccgtacagacctgcctaacatgccagcgcagccaacgcttcctcaatgatcccgggcatttactctggggagacaggcctgaggcccagctcgggagccaagcagattccaaaccactacaacccttgccaaacacagcccactccatttcagaccgccttcctgaggagaaaatgcagactcagggttccagtaaccagtgatggattcaccccatctcccaaataaagtttacttgttttacattcca

SEQ ID NO: 217161 - DNA, 594 bp, Artificial Sequence
  derived and/or modified sequence
gagcgcggcggtgatggcggggccggtgaaggaccgcgaggccttccagaggctcaacttcctgtaccaggtgagtctgcgacaagggccccacggggacggtgctcggcgtcccagagtgactgctcccctcccgcaggccgcccattgtgtccttgcccaggaccccgagaaccaggcgctggcgaggttttactgctacactgagaggaccattgcgaagcggctcgtcttgcggcgagatccctcggtgaagaggactctctgtcgaggctgctcttccctcctcgtcccgggcctcacctgcacccagcgccagagacgctgcaggggacagcgctggaccgtacagacctgcctaacatgccagcgcagccaacgcttcctcaatgatcccgggcatttactctggggagacaggcctgaggcccagctcgggagccaagcagattccaaaccactacaacccttgccaaacacagcccactccatttcagaccgccttcctgaggagaaaatgcagactcagggttccagtaaccagtgatggattcaccccatctcccaaataaagtttacttgttttacattcca

SEQ ID NO: 217162 - DNA, 465 bp, Artificial Sequence
  derived and/or modified sequence
atggccggccccgtgaaggacagagaggccttccagagactgaacttcctgtaccaggccgcccactgcgtgctggcccaggaccccgagaaccaggccctggccagattctactgctacaccgagagaaccatcgccaagagactggtgctgagaagagaccccagcgtgaagagaaccctgtgcagaggctgcagcagcctgctggtgcccggcctgacctgcacccagagacagagaagatgcagaggccagagatggaccgtgcagacctgcctgacctgccagagaagccagagattcctgaacgaccccggccacctgctgtggggcgacagacccgaggcccagctgggcagccaggccgacagcaagcccctgcagcccctgcccaacaccgcccacagcatcagcgacagactgcccgaggagaagatgcagacccagggcagcagcaaccagtag

SEQ ID NO: 217163 - DNA, 534 bp, Artificial Sequence
  derived and/or modified sequence
atggccggccccgtgaaggacagagaggccttccagagactgaacttcctgtaccaggtgagcctgagacagggcccccacggcgacggcgccagaagacccagagtgaccgcccccctgccccaggccgcccactgcgtgctggcccaggaccccgagaaccaggccctggccagattctactgctacaccgagagaaccatcgccaagagactggtgctgagaagagaccccagcgtgaagagaaccctgtgcagaggctgcagcagcctgctggtgcccggcctgacctgcacccagagacagagaagatgcagaggccagagatggaccgtgcagacctgcctgacctgccagagaagccagagattcctgaacgaccccggccacctgctgtggggcgacagacccgaggcccagctgggcagccaggccgacagcaagcccctgcagcccctgcccaacaccgcccacagcatcagcgacagactgcccgaggagaagatgcagacccagggcagcagcaaccagtag

SEQ ID NO: 217164 - DNA, 534 bp, Artificial Sequence
  derived and/or modified sequence
atggccggccccgtgaaggacagagaggccttccagagactgaacttcctgtaccaggtgagcctgagacagggcccccacggcgacggcgccagaagacccagagtgaccgcccccctgccccaggccgcccactgcgtgctggcccaggaccccgagaaccaggccctggccagattctactgctacaccgagagaaccatcgccaagagactggtgctgagaagagaccccagcgtgaagagaaccctgtgcagaggctgcagcagcctgctggtgcccggcctgacctgcacccagagacagagaagatgcagaggccagagatggaccgtgcagacctgcctgacctgccagagaagccagagattcctgaacgaccccggccacctgctgtggggcgacagacccgaggcccagctgggcagccaggccgacagcaagcccctgcagcccctgcccaacaccgcccacagcatcagcgacagactgcccgaggagaagatgcagaccaagggcagcagcaaccagtag

SEQ ID NO: 217165 - DNA, 465 bp, Artificial Sequence
  derived and/or modified sequence
atggccggccccgtgaaggacagagaggccttccagagactgaacttcctgtaccaggccgcccactgcgtgctggcccaggaccccgagaaccaggccctggccagattctactgctacaccgagagaaccatcgccaagagactggtgctgagaagagaccccagcgtgaagagaaccctgtgcagaggctgcagcagcctgctggtgcccggcctgacctgcacccacagacagagaagatgcagaggccagagatggaccgtgcagacctgcctgacctgccagagaagccagagattcctgaacgaccccggccacctgctgtggggcgacagacccgaggcccagctgggcagccaggccgacagcaagcccctgcagcccctgcccaacaccgcccacagcatcagcgacagactgcccgaggagaagatgcagacccagggcagcagcaaccagtag

SEQ ID NO: 217166 - DNA, 465 bp, Artificial Sequence
  derived and/or modified sequence
atggccggccccgtgaaggacagagaggccttccagagactgaacttcctgtaccaggccgcccactgcgtgctggcccaggaccccgagaaccaggccctggccagattctactgctacaccgagagaaccatcgccaagagactggtgctgagaagagaccccagcgtgaagagaaccctgtgcagaggctgcagcagcctgctggtgcccggcctgacctgcacccagagacagagaagatgcagaggccagagatggaccgtgcagacctgcctgacctgccagagaagccagagattcctgaacgaccccggccacctgctgtggggcgacagacccgaggcccagctgggcagccaggccgacagcaagcccctgcagcccctgcccaacaccgcccacagcatcagcgacagactgcccgaggagaagatgcagaccaagggcagcagcaaccagtag

SEQ ID NO: 217167 - DNA, 534 bp, Artificial Sequence
  derived and/or modified sequence
atggccggccccgtgaaggacagagaggccttccagagactgaacttcctgtaccaggtgagcctgagacagggcccccacggcgacggcgccagaagacccagagtgaccgcccccctgccccaggccgcccactgcgtgctggcccaggaccccgagaaccaggccctggccagattctactgctacaccgagagaaccatcgccaagagactggtgctgagaagagaccccagcgtgaagagaaccctgtgcagaggctgcagcagcctgctggtgcccggcctgacctgcacccacagacagagaagatgcagaggccagagatggaccgtgcagacctgcctgacctgccagagaagccagagattcctgaacgaccccggccacctgctgtggggcgacagacccgaggcccagctgggcagccaggccgacagcaagcccctgcagcccctgcccaacaccgcccacagcatcagcgacagactgcccgaggagaagatgcagacccagggcagcagcaaccagtag

SEQ ID NO: 217168 - protein, 286 aa, Artificial Sequence
  derived and/or modified sequence
MAMEGYWRFLALLGSALLVGFLSVIFALVWVLHYREGLGWDGSALEFNWHPVLMVTGFVFIQGIAIIVYRLPWTWKCSKLLMKSIHAGLNAVAAILAIISVVAVFENHNVNNIANMYSLHSWVGLIAVICYLLQLLSGFSVFLLPWAPLSLRAFLMPIHVYSGIVIFGTVIATALMGLTEKLIFSLRDPAYSTFPPEGVFVNTLGLLILVFGALIFWIVTRPQWKRPKEPNSTILHPNGGTEQGARGSMPAYSGNNMDKSDSELNSEVAARKRNLALDEAGQRSTM

SEQ ID NO: 217169 - DNA, 4365 bp, Artificial Sequence
  derived and/or modified sequence
ccatttctgagttggggccagctccccacccccaagaggccccacattccgggccagcagcccagaaagtccctccccgcaggcggagacagccccaagaagtcgacgccccggtcccgccgcccggccactacccagagggctgccgccgcctctccaagttcttgtggcccccgcggtgcggagtatggggcgctgatggccatggagggctactggcgcttcctggcgctgctggggtcggcactgctcgtcggcttcctgtcggtgatcttcgccctcgtctgggtcctccactaccgagaggggcttggctgggatgggagcgcactagagtttaactggcacccagtgctcatggtcaccggcttcgtcttcatccagggcatcgccatcatcgtctacagactgccgtggacctggaaatgcagcaagctcctgatgaaatccatccatgcagggttaaatgcagttgctgccattcttgcaattatctctgtggtggccgtgtttgagaaccacaatgttaacaatatagccaatatgtacagtctgcacagctgggttggactgatagctgtcatatgctatttgttacagcttctttcaggtttttcagtctttctgcttccatgggctccgctttctctccgagcatttctcatgcccatacatgtttattctggaattgtcatctttggaacagtgattgcaacagcacttatgggattgacagagaaactgattttttccctgagagatcctgcatacagtacattcccgccagaaggtgttttcgtaaatacgcttggccttctgatcctggtgttcggggccctcattttttggatagtcaccagaccgcaatggaaacgtcctaaggagccaaattctaccattcttcatccaaatggaggcactgaacagggagcaagaggttccatgccagcctactctggcaacaacatggacaaatcagattcagagttaaacagtgaagtagcagcaaggaaaagaaacttagctctggatgaggctgggcagagatctaccatgtaaaatgttgtagagatagagccatataacgtcacgtttcaaaactagctctacagttttgcttctcctattagccatatgataattgggctatgtagtatcaatatttactttaatcacaaaggatggtttcttgaaataatttgtattgattgaggcctatgaactgacctgaattggaaaggatgtgattaatataaataatagcagatataaattgtggttatgttacctttatcttgttgaggaccacaacattagcacggtgccttgtgcagaatagatactcaatatgtgaatatgtgtctactagtagttaattggataaactggcagcatccctggcctgttgtcatgcagtcatttcctgttaattctgggagacaatgatttcacaactagcgggaagcagtcctaaaagtttaaaatccgataaggaatatctgggacagggtttagatcatgactctacacagataccatgatgagagtatattaaagaaatttaggaaagcacctggttcctttctccccatgcctgccttctgctccctccccagctggtttgggctcaaattgtccctggagactagggtttatgttagggtattgatagattagagcaggtggttgaagagatcttctctggtcagacttggaagaatttccaaaactgaagttagccccaagacttccctagggttgatgtactttatgatccagatgctaaacttcttagaatgaaaatatgcttcaacacttaagtagcatacactgccctacaaacctcagagagcacttttccccaagttcttgtttttatttttgaaagtactcacacagcacttactatgctccaaacactcctctaagcactttacacatattagctcattcagtccccagacagacgggatgaagtaggtattgttactgttcccattttacaggtgagagatttgaagcctggggaggctagtaactcaccccaaggtcacacggctcatacatggtgggactgagactcagatgcaggcagtctggcacctcagtctggattctaaccatttcactaagctatttttgtcttgtactactttgacccacccctgaataaacctcaattgctggagtggggtgtagttattaaagggatgctttttaccttttgctgtttgctgtggcagattccccagataaccaaggaaaaggggccacccatacctggaaataggccatagggcccctactactgccaacaagccatggcctaccttgacacttgtttgatcttaaaattgtgtcttggtaacaaaagatttggacaggcatatctgtagctttcaagttaattaattgcaatatttttttcttcaggattttagctgctgaacaactttcagtttggagctaaaagagacctgtctcatggtctgcccttccctggggcaatagctagggtctttcctgatttttatggaattttaggggatattttgagctttgggttctcagtagtgaattgagacttggaggtgacttttcatgtttggagtatcatctctgtctgggatctgggctgacaaattaaaacctagagtagtgcttatgctgaaatgatacttttcattttttggttgatttttttgccttcccttcaattttaaactgaagcattttaatatgggtagaaactctacaccaaatacactaaacattttggtgcttagtggatttctttttaggtaactggtacttacttccaaagactgaatacaagccacactccatcatatcccttaaacttcatgaaaaaccattcaagatccccttgctgcaacactgttctcttcttctctactaaattctatttccaaaattggtaatagagccagaaggatccccagtacccagccctctgcctggcacaaagtggtagcacaattaaattcagtatgggtggagcatggtacagtcttggtgccatagaaggagtagttgcatagtcacacatcatttgataagttggatgttccattacatagaggaacacaaaattccagggtttttggaggaagggattagatagtgactaagccgccagaattgaggtggccattcctttttgtataggctaagaaacaggttatcagtgaaaagttaattatggctttggcactagaatagcactgttgcaaagtatttaagcaccccccatctcagccctttattttatctttcatgtgggctaatgtgaggataatcttacagatattataggaatttcttttctatctttatgaaaacaacgtatataaaatatatctagaaaacctttgtttgagactcttatttaatgggcttttgattctaatgataattgtacctttatctttcaaaagctgatatttcctacctaagcatctcccgagaaaaatatctcattaaaaagcccataaataataggggagaagaaagccttaggtatcaattccaaaacagtgattgaaatttcccaaaataattatggcttctgtcatctccagagataatctggcttggtttaccccataatctaatttcagaaaagaaagctttattttaacactcatctgaatcaacattaaagccttttctctcaaagcgtttattgagaaactcaaatgaatatactttttgaattactgtcatcaaaagtgtacggcttcctgtgctgcttgtgtcaaatggaacctgccctctaaagcactttctttcctttacttgcgtggtttcatgtaagctgtgctgtttagaaacaacatctcagactttacaaagaaatgacaaagaaggcaattgcactttttaagggatatcgacaagcagtttctgttttctaaaggacaaaatacagagtgtgtgtcatttttaattagattctttcccctgctgagttggaaattccagtgcagcactgattgaccacagttgccaatctaaaagcacaaagacagaagtaaagctttatgctaattttatttcaatatgatagaaaatttatcttggtatgtccttttttagataactccagcaggaaactgtaactgctatgtctttaggaaaatgtagaagaaagaacattattgttctttaattcctacaaggtactcgaaaaccttaagtgaaaaagatttctatctttttatcttagcgcatttatggaaaaaatattaactatcctgaatattttataattttgtaggaaaaatatgcatctattttttcttgacttcttttatatagtaataaaagttattttggaagctc

SEQ ID NO: 217170 - DNA, 861 bp, Artificial Sequence
  derived and/or modified sequence
atggccatggagggctactggagattcctggccctgctgggcagcgccctgctggtgggcttcctgagcgtgatcttcgccctggtgtgggtgctgcactacagagagggcctgggctgggacggcagcgccctggagttcaactggcaccccgtgctgatggtgaccggcttcgtgttcatccagggcatcgccatcatcgtgtacagactgccctggacctggaagtgcagcaagctgctgatgaagagcatccacgccggcctgaacgccgtggccgccatcctggccatcatcagcgtggtggccgtgttcgagaaccacaacgtgaacaacatcgccaacatgtacagcctgcacagctgggtgggcctgatcgccgtgatctgctacctgctgcagctgctgagcggcttcagcgtgttcctgctgccctgggcccccctgagcctgagagccttcctgatgcccatccacgtgtacagcggcatcgtgatcttcggcaccgtgatcgccaccgccctgatgggcctgaccgagaagctgatcttcagcctgagagaccccgcctacagcaccttcccccccgagggcgtgttcgtgaacaccctgggcctgctgatcctggtgttcggcgccctgatcttctggatcgtgaccagaccccagtggaagagacccaaggagcccaacagcaccatcctgcaccccaacggcggcaccgagcagggcgccagaggcagcatgcccgcctacagcggcaacaacatggacaagagcgacagcgagctgaacagcgaggtggccgccagaaagagaaacctggccctggacgaggccggccagagaagcaccatgtag

SEQ ID NO: 217171 - DNA, 861 bp, Artificial Sequence
  derived and/or modified sequence
atggcgatggaaggctattggaggtttttagccctgctggggagtgccttgctagttggctttctctcagtgatctttgcgctagtatgggtgcttcattatagggaaggattagggtgggatggcagcgccctcgaatttaattggcaccctgtgttgatggtcacaggttttgttttcattcagggtattgctatcatcgtctataggctgccctggacctggaaatgtagcaagttgttgatgaaatctatccatgccggtctgaatgctgtcgccgccatcctggcgattattagcgtcgtagcagttttcgaaaatcacaatgtaaataacatcgctaatatgtatagcttacactcctgggtgggactgattgccgtgatctgttacctgctccagctgcttagcggattctccgtgttcctcttgccatgggcacccttatccctgcgagcattcctaatgccgatccacgtgtatagcggaattgtgatcttcgggaccgtcatcgcgaccgcgctgatgggcctcaccgagaagttaattttcagtcttagggatcccgcctactctacatttccccctgagggtgtcttcgtgaacacacttggcctgctgatattggtattcggggccctcatattttggattgtcactcggccgcagtggaaaagaccgaaagagcctaattcgaccatcctgcatccaaacggtggtaccgaacagggggctaggggctcaatgccagcctacagtggaaataatatggataagtcggactcagagctgaactccgaagtagccgctaggaagcgcaacttggcgttggatgaagctggccagcgctcaacaatgtag

SEQ ID NO: 217172 - DNA, 861 bp, Artificial Sequence
  derived and/or modified sequence
atggccatggagggctactggaggttcctggccctgctgggcagcgccctgctggtgggcttcctgagcgtcatctttgccctggtgtgggtgctgcactaccgggagggcctgggctgggatggcagcgccctggagttcaactggcaccctgtgctgatggtgacaggctttgtgttcatccagggcatcgccatcatcgtgtaccgcctgccctggacctggaagtgcagcaagctgctgatgaagagcatccatgctggcctgaatgctgtggccgccatcctggccatcatctctgtggtggccgtgtttgagaaccacaacgtgaacaacatcgccaacatgtacagcctgcacagctgggtgggcctgattgctgtgatctgctacctgctgcagctgctgagcggcttcagcgtcttcctgctgccctgggcccccctgagcctgcgggccttcctgatgcccatccacgtgtacagcggcatcgtcatctttggaacagtgattgccacagccctgatgggcctgacagagaagctgatcttcagcctgcgggaccctgcctacagcaccttccccccagagggcgtgtttgtgaacaccctgggcctgctgatcctggtgtttggagccctgatcttctggatcgtgacccggccccagtggaagaggcccaaggagcccaacagcaccatcctgcaccccaacggcggcacagagcagggcgcccggggctccatgcctgcctacagcggcaacaacatggacaagagtgacagcgagctgaacagcgaggtggccgccaggaagaggaacctggccctggatgaggccggccagaggagcaccatgtag

SEQ ID NO: 217173 - DNA, 861 bp, Artificial Sequence
  derived and/or modified sequence
atggccatggagggctactggcggttcctggccctgctgggcagcgccctgctcgtgggcttcctctctgtcatcttcgccttggtgtgggtgttgcattatcgcgagggacttgggtgggacggtagcgctcttgagtttaactggcacccagttcttatggtgacgggctttgtctttatccagggcatcgctattattgtgtatcgactgccctggacctggaaatgttccaagttactcatgaagagtatccatgccggactgaacgccgtagccgcaatcctggcaattatctctgtggtggccgtgttcgagaaccacaacgttaataatattgccaacatgtattctttacactcttgggtgggcttgatcgccgtgatctgttacctcctgcagctgctgagcgggttctcagtctttctgcttccttgggcaccactgtctcttcgcgcattcctgatgcctatccacgtctactccggaattgtcattttcgggacagtcatagcaacagccctgatgggcttgaccgaaaagctgattttcagcctgagggatcccgcctactccacctttccaccagaaggcgtgtttgtcaatactctaggcctgctgattctagtgttcggtgcgttaattttctggattgtcacccggccacaatggaagaggcctaaggagcccaattctacaattttacatccgaacggaggaacggagcagggcgccaggggatccatgcctgcgtatagcggcaacaatatggataaatcggattcagagcttaattctgaggtggctgccagaaaacgcaatctagccctcgatgaggcaggtcagcgcagcaccatgtag

SEQ ID NO: 217174 - DNA, 861 bp, Artificial Sequence
  derived and/or modified sequence
atggcaatggaaggatattggcgttttctggccttgctggggtctgcgctgctcgtgggtttcctgtcagttattttcgccctggtgtgggtgttacactatcgggaggggctcggctgggacgggtcggcattggaatttaactggcacccggtgctgatggtcacaggtttcgtctttatccagggcatcgccatcattgtatatagactgccttggacatggaaatgctccaagttgctgatgaagagcatccacgctgggctgaatgcagtggcagcaattctggccatcatctcagtagtggcagttttcgagaaccacaacgtcaacaacatcgcaaacatgtacagcctgcacagctgggtgggactgatagctgtgatatgttatctgcttcagctgcttagtgggttctcagtgttccttctcccgtgggcacctctcagtcttcgtgcttttctgatgcccattcacgtgtattccggcattgtaatctttggcacggtaattgcaactgctctcatggggctgaccgagaaacttattttttctctccgggacccagcttactccacgtttccgcctgagggcgtttttgttaataccctcgggctgcttatcctcgtatttggcgcactcattttttggattgtgactagaccacagtggaaacgtcccaaggagccaaatagcactatcttacacccgaacggaggcaccgaacagggcgcaagaggctccatgccagcatacagcggaaataatatggataaatctgacagcgagctcaactcagaagtggctgctcgcaagaggaacttagcccttgacgaagcaggacagcggtccaccatgtag

SEQ ID NO: 217175 - protein, 656 aa, Artificial Sequence
  derived and/or modified sequence
MEELDGEPTVTLIPGVNSKKNQMYFDWGPGEMLVCETSFNKKEKSEMVPSCPFIYIIRKDVDVYSQILRKLFNESHGIFLGLQRIDEELTGKSRKSQLVRVSKNYRSVIRACMEEMHQVAIAAKDPANGRQFSSQVSILSAMELIWNLCEILFIEVAPAGPLLLHLLDWVRLHVCEVDSLSADVLGSENPSKHDSFWNLVTILVLQGRLDEARQMLSKEADASPASAGICRIMGDLMRTMPILSPGNTQTLTELELKWQHWHEECERYLQDSTFATSPHLESLLKIMLGDEAALLEQKELLSNWYHFLVTRLLYSNPTVKPIDLHYYAQSSLDLFLGGESSPEPLDNILLAAFEFDIHQVIKECSIALSNWWFVAHLTDLLDHCKLLQSHNLYFGSNMREFLLLEYASGLFAHPSLWQLGVDYFDYCPELGRVSLELHIERIPLNTEQKALKVLRICEQRQMTEQVRSICKILAMKAVRNNRLGSALSWSIRAKDAAFATLVSDRFLRDYCERGCFSDLDLIDNLGPAMMLSDRLTFLGKYREFHRMYGEKRFADAASLLLSLMTSRIAPRSFWMTLLTDALPLLEQKQVIFSAEQTYELMRCLEDLTSRRPVHGESDTEQLQDDDIETTKVEMLRLSLARNLARAIIREGSLEGS

SEQ ID NO: 217176 - protein, 259 aa, Artificial Sequence
  derived and/or modified sequence
MREFLLLEYASGLFAHPSLWQLGVDYFDYCPELGRVSLELHIERIPLNTEQKALKVLRICEQRQMTEQVRSICKILAMKAVRNNRLGSALSWSIRAKDAAFATLVSDRFLRDYCERGCFSDLDLIDNLGPAMMLSDRLTFLGKYREFHRMYGEKRFADAASLLLSLMTSRIAPRSFWMTLLTDALPLLEQKQVIFSAEQTYELMRCLEDLTSRRPVHGESDTEQLQDDDIETTKVEMLRLSLARNLARAIIREGSLEGS

SEQ ID NO: 217177 - DNA, 1971 bp, Artificial Sequence
  derived and/or modified sequence
atggaagaactagacggggagcccaccgtgaccctgatccccggtgtgaacagcaagaagaaccagatgtactttgactggggccccggcgaaatgctcgtgtgtgagaccagctttaataagaaagagaagagtgagatggtgccatcatgccccttcatttatatcatcagaaaagatgttgacgtgtattctcaaatactacgaaagttgtttaacgagtcgcacggcattttcctcggcctccagagaatcgacgaggaactgactggcaaatcccggaagagtcagcttgtccgggtgtctaaaaactatcgttcagtgataagagcatgcatggaggagatgcaccaagtcgctattgccgctaaagaccccgccaacggcaggcagttcagctctcaggtgtccattctgagtgcgatggagttaatttggaacttgtgcgagatcctgttcatcgaagtggcacccgccgggcccctattactgcacttgctggactgggtccggctgcatgtctgtgaagtcgatagtctctcagccgacgtgttggggtccgaaaacccctcaaagcacgactccttctggaacctcgtcaccattctggtgctccagggtagactcgacgaggctagacaaatgctctctaaggaggccgatgcgtccccagcatctgccggtatctgcagaatcatgggcgatctaatgagaactatgcctatacttagccctgggaatacacaaactctgactgagttggaattgaagtggcagcattggcacgaggagtgtgagcgatacctgcaggattcgacattcgcgacttcaccccacctggaatcccttctgaaaatcatgctcggagacgaggccgctctgctggagcagaaagaactcctgagcaattggtaccactttttggtgacacggttactgtacagcaacccaaccgtgaaacctatcgatctgcactactacgcgcaaagtagtttggacctgttcctcggcggtgaaagctcaccagagcctctggacaacatattgctcgccgcctttgagttcgacatccaccaggtgatcaaggaatgcagcatcgctttgagtaattggtggtttgtagctcacctgaccgacctgctagaccactgtaagttgctgcagtctcacaacctgtatttcggtagcaatatgagagaatttctgttgttggagtacgcctccgggctgtttgcccacccaagtctgtggcaactgggcgttgactactttgactactgcccagagctaggtcgcgtatcactcgagctgcatatcgaaaggattcccctgaacacagaacaaaaggcactgaaggtgctgaggatttgcgagcagcggcagatgactgagcaagtgcgaagtatatgtaagatactggctatgaaggctgtgagaaataataggcttggaagcgccctgtcctggagcattcgggcgaaagacgctgcctttgctacactagtgtccgatcggttcctgcgagactactgtgaacgcggatgcttttcagatttagatcttattgacaatctggggcctgcaatgatgctctcggatagactgacatttttgggcaaatatcgggagttccaccgcatgtacggcgaaaaacggttcgcggatgctgcgtcccttctactgagcctgatgaccagcaggatcgctccaagaagtttttggatgacactgcttacagacgcccttcctttgctggaacagaagcaagtcattttctctgccgagcagacatacgagcttatgagatgcttggaagacctcacttcccgcaggcccgtccatggcgagagtgacaccgagcagcttcaggatgatgatattgaaacgactaaggtggaaatgctacggctgtcgctagctcgaaacctggcccgcgctatcatccgcgaaggctcactcgaggggagctag

SEQ ID NO: 217178 - DNA, 1971 bp, Artificial Sequence
  derived and/or modified sequence
atggaggagctggatggagagcccaccgtgaccctcatccctggggtgaacagcaagaagaaccagatgtactttgactggggccctggagagatgctggtgtgtgagaccagcttcaacaagaaggagaagtctgagatggtgcccagctgccccttcatctacatcatcaggaaggatgtggatgtgtacagccagatcctgaggaagctgttcaatgaaagccacggcatcttcctgggcctgcagagaattgatgaggagctgaccgggaagagcaggaagagccagctggtgcgggtgtccaagaactacagaagtgtcatccgggcctgcatggaggagatgcaccaggtggccatcgccgccaaggaccctgccaacggccggcagttcagcagccaggtgtccatcctgagcgccatggagctgatctggaacctgtgtgagatcctcttcatcgaggtggccccagctggccccctgctgctgcacctgctggactgggtgcggctgcacgtgtgtgaggtggacagcctgtctgcagatgtgctgggcagcgagaaccccagcaagcatgacagcttctggaacctggtgaccatcctggtgctgcagggccgcctggatgaggcccggcagatgctgagcaaggaggctgatgccagccctgccagcgctggcatctgccgcatcatgggagacctgatgaggaccatgcccatcctgagccctggcaacacccagaccctgacagagctggagctgaagtggcagcactggcatgaggagtgtgagcgctacctgcaggacagcacctttgccaccagcccccacctggagagcctgctgaagatcatgctgggagatgaggccgccctgctggagcagaaggagctgctgagcaactggtaccacttcctggtgacccggctgctgtacagcaaccccaccgtgaagcccatcgacctgcactactatgcccagagcagcctggacctcttcctgggcggggagagcagccctgagcccctggacaacatcctgctggccgcctttgaatttgacatccaccaggtgatcaaggaatgttccatcgccctgagcaactggtggtttgtggcccacctgacagacctgctggaccactgcaagctgctgcagagccacaacctgtacttcggcagcaacatgagggagttcctgctgctggagtatgccagcggcctgtttgcccaccccagcctgtggcagctgggcgtggactactttgactactgcccagagctgggccgggtgtccctggagctgcacatcgagcgcatccccctgaacacagagcagaaggccctgaaggtgctgcgcatctgtgagcagaggcagatgacagagcaggtgcgcagcatctgcaagatcctggccatgaaggctgtgaggaacaaccggctgggcagcgccctgtcctggagcatccgggccaaggatgctgcctttgccaccctggtgtctgaccgcttcctgcgggactactgtgagcggggctgcttcagtgacctggacctgattgacaacctgggccctgccatgatgctgagtgaccggctgaccttcctgggcaagtaccgggagttccacaggatgtacggggagaagagatttgctgatgctgccagcctgctgctgagcctgatgaccagccgcatcgcccccaggagcttctggatgaccctgctgacagatgccctgcccctgctggagcagaagcaggtgatcttctctgctgagcagacctatgagctgatgcgctgcctggaggacctgaccagccggcggcctgtgcacggggagagtgacacagagcagctgcaggatgatgacatcgagaccaccaaggtggagatgctgcggctgagcctggccaggaacctggcccgggccatcatccgggagggcagcctggagggcagctag

SEQ ID NO: 217179 - DNA, 1971 bp, Artificial Sequence
  derived and/or modified sequence
atggaggagctggacggcgagcccaccgtgaccctgatccccggcgttaacagtaaaaaaaaccaaatgtacttcgattggggcccgggcgagatgctggtctgtgagacctcctttaacaaaaaggaaaagtcagagatggtacctagctgtccattcatttacatcataagaaaggacgtggacgtttacagccagatcctgaggaagttattcaatgaatcacatggaatttttctcggccttcagaggattgacgaggaactgactggcaagtcacggaagagccagttggttcgggtgagtaagaactatcggtcagtgattcgcgcatgtatggaagaaatgcatcaagttgctatcgcggctaaagatcctgctaatgggcggcagttctccagccaagtgtcgattctaagcgccatggagctcatatggaatctgtgcgaaatcctgttcattgaggtggctcctgcaggtcccctccttcttcacctgctggattgggtgagattgcatgtttgcgaagtcgactccctgtcagcagacgttctcgggtcagagaacccaagtaagcacgacagcttctggaacctggtgaccatcctcgtgctgcagggtcgtctcgacgaagctagacaaatgctgagtaaggaggccgacgccagccccgcatccgcaggaatctgtcgcatcatgggggatcttatgaggacaatgcccatcctctcaccgggcaatacacagactctcacggagctggaactgaaatggcagcactggcacgaagaatgtgaacgctacctacaggacagtacattcgcgaccagtcctcacctggagtccctgctgaagatcatgctaggcgatgaagcagctctgttggagcagaaagaattactgagcaactggtaccatttcctggtgacaaggttgctctattctaatcctacagtcaagcctattgatctccactattacgcgcagagtagcttggacctgttcttggggggagagtcttccccagagcccctcgataacatcctgctggcagcctttgaattcgacatccaccaggtcattaaggaatgcagcatcgccctttcgaactggtggttcgtcgcccacttaactgacctgttagaccactgcaagctgctgcagagtcacaatctttacttcgggagtaacatgcgggagttcctgcttctggaatatgcatcaggcttattcgctcatccaagcctgtggcagctaggcgttgactacttcgactattgtcccgaattgggccgagtgtccctggaattgcatatcgagagaattcccctcaacacggaacaaaaagccttgaaggttctaagaatatgcgagcagaggcaaatgaccgaacaggtgcgttctatctgcaagattctggccatgaaggccgttcggaataataggctcggctcagctttaagctggtcaatccgagcaaaggatgccgctttcgccactctcgtctcagaccgttttctgagagattactgtgagagaggctgctttagtgacttggatctcatcgataaccttggccccgcaatgatgctgtcagaccgcctcacctttttaggcaagtacagggagtttcacagaatgtatggggaaaagcgtttcgcagacgcggcatcacttttgctcagtctcatgacctctcgtatcgcccctcggtcgttttggatgacgctgcttaccgatgccctgccattgctggagcagaagcaggtcatctttagcgcagaacaaacttacgaacttatgcgctgtttagaagacttgacttcccgacgcccggttcatggcgagagcgatactgaacagctccaggacgatgacattgagactacaaaggtggaaatgctccggctgtcccttgcacgcaatctggctcgtgccatcatcagagagggttctctggagggcagttag

SEQ ID NO: 217180 - DNA, 2311 bp, Artificial Sequence
  derived and/or modified sequence
cggtactctgagtgcagtcagtcctcggcgctgttttccctgatttgctgtcgacgccaggaaggaaggacgcgtgcagaggaccgcagaggggtggccgtggctgagaggagacagcgccgcagcactgagggtttgggcttgcaggcgctgcaggagacgcccaggcggagtcttgtctcgcagccagctctgagcgggaggcctgagcgggaagcattggcgtccgagcgacttctaggagcctggggttcggcgctatggaggagctcgatggcgagccaacagtcactttgattccaggcgtgaattccaagaagaaccaaatgtattttgactggggtccaggggagatgctggtatgtgaaacctccttcaacaaaaaagaaaaatcagagatggtgccaagttgcccctttatctatatcatccgtaaggatgtagatgtttactctcaaatcttgagaaaactcttcaatgaatcccatggaatctttctgggcctccagagaattgacgaagagttgactggaaaatccagaaaatctcaattggttcgagtgagtaaaaactaccgatcagtcatcagagcatgtatggaggaaatgcaccaggttgcaattgctgctaaagatccagccaatggccgccagttcagcagccaggtctccattttgtcagcaatggagctcatctggaacctgtgtgagattctttttattgaagtggccccagctggccctctcctcctccatctccttgactgggtccggctccatgtgtgcgaggtggacagtttgtcggcagatgttctgggcagtgagaatccaagcaaacatgacagcttctggaacttggtgaccatcttggtgctgcagggccggctggatgaggcccgacagatgctctccaaggaagccgatgccagccccgcctctgcaggcatatgccgaatcatgggggacctgatgaggacaatgcccattcttagtcccgggaacacccagacactgacagagctggagctgaagtggcagcactggcacgaggaatgtgagcggtacctccaggacagcacattcgccaccagccctcacctggagtctctcttgaagattatgctgggagacgaagctgccttgttagagcagaaggaacttctgagtaattggtatcatttcctagtgactcggctcttgtactccaatcccacagtaaaacccattgatctgcactactatgcccagtccagcctggacctgtttctgggaggtgagagcagcccagaacccctggacaacatcttgttggcagcctttgagtttgacatccatcaagtaatcaaagagtgcagcatcgccctgagcaactggtggtttgtggcccacctgacagacctgctggaccactgcaagctcctccagtcacacaacctctatttcggttccaacatgagagagttcctcctgctggagtacgcctcgggactgtttgctcatcccagcctgtggcagctgggggtcgattactttgattactgccccgagctgggccgagtctccctggagctgcacattgagcggatacctctgaacaccgagcagaaagccctgaaggtgctgcggatctgtgagcagcggcagatgactgaacaagttcgcagcatttgtaagatcttagccatgaaagccgtccgcaacaatcgcctgggttctgccctctcttggagcatccgtgctaaggatgccgcctttgccacgctcgtgtcagacaggttcctcagggattactgtgagcgaggctgcttttctgatttggatctcattgacaacctggggccagccatgatgctcagtgaccgactgacattcctgggaaagtatcgcgagttccaccgtatgtacggggagaagcgttttgccgacgcagcttctctccttctgtccttgatgacgtctcggattgcccctcggtctttctggatgactctgctgacagacgccttgccccttttggaacagaaacaggtgattttctcagcagaacagacttatgagttgatgcggtgtctggaggacttgacgtcaagaagacctgtgcatggagaatctgataccgagcagctccaggatgatgacatagagaccaccaaggtggaaatgctgagactttctctggcacgaaatcttgctcgggcaattataagagaaggctcactggaaggttcctgagaactgcttcaatgtggtatctttgtatggcaatgtatatagatttttttaaaagaataaatgttgttttgcaaatgtag

SEQ ID NO: 217181 - DNA, 2233 bp, Artificial Sequence
  derived and/or modified sequence
attggcgtccgagcgacttctaggagcctggggttcggcgctatggaggagctcgatggcgagccaacagtcactttgattccaggcgtgaattccaagaagaaccaaatgtattttgactggggtccaggggagatgctggtatgtgaaacctccttcaacaaaaaagaaaaatcagagatggtgccaagttgcccctttatctatatcatccgtaaggatgtagatgtttactctcaaatcttgagaaaactcttcaatgaatcccatggaatctttctgggcctccagagaattgacgaagagttgactggaaaatccagaaaatctcaattggttcgagtgagtaaaaactaccgatcagtcatcagagcatgtatggaggaaatgcaccaggttgcaattgctgctaaagatccagccaatggccgccagttcagcagccaggtctccattttgtcagcaatggagctcatctggaacctgtgtgagattctttttattgaagtggccccaggtgaccatcttggtgctgcagggccggctggatgaggcccgacagatgctctccaaggaagccgatgccagccccgcctctgcaggcatatgccgaatcatgggggacctgatgaggacaatgcccattcttagtcccgggaacacccagacactgacagagctggagctgaagtggcagcactggcacgaggaatgtgagcggtacctccaggacagcacattcgccaccagccctcacctggagtctctcttgaagattatgctgggagacgaagctgccttgttagagcagaaggaacttctgagtaattggtatcatttcctagtgactcggctcttgtactccaatcccacagtaaaacccattgatctgcactactatgcccagtccagcctggacctgtttctgggaggtgagagcagcccagaacccctggacaacatcttgttggcagcctttgagtttgacatccatcaagtaatcaaagagtgcagcatcgccctgagcaactggtggtttgtggcccacctgacagacctgctggaccactgcaagctcctccagtcacacaacctctatttcggttccaacatgagagagttcctcctgctggagtacgcctcgggactgtttgctcatcccagcctgtggcagctgggggtcgattactttgattactgccccgagctgggccgagtctccctggagctgcacattgagcggatacctctgaacaccgagcagaaagccctgaaggtgctgcggatctgtgagcagcggcagatgactgaacaagttcgcagcatttgtaagatcttagccatgaaagccgtccgcaacaatcgcctgggttctgccctctcttggagcatccgtgctaaggatgccgcctttgccacgctcgtgtcagacaggttcctcagggattactgtgagcgaggctgcttttctgatttggatctcattgacaacctggggccagccatgatgctcagtgaccgactgacattcctgggaaagtatcgcgagttccaccgtatgtacggggagaagcgttttgccgacgcagcttctctccttctgtccttgatgacgtctcggattgcccctcggtctttctggatgactctgctgacagacgccttgccccttttggaacagaaacaggtgaaggttgcagcagcagtggttttctttgcttgtcagtccctgctagagcttagttgtatagctgttgccgatgtgcgtgtttcctcctttgtcgttctgcctgtgcgcgtgtattccccttagcgccctctctgggattccagactcacacaggaaacaaacactgcttgatttgaaatgaggtattcgtatacaaagcacactattgcgaagggtatgaaaggaagaacgtccgaacatgggcccctgccccaaccaatgcaggccagggctgggggcagccaagcaaggcaggctctcttccctaggtgattttctcagcagaacagacttatgagttgatgcggtgtctggaggacttgacgtcaagaagacctgtgcatggagaatctgataccgagcagctccaggatgatgacatagagaccaccaaggtggaaatgctgagactttctctggcacgaaatcttgctcgggcaattataagagaaggctcactggaaggttcctgagaactgcttcaatgtggtatctttgtatggc

SEQ ID NO: 217182 - DNA, 2010 bp, Artificial Sequence
  derived and/or modified sequence
ctgagcgggaagcattggcgtccgagcgacttctaggagcctggggttcggcgctatggaggagctcgatggcgagccaacagtcactaaaaatcagagatggtgccaagttgcccctttatctatatcatccgtaaggatgtagatgtttactctcaaatcttgagaaaactcttcaatgaatcccatggaatctttctgggcctccagagaattgacgaagagttgactggaaaatccagaaaatctcaattggttcgagtgagtaaaaactaccgatcagtcatcagagcatgtatggaggaaatgcaccaggttgcaattgctgctaaagatccagccaatggccgccagttcagcagccaggtctccattttgtcagcaatggagctcatctggaacctgtgtgagattctttttattgaagtggccccagctggccctctcctcctccatctccttgactgggtccggctccatgtgtgcgaggtggacagtttgtcggcagatgttctgggcagtgagaatccaagcaaacatgacagcttctggaacttggtgaccatcttggtgctgcagggccggctggatgaggcccgacagatgctctccaaggaagccgatgccagccccgcctctgcaggcatatgccgaatcatgggggacctgatgaggacaatgcccattcttagtcccgggaacacccagacactgacagagctggagctgaagtggcagcactggcacgaggaatgtgagcggtacctccaggacagcacattcgccaccagccctcacctggagtctctcttgaagattatgctgggagacgaagctgccttgttagagcagaaggaacttctgagtaattggtatcatttcctagtgactcggctcttgtactccaatcccacagtaaaacccattgatctgcactactatgcccagtccagcctggacctgtttctgggaggtgagagcagcccagaacccctggacaacatcttgttggcagcctttgagtttgacatccatcaagtaatcaaagagtgcagcatcgccctgagcaactggtggtttgtggcccacctgacagacctgctggaccactgcaagctcctccagtcacacaacctctatttcggttccaacatgagagagttcctcctgctggagtacgcctcgggactgtttgctcatcccagcctgtggcagctgggggtcgattactttgattactgccccgagctgggccgagtctccctggagctgcacattgagcggatacctctgaacaccgagcagaaagccctgaaggtgctgcggatctgtgagcagcggcagatgactgaacaagttcgcagcatttgtaagatcttagccatgaaagccgtccgcaacaatcgcctgggttctgccctctcttggagcatccgtgctaaggatgccgcctttgccacgctcgtgtcagacaggttcctcagggattactgtgagcgaggctgcttttctgatttggatctcattgacaacctggggccagccatgatgctcagtgaccgactgacattcctgggaaagtatcgcgagttccaccgtatgtacggggagaagcgttttgccgacgcagcttctctccttctgtccttgatgacgtctcggattgcccctcggtctttctggatgactctgctgacagacgccttgccccttttggaacagaaacaggtgattttctcagcagaacagacttatgagttgatgcggtgtctggaggacttgacgtcaagaagacctgtgcatggagaatctgataccgagcagctccaggatgatgacatagagaccaccaaggtggaaatgctgagactttctctggcacgaaatcttgctcgggcaattataagagaaggctcactggaaggttcctgagaactgcttcaatgtggtatctttgtatggcaatgtatatagatttttttaaaagaataaatgttgttttgcaaatgt

SEQ ID NO: 217183 - DNA, 1971 bp, Artificial Sequence
  derived and/or modified sequence
atggaggaactggacggtgaacctacagtgactttaatcccgggagttaacagcaagaaaaatcaaatgtatttcgactggggaccaggggagatgctcgtgtgtgaaacatcgttcaacaaaaaagagaaatccgaaatggtcccctcttgcccctttatttacattatcagaaaggatgtggacgtctacagccaaattctgcgtaaattgtttaatgagagccacggcatattccttggtctgcagaggatcgacgaggaacttactgggaaaagtcggaagtcccagcttgttcgagtatctaaaaattacagaagtgttatccgcgcatgtatggaggaaatgcaccaggtggcgatcgctgccaaggacccagccaatggcagacaattcagcagtcaggtgtcgattctcagtgccatggagttaatttggaacctgtgcgaaatcctttttatcgaggtagcccctgctggcccattacttcttcaccttctagactgggtccgcctgcatgtgtgtgaagtcgattccctaagcgcggatgtactggggagcgagaaccccagcaagcacgacagtttctggaacttggtgaccatactggtactccagggcaggctggatgaggccagacagatgctttctaaagaggcagatgcaagtcctgcttctgcgggaatttgtcggatcatgggagatctgatgaggaccatgcctatactgtcgcctggtaacacacagaccctcaccgagcttgagctgaaatggcaacattggcatgaagaatgcgagcggtatctgcaggactccacttttgctacttcaccccacctggagtccctactcaaaatcatgcttggcgacgaggcagccctcctggagcaaaaggagctactgagtaactggtaccattttctggttaccagattgctatactctaatccgaccgtgaaacccattgatctgcactactacgcccaatcaagcttagatctgttcctaggcggagaatccagtccagagccactggataatattttactcgctgcgttcgagtttgacatacaccaagtcatcaaagagtgcagtatcgctctgtccaactggtggtttgtggctcacctgactgacctgcttgatcactgtaaactcctccaatcgcacaatctgtactttggatctaatatgagggagttcctgctgctggagtacgcttctggcttgttcgcacatccgagcttatggcaactaggagtggactacttcgattattgcccagagcttggcagggtctcacttgaactacacattgagaggatccccctcaacactgagcagaaggccttgaaggtgcttcggatttgcgagcagcggcaaatgaccgaacaagtgagatcaatctgtaagatcctggcaatgaaagcggtgcgcaataataggctgggttctgctctgtcttggtctatccgggctaaagacgccgcattcgctacgttggtgtctgaccggtttcttagagactattgtgaaaggggatgtttttctgacttagaccttatcgataatctgggaccagccatgatgctttccgatcgactgacttttttagggaagtatagggaatttcatcgcatgtacggtgagaaaagattcgccgacgctgcgtcactcctactctccctgatgactagtaggatcgcacccaggtctttttggatgacactgctgactgacgcactaccccttctggagcaaaagcaggtcatcttctctgctgagcagacttatgaactcatgcgatgtctggaagatcttacctcgaggagacccgtacacggtgaatccgacactgagcagcttcaggatgatgatatcgaaactactaaagtggagatgttacgcctgtccctcgctagaaacctcgccagagctatcataagagaggggagcctggaaggcagctag

SEQ ID NO: 217184 - DNA, 1971 bp, Artificial Sequence
  derived and/or modified sequence
atggaggagctggacggcgagcccaccgtgaccctgatccccggcgtgaacagcaagaagaaccagatgtacttcgactggggccccggcgagatgctggtgtgcgagaccagcttcaacaagaaggagaagagcgagatggtgcccagctgccccttcatctacatcatcagaaaggacgtggacgtgtacagccagatcctgagaaagctgttcaacgagagccacggcatcttcctgggcctgcagagaatcgacgaggagctgaccggcaagagcagaaagagccagctggtgagagtgagcaagaactacagaagcgtgatcagagcctgcatggaggagatgcaccaggtggccatcgccgccaaggaccccgccaacggcagacagttcagcagccaggtgagcatcctgagcgccatggagctgatctggaacctgtgcgagatcctgttcatcgaggtggcccccgccggccccctgctgctgcacctgctggactgggtgagactgcacgtgtgcgaggtggacagcctgagcgccgacgtgctgggcagcgagaaccccagcaagcacgacagcttctggaacctggtgaccatcctggtgctgcagggcagactggacgaggccagacagatgctgagcaaggaggccgacgccagccccgccagcgccggcatctgcagaatcatgggcgacctgatgagaaccatgcccatcctgagccccggcaacacccagaccctgaccgagctggagctgaagtggcagcactggcacgaggagtgcgagagatacctgcaggacagcaccttcgccaccagcccccacctggagagcctgctgaagatcatgctgggcgacgaggccgccctgctggagcagaaggagctgctgagcaactggtaccacttcctggtgaccagactgctgtacagcaaccccaccgtgaagcccatcgacctgcactactacgcccagagcagcctggacctgttcctgggcggcgagagcagccccgagcccctggacaacatcctgctggccgccttcgagttcgacatccaccaggtgatcaaggagtgcagcatcgccctgagcaactggtggttcgtggcccacctgaccgacctgctggaccactgcaagctgctgcagagccacaacctgtacttcggcagcaacatgagagagttcctgctgctggagtacgccagcggcctgttcgcccaccccagcctgtggcagctgggcgtggactacttcgactactgccccgagctgggcagagtgagcctggagctgcacatcgagagaatccccctgaacaccgagcagaaggccctgaaggtgctgagaatctgcgagcagagacagatgaccgagcaggtgagaagcatctgcaagatcctggccatgaaggccgtgagaaacaacagactgggcagcgccctgagctggagcatcagagccaaggacgccgccttcgccaccctggtgagcgacagattcctgagagactactgcgagagaggctgcttcagcgacctggacctgatcgacaacctgggccccgccatgatgctgagcgacagactgaccttcctgggcaagtacagagagttccacagaatgtacggcgagaagagattcgccgacgccgccagcctgctgctgagcctgatgaccagcagaatcgcccccagaagcttctggatgaccctgctgaccgacgccctgcccctgctggagcagaagcaggtgatcttcagcgccgagcagacctacgagctgatgagatgcctggaggacctgaccagcagaagacccgtgcacggcgagagcgacaccgagcagctgcaggacgacgacatcgagaccaccaaggtggagatgctgagactgagcctggccagaaacctggccagagccatcatcagagagggcagcctggagggcagctag

SEQ ID NO: 217185 - protein, 500 aa, Artificial Sequence
  derived and/or modified sequence
MEAARPPPTAGKFVVVGGGIAGVTCAEQLATHFPSEDILLVTASPVIKAVTNFKQISKILEEFDVEEQSSTMLGKRFPNIKVIESGVKQLKSEEHCIVTEDGNQHVYKKLCLCAGAKPKLICEGNPYVLGIRDTDSAQEFQKQLTKAKRIMIIGNGGIALELVYEIEGCEVIWAIKDKAIGNTFFDAGAAEFLTSKLIAEKSEAKIAHKRTRYTTEGRKKEARSKSKADNVGSALGPDWHEGLNLKGTKEFSHKIHLETMCEVKKIYLQDEFRILKKKSFTFPRDHKSVTADTEMWPVYVELTNEKIYGCDFIVSATGVTPNVEPFLHGNSFDLGEDGGLKVDDHMHTSLPDIYAAGDICTTSWQLSPVWQQMRLWTQARQMGWYAAKCMAAASSGDSIDMDFSFELFAHVTKFFNYKVVLLGKYNAQGLGSDHELMLRCTKGREYIKVVMQNGRMMGAVLIGETDLEETFENLILNQMNLSSYGEDLLDPNIDIEDYFD

SEQ ID NO: 217186 - protein, 139 aa, Artificial Sequence
  derived and/or modified sequence
MEAARPPPTAGKFVVVGGGIAGVTCAEQLATHFPSEDILLVTASPVIKAVTNFKQISKILEEFDVEEQSSTMLGKRFPNIKVIESGVKQLKSEEHCIVTEDGNQHVYKKLCLCAGAKPKLICEGNPYVLGIRDTDSAQV

SEQ ID NO: 217187 - DNA, 1503 bp, Artificial Sequence
  derived and/or modified sequence
atggaggccgccagacccccccccaccgccggcaagttcgtggtggtgggcggcggcatcgccggcgtgacctgcgccgagcagctggccacccacttccccagcgaggacatcctgctggtgaccgccagccccgtgatcaaggccgtgaccaacttcaagcagatcagcaagatcctggaggagttcgacgtggaggagcagagcagcaccatgctgggcaagagattccccaacatcaaggtgatcgagagcggcgtgaagcagctgaagagcgaggagcactgcatcgtgaccgaggacggcaaccagcacgtgtacaagaagctgtgcctgtgcgccggcgccaagcccaagctgatctgcgagggcaacccctacgtgctgggcatcagagacaccgacagcgcccaggagttccagaagcagctgaccaaggccaagagaatcatgatcatcggcaacggcggcatcgccctggagctggtgtacgagatcgagggctgcgaggtgatctgggccatcaaggacaaggccatcggcaacaccttcttcgacgccggcgccgccgagttcctgaccagcaagctgatcgccgagaagagcgaggccaagatcgcccacaagagaaccagatacaccaccgagggcagaaagaaggaggccagaagcaagagcaaggccgacaacgtgggcagcgccctgggccccgactggcacgagggcctgaacctgaagggcaccaaggagttcagccacaagatccacctggagaccatgtgcgaggtgaagaagatctacctgcaggacgagttcagaatcctgaagaagaagagcttcaccttccccagagaccacaagagcgtgaccgccgacaccgagatgtggcccgtgtacgtggagctgaccaacgagaagatctacggctgcgacttcatcgtgagcgccaccggcgtgacccccaacgtggagcccttcctgcacggcaacagcttcgacctgggcgaggacggcggcctgaaggtggacgaccacatgcacaccagcctgcccgacatctacgccgccggcgacatctgcaccaccagctggcagctgagccccgtgtggcagcagatgagactgtggacccaggccagacagatgggctggtacgccgccaagtgcatggccgccgccagcagcggcgacagcatcgacatggacttcagcttcgagctgttcgcccacgtgaccaagttcttcaactacaaggtggtgctgctgggcaagtacaacgcccagggcctgggcagcgaccacgagctgatgctgagatgcaccaagggcagagagtacatcaaggtggtgatgcagaacggcagaatgatgggcgccgtgctgatcggcgagaccgacctggaggagaccttcgagaacctgatcctgaaccagatgaacctgagcagctacggcgaggacctgctggaccccaacatcgacatcgaggactacttcgactag

SEQ ID NO: 217188 - DNA, 1503 bp, Artificial Sequence
  derived and/or modified sequence
atggaagctgcgcggccaccgccaactgctggtaaattcgtggtggtggggggaggcattgctggcgtgacctgtgccgagcagctggccacccattttccttccgaagacatcctgctagtgacggcatcccccgtgatcaaggcagtcactaacttcaaacaaatttctaaaatcttggaggagtttgacgtggaggagcaatctagcactatgctgggtaagaggttccccaacatcaaggtgatcgagtctggagtcaaacagctcaagtcagaggaacactgtatagtgaccgaggacggaaatcagcacgtctacaagaagctatgcctctgcgccggcgccaagcccaagttgatctgcgaaggcaacccatatgtcctgggtatccgggacactgacagtgcccaagagttccagaaacagctgaccaaggcgaagaggataatgattataggcaatggaggcatagctcttgaactcgtgtatgagatcgaaggatgtgaggttatttgggcgattaaggataaagctatcggcaatacttttttcgacgccggggcggccgaatttctgacgagtaagttgatcgccgagaaatctgaagccaagattgcacataagcgaacaaggtacactacagaaggcaggaaaaaagaggctcggtccaagagtaaggccgataacgtaggcagtgccctcggccctgactggcacgaagggctgaacctaaaaggtaccaaggaattcagccacaagatacacctcgaaacaatgtgcgaggtgaagaagatttatttgcaggacgagttcaggattctgaagaagaaaagcttcaccttccctcgagaccacaagtctgtgacggcggacacagagatgtggcccgtttacgttgaactgactaacgaaaagatttatggttgcgacttcatcgtgagcgccacaggagtcactcccaatgtagagcctttcctccatgggaatagcttcgatcttggcgaagatggagggctgaaggtggatgaccacatgcatactagcctgcctgacatttacgccgcaggagacatctgtactacaagctggcagttgtcccctgtttggcaacagatgcgactgtggacacaggctcgtcagatgggttggtatgccgcaaaatgcatggccgcagcctcttctggagatagcatagatatggacttttcctttgaattgtttgcccacgtaacgaaattttttaattataaggtggtgctgctcgggaaatacaacgctcaggggctgggatctgaccacgaattgatgctgcggtgtacaaagggcagggagtacatcaaggtagtcatgcagaacggaagaatgatgggcgccgtgttaataggtgaaactgatctggaggagacattcgagaacctgatcctgaatcagatgaacctttccagttacggcgaggacctgctggatccaaacatcgacatcgaggattactttgattag

SEQ ID NO: 217189 - DNA, 1503 bp, Artificial Sequence
  derived and/or modified sequence
atggaggccgcccggcccccacccacagctgggaagtttgtggtggtgggcggcggcattgctggggtgacctgtgccgagcagctggccacccacttccccagcgaggacatcctgctggtgacagccagccctgtgatcaaggctgtgaccaacttcaagcagatcagcaagatcctggaggagtttgatgtggaggagcagagcagcaccatgctgggcaagcgcttccccaacatcaaggtgattgaaagtggagtgaagcagctgaagtctgaggagcactgcatcgtgacagaagatggcaaccagcacgtgtacaagaagctgtgcctgtgtgccggggccaagcccaagctgatctgtgagggcaacccctacgtgctgggcatccgggacacagacagcgcccaggagttccagaagcagctgaccaaggccaagaggatcatgatcattggaaatggaggcatcgccctggagctggtgtatgaaattgagggctgtgaggtgatctgggccatcaaggacaaggccatcggcaacaccttctttgatgctggagctgctgagttcctgaccagcaagctgattgctgagaagtctgaggccaagatcgcccacaagaggacccgctacaccacagagggcaggaagaaggaggcccggagcaagagcaaggctgacaacgtgggcagcgccctgggccctgactggcatgagggcctgaacctgaagggcaccaaggagttcagccacaagatccacctggagaccatgtgtgaggtgaagaagatctacctgcaggatgagttccgcatcctgaagaagaagagcttcaccttcccccgggaccacaagtctgtgacagctgacacagagatgtggcctgtgtatgtggagctgaccaatgagaagatctacggctgtgacttcatcgtgtctgccactggagtgacccccaacgtggagcccttcctgcacggcaacagctttgacctgggggaggatggcggcctgaaggtggatgaccacatgcacaccagcctgcctgacatctatgctgctggggacatctgcaccacctcctggcagctgagccctgtgtggcagcagatgaggctgtggacccaggcccggcagatgggctggtacgccgccaagtgcatggccgccgccagcagcggggacagcattgacatggacttctcctttgagctgtttgcccacgtgaccaagttcttcaactacaaggtggtgctgctgggcaagtacaatgcccagggcctgggcagtgaccacgagctgatgctgcgctgcaccaagggccgggagtacatcaaggtggtgatgcagaatggaaggatgatgggcgctgtgctgattggagaaacagacctggaggagacctttgagaacctgatcctgaaccagatgaacctgagcagctatggagaggacctgctggaccccaacattgatattgaggactactttgattag

SEQ ID NO: 217190 - DNA, 1503 bp, Artificial Sequence
  derived and/or modified sequence
atggaggccgcccggcccccccccaccgccggcaagttcgtggtggtaggcgggggcatcgcgggagtcacctgtgcagaacaactggcgacccacttcccttctgaggacatcctgctggtgaccgcctcgccagttatcaaagcagtgacaaacttcaagcagattagcaaaattctggaagaattcgacgttgaggagcagtcatccactatgctaggcaagcggttcccgaacatcaaagtcatcgagtccggcgtaaagcagctaaagagcgaagagcattgcatcgtgactgaagacggaaatcaacacgtttataagaaactatgtctgtgcgccggggcaaagccaaagttgatctgtgaggggaatccatacgtgctcggaattcgtgacaccgacagcgcacaggaatttcaaaaacagctgacgaaagccaagcgcattatgatcatcggtaacgggggaatcgccctggaactcgtttatgagatcgaggggtgtgaggtgatttgggccatcaaggataaggcaattgggaatactttctttgacgcaggggccgccgagttcctgacttcaaaacttattgccgaaaagagtgaagctaagatcgcgcataagcggacacgttacactacggagggccgaaagaaggaggcgaggtcgaagagcaaggccgataacgtcggtagcgctttgggtccagattggcatgaagggctgaacctcaaaggtacgaaagaattctcacataagattcatctggagacaatgtgcgaggtaaaaaaaatatacctgcaagacgagttcaggatcttaaaaaagaaaagtttcactttccctcgcgatcataagtctgttacagccgatacggaaatgtggcccgtctatgtcgaacttactaatgagaagatctacggctgcgacttcatcgtcagtgccacaggagtgacccctaatgttgagccattcctacacggtaattctttcgatctcggagaggacggtggtctgaaggtggatgaccatatgcacacctcattgccggacatctacgctgctggagacatttgtacaactagctggcagctgagccccgtgtggcaacagatgcggctttggactcaggcccgacagatgggatggtacgcagctaagtgcatggctgccgcctcctccggcgattccattgatatggacttctcttttgaacttttcgcacacgtcactaagttttttaactacaaagtggtgctcttggggaaatataatgcccaaggactcgggtccgaccacgaattaatgctgaggtgtactaaaggcagggagtatattaaagttgtgatgcagaatggtcggatgatgggcgctgtcctgattggcgagaccgatctagaagagactttcgagaaccttattcttaaccagatgaatctgtcttcttacggcgaggatctccttgacccaaatatcgatattgaggattattttgattag

SEQ ID NO: 217191 - DNA, 1503 bp, Artificial Sequence
  derived and/or modified sequence
atggaagccgctcgtcccccaccgaccgcgggtaagtttgtagtcgttggaggaggcattgctggtgtgacctgcgctgagcagctagcgacccacttccccagcgaggacatactgctcgtcaccgccagccctgtgatcaaagccgtaaccaacttcaagcaaattagtaagattctggaggaatttgacgtggaggagcagtcatctaccatgctaggaaaaagatttcctaatatcaaggtgatagagtctggggtcaagcagctcaagtctgaagagcattgtattgtgaccgaagatggcaatcagcacgtgtataagaagctgtgcctttgcgcaggggcaaaacctaagctgatttgcgaaggaaacccatacgtgcttgggatcagggacacagactccgcacaagagttccagaagcagttaacgaaagccaaaaggatcatgatcattggcaatgggggaatagcacttgagttggtgtatgagatcgagggctgtgaggtgatttgggccataaaagacaaagccatcggcaacacctttttcgatgctggcgcagccgagttcctcacttcaaagctcattgcagaaaagtcggaggcaaagattgctcataaaagaacccgctacacaaccgaagggaggaaaaaggaggcaagaagcaagtctaaggccgacaatgtcggaagcgcactcggacctgattggcatgagggcttaaacctcaaggggacaaaggaattctcccacaagatccatctggagaccatgtgtgaggtaaagaagatatacctacaagacgaattcagaatactaaagaaaaaatcgtttacctttccgagggatcacaaatctgttaccgcagacaccgagatgtggcctgtgtacgtggaactgaccaatgagaagatttatgggtgtgactttatcgtatcagccacaggagttacacccaacgtcgagcctttccttcacggcaactctttcgacctgggcgaggacggcggactcaaagtcgatgatcacatgcacacgtccctccccgacatctacgcggcaggtgatatttgtacaacatcctggcagctaagtcccgtctggcagcaaatgcgactgtggactcaggctaggcaaatggggtggtatgccgcaaagtgtatggccgctgcatccagcggggattcaatcgacatggatttttcatttgaactcttcgctcatgtcaccaaattctttaactacaaggtcgtgcttttaggaaagtacaatgctcaggggctcggctcagaccatgagctgatgttgagatgtaccaagggcagggaatacatcaaagtggtaatgcagaatggaaggatgatgggcgcagtgcttattggagaaacggaccttgaggaaacatttgagaatctgattctcaatcagatgaacctgagctcctatggagaggatctactcgatcccaacattgacatcgaggattactttgactag

SEQ ID NO: 217192 - DNA, 3169 bp, Artificial Sequence
  derived and/or modified sequence
cagagtcccgttgctccgccgcgatattcagtaaaccactgggagtccggcagcatggaggcagcgcgccctcccccgacggcagggaagttcgtggtggtcggcggcggcatcgcgggcgtcacttgtgcggagcagttggctactcactttccatcggaagatattctcttggtaacagcttctcctgttattaaagcagttacaaatttcaagcagatttctaaaatattggaagaattcgatgttgaagaacaatcaagtaccatgttaggaaaacgctttcccaacattaaggttatagaatctggcgtaaagcaactgaagagtgaagaacactgcattgtaacagaagatggcaatcagcacgtatataagaaactctgtctgtgtgctggagctaaaccaaagttgatatgtgaaggaaatccttatgtattaggaatccgtgatacagacagtgctcaggaatttcagaaacagcttactaaagctaaaagaataatgatcatagggaacggtggtattgcacttgagttagtgtatgaaattgaaggctgtgaagtgatttgggccattaaagataaagctatagggaatactttcttcgatgcaggagcagctgaattcttgacttcaaagctcattgctgaaaaatcagaggctaaaattgcacataaaagaaccagatatacaactgaaggaaggaaaaaggaagctagaagcaaatctaaagcagataatgtaggaagtgcattgggaccagattggcatgaaggcttgaatcttaaaggaacaaaagagttttctcataagattcaccttgaaactatgtgtgaagtaaagaaaatctaccttcaggatgagtttagaattttgaagaaaaagtccttcacttttccaagagaccataagtcagttacagctgatacagagatgtggcctgtctatgtggaattgaccaatgaaaagatatatggctgcgatttcattgtcagtgctacaggagttacaccaaatgtagaaccttttctccatggtaacagttttgatctaggagaagatggtggcctgaaagtggatgatcatatgcacacatcccttcctgatatctatgctgccggtgacatctgtactacatcctggcagctgagcccagtctggcagcagatgaggctgtggacccaggctagacagatgggatggtatgcagcaaagtgcatggctgcagcgagttcaggagactctattgacatggatttcagctttgaactgtttgctcatgtgacaaaattttttaactataaggttgtactgctgggaaaatacaatgcacagggcttaggttcagatcatgaattaatgctgagatgtaccaaaggacgagaatacatcaaagtcgtcatgcaaaatggacgaatgatgggagctgtcttaattggtgaaaccgatttagaagaaacatttgaaaacctaatcttaaaccaaatgaatctttcatcatatggagaagatctgctagatccaaatattgatatagaagattattttgactaaaaatggaatttcttcaggaatcatataaagttccaaatgacaccagaaaaatcacaagtcaataaaatgaatgactgtattgagttaatgatgaccacactgaaaattacagaagtgataatgatattagtggaaaaatataaaaacataaattctaagtttgaaatcagttcaaagtttatttatagatatatctttccaatacaacactgaccgcttagataaaaatcttaagttatttatttctgtgttttaaacataaatatgtttacttgtgatttagctttggagcaaatttaggtaagttatctacttagccaaatgtactctagtagactagaaccattctttgtgaaatgtcaaaatatggctatggtttcaggaactttaaaatcggttgtattttactttaaatagagatgtagcaatatctcgtttgctaatatttatattgatgacttactccttttttgttgaattgtacttctggttttataacctgaaatcatctacaagcttgtccaactctagcccacgggtctaatgcagcccagaacagctttgaatgcagcccaacacaaatctgtaaactttcttaaaacatgagatttttcttgcaatttttttttttttaagctcatcagctatcgtcagtgttagcatattttatgtgcggcccaagacaattcttcttccaatgtggctcagggaagccaaaagattggacatccctgatctacatatttaacttaaagtatcactcagtgaacctctgtcagtataatattgctttcaaaaagatggttatgtcaaaagaaaaaatatagctaagtatataaaggcataaaaaacttaagacaattacatgaacttattctcaaatattttacattttttgtaaactttcttaaaacatgagatttttcttgcaattttttttttaagctcatcagctatcatcagtgttagcatattttatgtgcggcccaagacaattcttcttccaatgtggctcagggaagccaaaagattggacatccttgatctacatatttaacttaaagtatcactcagtgagcctctgtcagtataatattgctttcaaaaagatagttatgtcaaaagaaaaaatatagctaagtatataaaggcataaaaaacttaagacgattgtatgaacttattctcaaatattttacatttaaagggttttacataaaaatttttcccttgttttatactggaaaattatataattcatgatctctaattttcaaacattctcaaaagtttagatcttcagagataagctctgaaaatatagatccatacatataaaatatctatgaaattcttttaaaaactattgtctaactacaaaaataatggcatatacatgcataaaccatctttaattagaaaatttagtaacattcatatcaggcatcatcgatttttcttttcttagctcctgtattcttagaaccagattgctgaagcatgtttgcagccttcttctggaagttgcctgaatttttttcctccatctttttatcaccttgttcagaatgacaagtttgagacgattcagcctacaaaaaaaaaaaaaaaa

SEQ ID NO: 217193 - DNA, 1042 bp, Artificial Sequence
  derived and/or modified sequence
gtcggattatctggtaaggcaccggaagtgaccgcctcgcggctgcttcctctcctggagtccagagtcccgttgctccgccgcgatattcagtaaaccactgggagtccggcagcatggaggcagcgcgccctcccccgacggcagggaagttcgtggtggtcggcggcggcatcgcgggcgtcacttgtgcggagcagttggctactcactttccatcggaagatattctcttggtaacagcttctcctgttattaaagcagttacaaatttcaagcagatttctaaaatattggaagaattcgatgttgaagaacaatcaagtaccatgttaggaaaacgctttcccaacattaaggttatagaatctggcgtaaagcaactgaagagtgaagaacactgcattgtaacagaagatggcaatcagcacgtatataagaaactctgtctgtgtgctggagctaaaccaaagttgatatgtgaaggaaatccttatgtattaggaatccgtgatacagacagtgctcaggtatgaaattgaaggctgtgaagtgatttgggccattaaagataaagctatagggaatactttcttcgatgcaggagcagctgaattcttgacttcaaagctcattgctgaaaaatcagaggctaaaattgcacataaaagaaccagatatacaactgaaggaaggaaaaaggaagctagaagcaaatctaaagcagataatgtaggaagtgcattgggaccagattggcatgaaggcttgaatcttaaaggaacaaaagagttttctcataagattcaccttgaaactatgtgtgaagtaaagaaaatctaccttcaggatgagtttagaattttgaagaaaaagtccttcacttttccaagagaccataagtcagttacagctgatacagagatgtggcctgtctatgtggaattgaccaatgaaaagatatatggctgcgatttcattgtcagtgctacaggagttacaccaaatgtagaaccttttctccatggtaacagtgtaaggt

SEQ ID NO: 217194 - protein, 607 aa, Artificial Sequence
  derived and/or modified sequence
MAANVFPFRDARAAPDPVLEAGPVAHGPLPVPLVLDNGSFQVRAGWACPGQDPGPEPRLQFRAVCARGRGGARGASGPQVGNALGSLEPLRWMLRSPFDRNVPVNLELQELLLDYSFQHLGVSSQGCVDHPIVLTEAVCNPLYSRQMMSELLFECYGIPKVAYGIDSLFSFYHNKPKNSMCSGLIISSGYQCTHVLPILEGRLDAKNCKRINLGGSQAAGYLQRLLQLKYPGHLAAITLSRMEEILHEHSYIAEDYVEELHKWRCPDYYENNVHKMQLPFSSKLLGSTLTSEEKQERRQQQLRRLQELNARRREEKLQLDQERLDRLLYVQELLEDGQMDQFHKALIELNMDSPEELQSYIQKLSIAVEQAKQKILQAEVNLEVDVVDSKPETPDLEQLEPSLEDVESMNDFDPLFSEETPGVEKPVTTVQPVFNLAAYHQLFVGTERIRAPEIIFQPSLIGEEQAGIAETLQYILDRYPKDIQEMLVQNVFLTGGNTMYPGMKARMEKELLEMRPFRSSFQVQLASNPVLDAWYGARDWALNHLDDNEVWITRKEYEEKGGEYLKEHCASNIYVPIRLPKQASRSSDAQASSKGSAAGGGGAGEQA

SEQ ID NO: 217195 - DNA, 1824 bp, Artificial Sequence
  derived and/or modified sequence
atggccgccaacgtgttcccctttcgcgacgctcgggccgcccccgacccagtcctggaggctggccccgtggcccacggtcccctgccagtgcccttggtgctggacaatggaagctttcaggttagggcgggctgggcttgcccaggacaggatcccggcccagagcccagacttcagttcagagccgtgtgcgcccgaggcagggggggtgcccggggtgccagcggaccacaggtcgggaacgccctgggatccctagagccgcttaggtggatgctgagatctcccttcgaccgaaatgttcctgtcaatttagaattgcaggagttgctgctagattactcattccagcatctgggggtctcaagccagggatgtgtggaccatccaatagtgctcacagaagccgtgtgtaaccctttgtactcacgccaaatgatgtcagaacttttgttcgaatgctatgggattccaaaggtcgcttatgggattgactcattgttctcgttctatcataataaacctaagaatagtatgtgttccggtttgataatttccagtggctaccagtgtactcacgttcttcccattctcgagggccgattagatgctaagaactgtaaacgaatcaatctgggcgggtcccaagcggccggatacctccagagattgctgcaactgaaatatccgggccacctcgccgcgatcaccctgtcccggatggaggagatactccacgagcactcatacattgccgaggattatgttgaagaactccataagtggaggtgtccagactactatgaaaataacgtgcataagatgcagctgccattctcatctaaactgctcggcagcaccctcacctccgaggaaaagcaggaacggagacagcagcagcttaggcggctgcaggagctgaatgcgagaagacgagaggagaagcttcaattggaccaggaacgcctcgatcggcttctttacgtgcaagaactgctggaggacggtcagatggatcagttccacaaagccttgattgaattgaatatggattctccagaggagctgcagagttacatccagaagctctcaattgcagtggagcaggcgaagcagaaaatcctccaggctgaagtgaacctggaagtcgatgtggtggactctaagccagagacccccgatctggaacaactcgaacccagtctggaggacgtggagtctatgaacgatttcgatcccctgttcagcgaggaaacccccggcgtagagaaacccgttaccacagtgcaaccagtgttcaaccttgctgcctaccatcaactgtttgtaggcaccgaaagaatccgcgcgccagagatcatctttcagccaagtctcattggcgaagaacaggctggcattgctgagaccctccagtacatcttagataggtatcccaaggacattcaggagatgcttgtccagaacgtgtttctgactggaggaaatacaatgtacccaggaatgaaggcccggatggagaaggagctgctggagatgcgaccatttaggagctccttccaagtgcagctggctagtaaccctgtgctggacgcttggtacggtgctcgagactgggcgctcaatcacctggatgataacgaagtgtggattactcgaaaggagtacgaggagaaagggggcgagtacttgaaggaacactgcgcctcaaacatatatgtacctataaggctgcctaagcaggcctcccgatcatctgatgcacaggcctcatctaagggaagtgctgctggaggggggggagcaggcgagcaagcatag

SEQ ID NO: 217196 - DNA, 1824 bp, Artificial Sequence
  derived and/or modified sequence
atggccgccaacgtgttccccttcagagatgcccgggccgccccagaccctgtgctggaggccggccctgtggcccacggccccctgcctgtgcccctggtgctggacaatggcagcttccaggtgcgggccggctgggcctgccccggccaggaccccggccctgagccccggctgcagttccgggctgtgtgtgcccggggccggggcggggcccggggggccagcggcccccaggtgggcaatgccctgggcagcctggagcccctgcgctggatgctgcggagcccctttgacagaaatgtgcctgtgaacctggagctgcaggagctgctgctggactacagcttccagcacctgggcgtgagcagccagggctgtgtggaccaccccatcgtgctgacagaagctgtgtgcaaccccctgtacagccggcagatgatgtctgagctgctgtttgagtgctacggcatccccaaggtggcctatggaattgacagcctcttctccttctaccacaacaagcccaagaacagcatgtgcagcggcctcatcatcagcagcggctaccagtgcacccacgtgctgcccatcctggagggccgcctggatgccaagaactgcaagaggatcaacctgggcggcagccaggccgccggctacctgcagaggctgctgcagctgaagtacccaggccacctggccgccatcaccctgagcaggatggaggagatcctgcacgagcacagctacatcgccgaggactatgtggaggagctgcacaagtggcgctgcccagactactatgagaacaacgtgcacaagatgcagctgcccttcagcagcaagctgctgggcagcaccctgaccagcgaggagaagcaggagcggcggcagcagcagctgcggcggctgcaggagctgaatgcccggcggcgggaggagaagctgcagctggaccaggagcggctggaccggctgctgtatgtgcaggagctgctggaggatggccagatggaccagttccacaaggccctgattgagctgaacatggacagccctgaggagctgcagagctacatccagaagctgagcattgctgtggagcaggccaagcagaagatcctgcaggccgaggtgaacctggaggtggatgtggtggacagcaagccagagaccccagacctggagcagctggagcccagcctggaggatgtggagagcatgaatgactttgaccccctcttcagcgaggagaccccaggagtggagaagcctgtgaccaccgtgcagcccgtcttcaacctggccgcctaccaccagctgtttgtgggcacagagcgcatccgggcccctgagatcatcttccagcccagcctgattggagaggagcaggccggcattgctgagaccctgcagtacatcctggaccgctaccccaaggacatccaggagatgctggtgcagaatgtgttcctgaccggcggcaacaccatgtacccaggcatgaaggccaggatggagaaggagctgctggagatgaggcccttccgcagcagcttccaggtgcagctggccagcaaccctgtgctggatgcctggtatggagcccgggactgggccctgaaccacctggatgacaatgaggtgtggatcaccaggaaggagtatgaggagaagggcggggagtacctgaaggagcactgtgccagcaacatctacgtgcccatccggctgcccaagcaggccagccgcagcagtgatgcccaggccagcagcaagggcagcgctgctgggggcggcggggccggggagcaggcctag

SEQ ID NO: 217197 - DNA, 1824 bp, Artificial Sequence
  derived and/or modified sequence
atggccgccaacgtgttccccttccgggacgcccgggccgcccccgacccagtactggaagccggacccgtggcgcacggcccgctgcccgtgcccctcgttttagacaacggaagctttcaagtccgggctggatgggcttgccccggtcaggatcccggacccgagccaagactgcagtttcgcgccgtatgtgctcgcggccgaggtggcgcgcgcggcgccagcgggccccaggtggggaatgccctggggtcactggagcccctgcgctggatgttgcgctcgccattcgataggaatgttccagtaaaccttgagcttcaggaactgctcctcgattactccttccagcatcttggggtgtcttcccaaggttgcgtggatcaccctattgttctgacggaagctgtctgcaatcctctatacagtcgacagatgatgagtgagttgctgttcgagtgttacggaatcccaaaagtggcctatggcattgactccctatttagcttctaccataataagccaaagaactccatgtgtagcggcctcatcattagctcgggctaccagtgcactcatgtcctccccatcctggaaggacggctggatgccaagaactgcaaacggattaatttgggcgggtcccaggcagcaggatatctgcaaagactgttacagctgaaataccccggccacctggccgccattacgctgagcagaatggaagaaattcttcacgaacacagctatattgccgaagactatgtggaagaacttcacaagtggagatgtcccgattactacgagaataatgtgcacaaaatgcagttaccattctctagcaaactgctgggtagcacgctgacttccgaggaaaagcaggagcggcggcaacagcaactgagacgtctccaggagctcaatgcaaggcgccgtgaagagaaacttcagttggaccaagagcgcctcgatagattgctctatgttcaggaacttctggaggacggtcaaatggaccagtttcacaaagctcttatcgaactgaacatggatagccccgaagaacttcagtcatatatccagaagctctccatcgctgttgagcaggccaaacaaaaaatattgcaggccgaggtgaatttagaggtcgacgttgtggactcaaaacccgagactcctgacctcgaacaactagaacccagtctggaagatgtagaatccatgaacgactttgacccccttttcagcgaagaaacgccgggggtggaaaaaccagtgacaaccgttcaacctgtctttaatctggcggcttaccatcagctgttcgtgggaactgagcggattagagcccccgaaataattttccaacccagcttaatcggggaggagcaagctggcatcgcagaaacactccaatacatactggatcgctacccaaaggacattcaagagatgcttgtgcagaacgtcttcctgacaggcggcaacacgatgtaccccggcatgaaggcgcgtatggagaaggagttgttggaaatgagaccgttcaggagctcctttcaggtccagctggcctccaaccctgttctggatgcttggtacggcgcccgtgactgggcattgaatcacctcgacgacaatgaggtgtggataacaagaaaggagtacgaggaaaagggcggggagtatctaaaggagcactgtgcttcaaatatttacgtaccgatccggttgcccaagcaggcttcccgaagcagcgacgcccaagccagttctaaaggatctgctgctgggggagggggggctggagaacaggcgtag

SEQ ID NO: 217198 - DNA, 2236 bp, Artificial Sequence
  derived and/or modified sequence
actgcgccgaggggcggggctggacgcgcgctccaagatggcggcgaacgtgttcccgttccgcgacgcccgtgccgcaccggacccagtgctggaggccggcccggtggcacacgggccactgccggtaccgctggtgctggacaacgggtcgttccaagtccgcgctggctgggcgtgtcccgggcaggacccaggtcccgagccgcgcctgcagttccgcgcggtgtgcgcccgcggtcgtggcggggcacggggcgcgtcgggcccgcaggtggggaacgctctgggcagcctggagccactgcgctggatgctgcgctcgcccttcgaccgcaacgtgccggtcaacctggagcttcaggagttgctgctggactacagcttccagcacctgggtgtctcctcacagggctgtgttgatcatcccatagttttgacagaagctgtgtgcaacccactgtattcacggcaaatgatgtctgagcttctttttgagtgctacgggattcccaaggttgcctatggaatagacagcctcttcagcttctaccacaataagccaaagaactcgatgtgcagtgggctaatcatttcatctggataccagtgtacgcatgttttacccatcttagaagggagattagatgctaaaaactgcaagcgcatcaatcttggaggaagccaagcagctggttacctccagcgtctcctccagctgaagtaccctgggcacctggcagccatcaccctcagccgcatggaggagattctgcatgagcacagctacatcgctgaggattatgtggaagaattacacaaatggcggtgtcctgattattatgagaataatgtccacaagatgcagctcccattttccagcaagctcctgggcagcactctgacctctgaggagaaacaagaaaggcggcagcagcaattgcggcggctgcaggagctcaatgcccggcggcgggaggagaagctgcagctggatcaggagcgtctggaccgactgctatatgtgcaggaacttctagaggatggccagatggatcagtttcacaaagctctgatagagctgaatatggactccccagaagagctgcagtcctacatccagaagctcagtatagcagtggagcaggctaagcagaaaatcctccaagcggaagtcaacctcgaggtggatgtggtagacagcaagccagagacccctgacctggagcagctggagccgtctttggaagatgtggaaagcatgaatgattttgatcccttgttttcagaggaaacacctggagtggagaagccggtcaccactgttcagcccgtgtttaacttggcagcatatcatcagctatttgttgggacagaaagaattcgagctccagagattattttccagccatctctcataggagaagaacaggctgggattgcagagactcttcagtacattctggacaggtacccaaaggacattcaggaaatgctggttcagaacgttttcctcactggcggcaacacgatgtatcctggcatgaaagccagaatggagaaggaactgttggagatgagacccttccggtcttcttttcaggttcaacttgcctcgaaccctgtgctggatgcctggtacggtgctcgtgactgggccttgaaccacctagatgataatgaagtttggatcaccaggaaagagtatgaagaaaagggaggagagtacctcaaggagcactgtgcttccaacatctatgtccccatccgcctgccgaagcaggcctcccgctcctcagatgcccaggcatccagcaagggctccgctgctggtggaggtggtgctggtgagcaggcatagcagaggccctccagagagactgccctgcacgccatgccttgggccacgttggcagtgtgacaggactgtgattgtgctagatgtacctgcccaagtctgctggtcacatttggcagcaaaatggatttctcctggggagaacaaagttaagggacactgagacctgcccttcagaattcggttcacttgggggcttctgtggtagagactaactggccttctgatgtctttgttcaactgtggccagctgtggcatcagcttcctggagcagtaaatgaagacagagtggaggacacaaatgtacaaaatgcacaagactgatttcttaccacattttagtctttcttgttttaaaaaaaattctttaaaattta

SEQ ID NO: 217199 - DNA, 1824 bp, Artificial Sequence
  derived and/or modified sequence
atggccgctaatgtattcccctttcgggacgctagagctgctcccgatcccgtcttggaagccggaccggtagctcatggacccctcccagtgccgctcgttctcgataatgggtcattccaggtacgggctggttgggcctgtccgggtcaagatccaggacctgaacctagattgcagtttcgagccgtgtgtgcacgcggtcggggaggggctcgcggagccagcgggcctcaggtgggtaatgctctcggaagtcttgagcccctaagatggatgctgcgtagtccttttgaccgcaacgtccccgtcaatttggaactccaagagctgctgttggattactcattccaacacctaggggtttccagccagggatgtgtggatcacccgatcgtgctcaccgaagccgtgtgtaaccccctttactctcggcagatgatgtcagagctgctcttcgagtgctatggcatccccaaggttgcctacgggatagattctctcttcagtttctaccacaacaagcccaagaactcgatgtgtagcggcctcataattagctcagggtaccagtgcacccatgttctgcccattctggagggcagactggacgcgaagaactgtaagagaataaacttaggaggttcccaggccgctggctaccttcagcgtttactgcaactgaagtatcccggacacctggccgctataacactttcacgcatggaggagatcttgcatgaacacagttacatcgccgaagactacgtggaggagcttcacaaatggcgatgccctgattactatgaaaacaatgtgcataaaatgcaacttccgttttcatccaagttgttggggagcacactcacatctgaggagaaacaggagcgacgccaacagcagctccggcgactccaggagctaaatgcaagacgccgtgaggagaagttgcagctagatcaggaaagacttgataggctgctctacgttcaggagttgctcgaggacggtcagatggatcagttccataaagccctgattgagttaaatatggacagccctgaggagctccagtcatatatacagaagctgtctatcgccgtggagcaagccaagcagaaaatcttacaggcagaggtgaacctggaggtcgacgtggtcgactccaaaccagagaccccagacctagaacagctggaacccagcctcgaagacgttgaatctatgaatgactttgatcctctgttttcggaggagaccccgggagtggagaaacctgtcaccaccgtgcagcctgttttcaacctggccgcataccaccagttgttcgttgggacggaaaggattagagcccctgagatcatcttccagccctctttgatcggcgaggagcaggccggaatcgccgagacgctccagtacatcctggatcggtacccaaaagacatacaagagatgctcgttcaaaacgtgtttctgacagggggaaacacaatgtaccctgggatgaaggcacggatggagaaagaacttctggaaatgaggccgttcagatcttccttccaggtgcagctcgcctccaaccccgtgttagacgcctggtacggcgcaagagattgggcgttgaaccacctcgacgacaacgaggtgtggatcacacgcaaggagtatgaggagaagggaggcgagtacttgaaggaacattgtgcttccaacatctacgtaccaatcagacttcccaaacaagcgagcaggagtagcgacgcacaggcaagctctaagggtagcgcagccggaggaggtggcgctggcgaacaggcttag

SEQ ID NO: 217200 - DNA, 1824 bp, Artificial Sequence
  derived and/or modified sequence
atggccgccaacgtgttccccttcagagacgccagagccgcccccgaccccgtgctggaggccggccccgtggcccacggccccctgcccgtgcccctggtgctggacaacggcagcttccaggtgagagccggctgggcctgccccggccaggaccccggccccgagcccagactgcagttcagagccgtgtgcgccagaggcagaggcggcgccagaggcgccagcggcccccaggtgggcaacgccctgggcagcctggagcccctgagatggatgctgagaagccccttcgacagaaacgtgcccgtgaacctggagctgcaggagctgctgctggactacagcttccagcacctgggcgtgagcagccagggctgcgtggaccaccccatcgtgctgaccgaggccgtgtgcaaccccctgtacagcagacagatgatgagcgagctgctgttcgagtgctacggcatccccaaggtggcctacggcatcgacagcctgttcagcttctaccacaacaagcccaagaacagcatgtgcagcggcctgatcatcagcagcggctaccagtgcacccacgtgctgcccatcctggagggcagactggacgccaagaactgcaagagaatcaacctgggcggcagccaggccgccggctacctgcagagactgctgcagctgaagtaccccggccacctggccgccatcaccctgagcagaatggaggagatcctgcacgagcacagctacatcgccgaggactacgtggaggagctgcacaagtggagatgccccgactactacgagaacaacgtgcacaagatgcagctgcccttcagcagcaagctgctgggcagcaccctgaccagcgaggagaagcaggagagaagacagcagcagctgagaagactgcaggagctgaacgccagaagaagagaggagaagctgcagctggaccaggagagactggacagactgctgtacgtgcaggagctgctggaggacggccagatggaccagttccacaaggccctgatcgagctgaacatggacagccccgaggagctgcagagctacatccagaagctgagcatcgccgtggagcaggccaagcagaagatcctgcaggccgaggtgaacctggaggtggacgtggtggacagcaagcccgagacccccgacctggagcagctggagcccagcctggaggacgtggagagcatgaacgacttcgaccccctgttcagcgaggagacccccggcgtggagaagcccgtgaccaccgtgcagcccgtgttcaacctggccgcctaccaccagctgttcgtgggcaccgagagaatcagagcccccgagatcatcttccagcccagcctgatcggcgaggagcaggccggcatcgccgagaccctgcagtacatcctggacagataccccaaggacatccaggagatgctggtgcagaacgtgttcctgaccggcggcaacaccatgtaccccggcatgaaggccagaatggagaaggagctgctggagatgagacccttcagaagcagcttccaggtgcagctggccagcaaccccgtgctggacgcctggtacggcgccagagactgggccctgaaccacctggacgacaacgaggtgtggatcaccagaaaggagtacgaggagaagggcggcgagtacctgaaggagcactgcgccagcaacatctacgtgcccatcagactgcccaagcaggccagcagaagcagcgacgcccaggccagcagcaagggcagcgccgccggcggcggcggcgccggcgagcaggcctag

SEQ ID NO: 217201 - protein, 1844 aa, Artificial Sequence
  derived and/or modified sequence
MVGVLAMAAAAAPPPVKDCEIEPCKKRKKDDDTSTCKTITKYLSPLGKTRDRVFAPPKPSNILDYFRKTSPTNEKTQLGKECKIKSPESVPVDSNKDCTTPLEMFSNVEFKKKRKRVNLSHQLNNIKTENEAPIEISSDDSKEDYSLNNDFVESSTSVLRYKKQVEVLAENIQDTKSQPNTMTSLQNSKKVNPKQGTTKNDFKKLRKRKCRDVVDLSESLPLAEELNLLKKDGKDTKQMENTTSHANSRDNVTEAAQLNDSIITVSYEEFLKSHKENKVEEIPDSTMSICVPSETVDEIVKSGYISESENSEISQQVRFKTVTVLAQVHPIPPKKTGKIPRIFLKQKQFEMENSLSDPENEQTVQKRKSNVVIQEEELELAVLEAGSSEAVKPKCTLEERQQFMKAFRQPASDALKNGVKKSSDKQKDLNEKCLYEVGRDDNSKKIMENSGIQMVSKNGNLQLHTDKGSFLKEKNKKLKKKNKKTLDTGAIPGKNREGNTQKKETTFFLKEKQYQNRMSLRQRKTEFFKSSTLFNNESLVYEDIANDDLLKVSSLCNNNKLSRKTSIPVKDIKLTQSKAESEASLLNVSTPKSTRRSGRISSTPTTETIRGIDSDDVQDNSQLKASTQKAANLSEKHSLYTAELITVPFDSESPIRMKFTRISTPKKSKKKSNKRSEKSEATDGGFTSQIRKASNTSKNISKAKQLIEKAKALHISRSKVTEEIAIPLRRSSRHQTLPERKKLSETEDSVIIIDSSPTALKHPEKNQKKLQCLNDVLGKKLNTSTKNVPGKMKVAPLFLVRKAQKAADPVPSFDESSQDTSEKSQDCDVQCKAKRDFLMSGLPDLLKRQIAKKAAALDVYNAVSTSFQRVVHVQQKDDGCCLWHLKPPSCPLLTKFKELNTKVIDLSKCGIALGEFSTLNSKLKSGNSAAVFMRTRKEFTEEVRNLLLEEIRWSNPEFSLKKYFPLLLKKQIEHQVLSSECHSKQELEADVSHKETKRKLVEAENSKSKRKKPNEYSKNLEKTNRKSEELSKRNNSSGIKLDSSKDSGTEDMLWTEKYQPQTASELIGNELAIKKLHSWLKDWKRRAELEERQNLKGKRDEKHEDFSGGIDFKGSSDDEEESRLCNTVLITGPTGVGKTAAVYACAQELGFKIFEVNASSQRSGRQILSQLKEATQSHQVDKQGVNSQKPCFFNSYYIGKSPKKISSPKKVVTSPRKVPPPSPKSSGPKRALPPKTLANYFKVSPKPKNNEEIGMLLENNKGIKNSFEQKQITQTKSTNATNSNVKDVGAEEPSRKNATSLILFEEVDVIFDEDAGFLNAIKTFMATTKRPVILTTSDPTFSLMFDGCFEEIKFSTPSLLNVASYLQMICLTENFRTDVKDFVTLLTANTCDIRKSILYLQFWIRSGGGVLEERPLTLYRGNSRNVQLVCSEHGLDNKIYPKNTKKKRVDLPKCDSGCAETLFGLKNIFSPSEDLFSFLKHKITMKEEWHKFIQLLTEFQMRNVDFLYSNLEFILPLPVDTIPETKNFCGPSVTVDASAATKSMNCLARKHSEREQPLKKSQKKKQKKTLVILDDSDLFDTDLDFPDQSISLSSVSSSSNAEESKTGDEESKARDKGNNPETKKSIPCPPKTTAGKKCSALVSHCLNSLSEFMDNMSFLDALLTDVREQNKYGRNDFSWTNGKVTSGLCDEFSLESNDGWTSQSSGELKAAAEALSFTKCSSAISKALETLNSCKKLGRDPTNDLTFYVSQKRNNVYFSQSAANLDNAWKRISVIKSVFSSRSLLYVGNRQASIIEYLPTLRNICKTEKLKEQGKSKRRFLHYFEGIHLDIPKETVNTLAADFP

SEQ ID NO: 217202 - DNA, 5535 bp, Artificial Sequence
  derived and/or modified sequence
atggtcggggtcctcgcgatggctgccgcggccgctcctcctccagtcaaagattgcgaaatcgagccgtgtaagaagcgtaagaaagatgatgacacatcaacatgtaagactatcactaagtacctctccccattgggtaagactcgggacagagtgtttgccccccccaaacccagtaatatcttagattacttcaggaagacaagccctacaaatgaaaagacccagcttggaaaagaatgcaagataaagagccccgagagcgttcccgtagacagcaacaaagactgcactacacctctcgaaatgtttagcaacgtggagttcaagaagaagcgcaaacgagtgaatctgtcccaccagcttaataatatcaagactgaaaacgaggcccccatagagataagtagcgacgatagtaaggaagattactctctcaataatgatttcgtggagtcgagcacaagtgtgttgcgttacaagaagcaggtcgaggttctcgctgaaaatatccaagatacgaagagccagcctaatactatgacttcactgcagaattctaagaaggtgaatccaaaacaaggaaccactaagaatgatttcaaaaaacttcgaaagcgtaagtgtagagacgtggttgacctgagcgagtctctgcccttagcggaggaactgaatcttttaaaaaaagacgggaaggatacgaagcagatggagaatacgacttcccatgctaacagcagagacaatgtcactgaggcggctcaactgaatgattctatcataaccgttagctatgaagagtttttaaagagccacaaggagaataaagtcgaggagatccccgattccactatgtccatttgcgttccaagtgagactgtcgacgaaatcgtgaagagcggatacatttcagaaagcgaaaattcggaaatttcccagcaggtgcggttcaaaaccgtgaccgtactggcccaggttcatcccatcccacctaaaaagaccggcaagattccccgaatcttcctgaagcagaagcagttcgagatggagaacagcctatcagaccccgagaacgagcagacagtccaaaagcgcaagtctaatgtggtaattcaggaggaggagctcgagctagcagtgttagaagcaggcagcagcgaggccgtaaagccaaagtgcacattagaggagcgtcagcagtttatgaaggcgtttcgccagcctgcttcagatgcgttaaagaatggggttaagaagagcagcgataagcagaaagacctgaatgaaaaatgcctctatgaggtaggacgagacgataatagtaagaaaatcatggaaaacagcgggatacagatggtgtcaaagaatgggaacttgcagttgcacactgacaaaggcagcttcctcaaggaaaaaaacaaaaagctgaagaagaaaaataaaaagaccctggacacgggggctattcctggcaaaaaccgggagggaaacactcagaaaaaagaaaccactttctttttaaaggagaaacaatatcaaaataggatgagcttgagacagaggaaaactgaatttttcaaatccagcactctgtttaataacgagtccctggtgtacgaggacattgcgaatgacgatcttttgaaagttagcagtttatgcaacaacaacaagctgtctagaaagacctcaatccctgtgaaagatatcaaactgacgcagagcaaagctgagagcgaggcttcccttctgaacgtcagcactccaaaaagcactaggcgctctggccgtatatcttctacccctacaacagagacgatcagaggcattgacagcgacgacgtccaggataatagccaactgaaggcttccacgcagaaggcggccaatctctctgagaagcattcactctatacagccgaactcataaccgtgcccttcgactctgagagtcccataagaatgaagtttacaaggatttctacaccaaagaagagcaagaaaaagagtaataagcggtccgagaagagcgaagccacagacggaggatttacaagccagatacgcaaggcgtcaaacacctctaaaaatattagcaaagccaagcagctcattgaaaaggccaaagcccttcacatcagtcgttccaaagtcaccgaagagatcgccatcccccttcggcggtcaagcagacatcagacgctcccggagcgcaagaaactcagtgaaaccgaggactccgtgatcataattgactcatctcctactgcgctgaagcacccggagaagaaccagaagaagctccaatgcctcaatgatgtgttggggaaaaagctgaacactagcaccaaaaatgtgccaggcaaaatgaaggttgcgcccctgtttctggtaagaaaggcacagaaggctgctgaccccgtaccatcctttgacgagagtagtcaggacacgtctgaaaaaagccaggactgcgacgttcaatgcaaagcaaaaagagactttctcatgtcgggattaccagatctcctcaaaagacagattgctaagaaggccgcggctctcgacgtgtataacgcagtaagtacatcattccagagggtggtgcacgtacagcagaaagacgacggctgttgtctgtggcatctcaagccacccagctgtcctctgttgacgaaatttaaagaactaaataccaaggtaatagacttatctaaatgtgggattgcactaggcgagttctccactttgaattccaaactgaagtctgggaacagcgccgctgtctttatgcgcaccagaaaagagtttactgaagaggtgcgcaatctgctgttggaggaaatcagatggtcaaatcctgagtttagccttaaaaagtacttccctctactcttgaagaagcagatagagcatcaagttctgtcctctgaatgtcacagcaaacaggagctggaggccgacgtatctcataaggagaccaagagaaagcttgtggaggcagagaacagtaaatctaagcgtaagaagcccaacgagtattccaaaaatttggaaaaaactaatcggaaaagcgaggaactgagcaagaggaacaattctagcggtatcaagctagatagctcgaaagacagcggtacagaggacatgctgtggactgagaaatatcaaccgcagacggcctctgaactgatcggcaatgagttagctatcaaaaaactacacagctggctgaaagactggaaacgaagggctgaactggaggagcgccagaatttaaagggaaagcgcgacgagaagcacgaggatttttctggtggaattgacttcaagggttcttcagatgacgaggaggaatcccggctgtgtaatacagtacttatcaccggccctactggagtcggtaagactgcggccgtctacgcgtgcgcccaggaactgggtttcaaaatttttgaggtgaacgcctcgtcccagcgttccggacgccagattctgtcacagctgaaagaggctacccaaagtcaccaggtcgataaacagggagtgaacagccagaaaccctgtttttttaactcttattatattggaaagtctcctaaaaaaatttccagcccgaaaaaagtggtcacatctccccgaaaggtgcctcctccctcaccaaagtcctcggggccaaagcgagcgctcccgcctaagaccctggccaattactttaaggtgtcacccaagcccaagaataatgaggaaatcggcatgctgctcgaaaataataaggggattaagaactctttcgagcagaaacagatcacacagactaaaagtactaacgcgaccaactcgaacgtcaaagatgtgggagccgaagagccaagccggaaaaacgccacctcattgatcttatttgaggaggtggacgtgatatttgatgaggatgccgggttcctgaacgctataaagacctttatggccacgacgaagaggcctgtcattctgactacaagcgacccaacattcagcctgatgttcgatggttgttttgaggagatcaaattctctacaccctcactgctgaatgtcgcatcctacctgcaaatgatctgcttgactgagaacttccgtacagacgtgaaagactttgtaactctgctgactgcaaatacttgcgatatccggaaatccattctttacctgcaattctggatccggtcagggggtggtgtactggaggaacggccactgacactctacagggggaatagtcggaatgtccagctagtgtgcagtgagcatggcttagacaacaagatttatcctaaaaataccaagaaaaaacgagtagatctgcccaaatgtgacagcgggtgcgcagagacactcttcggcctcaaaaatatcttctctccctctgaggacttgttttcattcctcaaacacaaaatcactatgaaggaagaatggcacaagttcatccaactcctcacagagttccagatgcgaaacgtggacttcctttattcaaatctcgagttcattctacctctaccggtcgacaccattccagaaactaaaaacttctgtggcccctctgtcacagtggatgcctctgccgccaccaagtccatgaactgcctcgcaagaaagcattccgaaagggaacagcccctcaagaaatcacaaaagaagaagcagaaaaagactttagtgattctagacgattccgaccttttcgacactgatctggacttccctgaccagagtatctccttgtcttccgtttctagcagcagtaatgcggaagagtcaaagactggcgacgaggaaagcaaggctagagacaaagggaacaaccccgaaacgaaaaaatcaatcccatgtcctcctaagaccacagccggcaaaaaatgctccgccctggttagccactgcctcaattctttatctgaatttatggataatatgtccttccttgacgctctgttaacggatgtgagagaacagaacaagtatggcagaaacgatttctcctggactaatggcaaggtaacatcagggctttgtgatgagttttcgctggagagcaacgacgggtggacgtctcagtcgagtggcgaactcaaagcagctgcagaggcactcagtttcactaagtgtagcagtgcgatctctaaagctctcgaaacactcaactcgtgtaagaagttgggaagggacccaacaaacgacctgaccttttacgtctcccagaaaaggaataacgtatacttctcccagagtgctgctaacctggacaatgcctggaagcggatttcagtcataaagtctgtgttctccagtcggtccctgttgtacgtggggaataggcaggcaagtataattgagtatctgcctactctgaggaacatctgcaaaacagagaaattgaaggaacaggggaagtcaaagcgtcgcttcttgcattactttgagggcatccacttggacatacccaaagagaccgtgaacacacttgcggcagattttccctag

SEQ ID NO: 217203 - DNA, 5535 bp, Artificial Sequence
  derived and/or modified sequence
atggtgggcgtgctggccatggctgctgctgctgcccctcctcctgtgaaggactgtgaaattgagccctgcaagaagaggaagaaggatgatgacaccagcacctgcaagaccatcaccaagtacctgagccccctgggcaagacccgggacagagtgtttgccccacccaagcccagcaacatcctggactacttcaggaagaccagccccaccaatgagaagacccagctgggcaaggagtgcaagatcaagagccctgagagcgtgcctgtggacagcaacaaggactgcaccacccccctggagatgttcagcaatgtggagttcaagaagaagaggaagagggtgaacctgagccaccagctgaacaacatcaagacagaaaatgaggcccccatcgagatcagcagtgatgacagcaaagaagactacagcctgaacaatgactttgtggagagcagcacctctgtgctgcgctacaagaagcaggtggaggtgctggccgagaacatccaggacaccaagagccagcccaacaccatgaccagcctgcagaacagcaagaaggtgaaccccaagcagggcaccaccaagaatgacttcaagaagctgaggaagaggaaatgtagagatgtggtggacctgtctgagagcctgcccctggccgaggagctgaacctgctgaagaaggatggcaaggacaccaagcagatggagaacaccaccagccacgccaacagccgggacaacgtgacagaagctgcccagctgaatgacagcatcatcaccgtgtcctatgaggagttcctgaagagccacaaggagaacaaggtggaggagatcccagacagcaccatgagcatctgtgtgcccagcgagaccgtggatgaaattgtgaagagcggctacatcagcgagagtgaaaattctgagatcagccagcaggtgcgcttcaagacagtgacagtgctggcccaggtgcaccccatcccccccaagaagacaggcaagatcccccgcatcttcctgaagcagaagcagtttgagatggagaacagcctgagtgaccctgaaaatgagcagacagtgcagaagaggaagagcaatgtggtgatccaggaggaggagctggagctggccgtgctggaggccggcagcagcgaggccgtgaagcccaagtgcaccctggaggagcggcagcagttcatgaaggccttccggcagcctgccagtgatgccctgaagaatggagtgaagaagagcagtgacaagcagaaggacctgaatgagaagtgcctgtatgaggtgggcagagatgacaacagcaagaagatcatggagaacagcggcatccagatggtgtccaagaatggaaacctgcagctgcacacagacaagggcagcttcctgaaggagaagaacaagaagctgaagaagaagaacaagaagaccctggacaccggggccatccctgggaagaaccgggagggcaacacccagaagaaggagaccaccttcttcctgaaggagaagcagtaccagaacaggatgagcctgcggcagaggaagacagagttcttcaagagcagcaccctcttcaacaatgaaagcctggtgtatgaggacatcgccaatgatgacctgctgaaggtgagcagcctgtgcaacaacaacaagctgagcaggaagaccagcatccctgtgaaggacatcaagctgacccagagcaaggccgagagcgaggccagcctgctgaatgtgtccacccccaagagcaccaggagaagtggccgcatcagcagcacccccaccacagagaccatccggggcatcgacagtgatgatgtgcaggacaacagccagctgaaggccagcacccagaaggccgccaacctgtctgagaagcacagcctgtacacagctgagctgatcaccgtgccctttgattctgagagccccatccgcatgaagttcacccgcatcagcacccccaagaagagcaagaagaagagcaacaagaggtctgagaagtctgaggccacagatggcggcttcaccagccagatcaggaaggccagcaacaccagcaagaacatcagcaaggccaagcagctgattgagaaggccaaggccctgcacatcagccgcagcaaggtgacagaggagatcgccatccccctgcggcgcagcagccgccaccagaccctgcctgagaggaagaagctgtctgaaacagaagattctgtcatcatcatcgacagcagccccacagccctgaagcaccctgagaagaaccagaagaagctgcagtgcctgaatgatgtgctgggcaagaagctgaacaccagcaccaagaatgtgcctgggaagatgaaggtggcccccctcttcctggtgaggaaggcccagaaggctgctgaccctgtgcccagctttgatgagagcagccaggacaccagcgagaagagccaggactgtgatgtgcagtgcaaggccaagagggacttcctgatgagcggcctgcctgacctgctgaagaggcagatcgccaagaaggctgctgccctggatgtgtacaatgctgtgtccaccagcttccagagggtggtgcacgtgcagcagaaggatgatggctgctgcctgtggcacctgaagccacccagctgccccctgctgaccaagttcaaggagctgaacaccaaggtgattgacctgagcaaatgtggcatcgccctgggggagttcagcaccctgaacagcaagctgaagagcggcaacagcgctgctgtgttcatgaggaccaggaaggagttcacagaggaggtgaggaacctgctgctggaggagatccgctggagcaaccctgagttcagcctgaagaagtacttccccctgctgctgaagaagcagatcgagcaccaggtgctgagcagcgagtgccacagcaagcaggagctggaggctgatgtgagccacaaggagaccaagaggaagctggtggaggccgagaacagcaagagcaagaggaagaagcccaatgagtacagcaagaacctggagaagaccaacaggaagtctgaggagctgagcaagaggaacaacagcagcggcatcaagctggacagcagcaaggacagcggcacagaggacatgctgtggacagagaagtaccagccccagacagccagcgagctgattggaaatgagctggccatcaagaagctgcacagctggctgaaggactggaagagaagagctgagctggaggagcggcagaacctgaagggcaagagagatgagaagcatgaggacttcagcggcggcatcgacttcaagggcagcagtgatgatgaggaggagagccggctgtgcaacacagtgctgatcaccggccccaccggggtgggcaagacagctgctgtgtatgcctgtgcccaggagctgggcttcaagatctttgaggtgaatgccagcagccagaggagcggccggcagatcctgagccagctgaaggaggccacccagagccaccaggtggacaagcagggcgtgaacagccagaagccctgcttcttcaacagctactacatcggcaagagccccaagaagatcagcagccccaagaaggtggtgaccagccccaggaaggtgcccccacccagccccaagagcagcggccccaagagggccctgccccccaagaccctggccaactacttcaaggtgagccccaagcccaagaacaatgaggagatcggcatgctgctggagaacaacaagggcatcaagaacagctttgagcagaagcagatcacccagaccaagagcaccaatgccaccaacagcaatgtgaaggatgtgggcgctgaggagcccagcaggaagaatgccaccagcctcatcctgtttgaggaggtggatgtgatctttgatgaagatgctggcttcctgaatgccatcaagaccttcatggccaccaccaagaggcctgtgatcctgaccaccagtgaccccaccttcagcctgatgtttgatggctgctttgaggagatcaagttcagcacccccagcctgctgaatgtggccagctacctgcagatgatctgcctgacagagaacttcagaacagatgtgaaggactttgtgaccctgctgacagccaacacctgtgacatcaggaagagcatcctgtacctgcagttctggatccgcagcggcggcggcgtgctggaggagcggcccctgaccctgtaccggggcaacagcagaaatgtgcagctggtgtgcagcgagcacggcctggacaacaagatctaccccaagaacaccaagaagaagagggtggacctgcccaagtgtgacagcggctgtgccgagaccctgtttggcctgaagaacatcttcagccccagtgaagatctcttctccttcctgaagcacaagatcaccatgaaggaggagtggcacaagttcatccagctgctgacagagttccagatgagaaatgtggacttcctgtacagcaacctggagttcatcctgcccctgcctgtggacaccatccctgagaccaagaacttctgtggccccagcgtgacagtggatgccagcgctgccaccaagtccatgaactgcctggccaggaagcacagcgagcgggagcagcccctgaagaagagccagaagaagaagcagaagaagaccctggtgatcctggatgacagcgacctgtttgacacagacctggacttcccagaccagagcatcagcctgagctctgtgagcagcagcagcaatgctgaggagagcaagacaggagatgaggagagcaaggcccgggacaagggcaacaaccctgagaccaagaagagcatcccctgcccccccaagaccacagctgggaagaagtgcagcgccctggtgagccactgcctgaacagcctgtctgagttcatggacaacatgtccttcctggatgccctgctgacagatgtgcgggagcagaacaagtatggaagaaatgacttctcctggaccaacgggaaggtgaccagcggcctgtgtgatgagttcagcctggagagcaatgatggctggaccagccagagcagtggagagctgaaggctgctgctgaggccctgtccttcaccaagtgcagcagcgccatcagcaaggccctggagaccctgaacagctgcaagaagctgggccgggaccccaccaatgacctgaccttctacgtgtcccagaagagaaataatgtgtacttcagccagagcgctgccaacctggacaatgcctggaagaggatcagcgtcatcaagtctgtgttcagcagccgcagcctgctgtatgtgggcaaccggcaggccagcatcatcgagtacctgcccaccctgaggaacatctgcaagacagagaagctgaaggagcagggcaagagcaagaggcgcttcctgcactactttgagggcatccacctggacatccccaaggagaccgtgaacaccctggccgctgacttcccctag

SEQ ID NO: 217204 - DNA, 5535 bp, Artificial Sequence
  derived and/or modified sequence
atggtgggcgtgctggccatggccgccgccgccgcccccccccccgtcaaggactgtgaaatcgaaccgtgtaagaagcgaaagaaggatgatgacacctccacatgcaagactattaccaagtacctaagcccactcggcaagactcgagacagggtgttcgcaccacccaagccgtccaatatcctcgactattttaggaaaacctccccaacaaacgagaagacccaactaggaaaggaatgcaagatcaaaagccctgaatccgtgccagtggatagcaacaaagattgtaccacacctttggaaatgtttagcaatgtcgaattcaagaaaaaacgtaaacgcgtgaacttaagccaccagctgaacaacatcaaaacagaaaatgaagcgccaattgaaatcagttccgatgactcaaaggaagactacagcctgaataatgacttcgtcgaatcttctaccagcgtgctgcgctacaagaaacaagtcgaggtcctggctgagaatatccaggatactaagtcgcagccgaacaccatgaccagcctgcagaattctaagaaggtaaaccctaagcaagggacaactaagaacgactttaagaagctgcgtaagcggaagtgtagggacgtggtcgatcttagcgaaagcctccctttggccgaggaactcaacctgttgaagaaggacggcaaggatacaaagcaaatggaaaatacaacaagccacgcaaacagcagggacaacgtcaccgaagctgcgcagctgaatgatagcatcatcactgtgtcctacgaggagtttctgaagagccataaggagaacaaggtcgaagaaatacctgacagcactatgtctatttgtgtgccttccgagactgtggacgagatagtcaagtcaggctatatctcagagtccgagaactccgaaatttcccagcaggtaagattcaagactgttaccgtgctagcccaggttcacccaatccctcccaaaaaaaccggaaagataccaaggatttttttaaaacagaagcagtttgagatggagaactctttgtcagatccggagaatgaacagacagtccagaagcggaagtcgaatgtggtcatccaggaggaagaactagagctggcggtcctggaagcgggctcctctgaagcagtgaaacctaagtgtacactcgaagagcggcagcagttcatgaaggcattccggcagcccgcttctgacgccttgaaaaacggtgtgaagaaatcaagcgacaagcaaaaggatctcaatgagaagtgtctgtatgaagtgggaagggatgataattctaagaagataatggagaacagtgggatccagatggtcagtaagaatgggaatctgcagctgcacaccgataagggctccttcctcaaagaaaaaaataagaaactgaaaaagaagaacaagaaaaccctggacactggagctattcccgggaaaaatagagagggcaacacacagaaaaaggaaacgactttctttctgaaagaaaaacagtatcagaataggatgtcacttagacagagaaaaaccgagttttttaagtcatccaccttattcaataatgaatccctagtatacgaggatatcgcaaacgacgatcttctcaaggtctcttcgctttgcaataacaacaagctcagtcggaagacttccattcccgtcaaagatataaagttaacacagtctaaggctgaatcagaggctagtctccttaacgtatctacaccaaaatctacccgccggagcggccggatcagtagcacaccgacaaccgagacaatcagaggtatcgatagcgacgacgtccaggacaattcgcaactgaaagcctccacccagaaggcagccaatctttcagagaaacacagtctttataccgccgagctcatcacggtcccttttgattctgaaagccctatacgcatgaaattcactcgcatcagcacccccaagaagtctaaaaaaaagtcaaacaagcgctccgaaaagtctgaagccacagacggcgggttcacttcacaaattcggaaagcttcaaatacctctaagaatatctccaaggctaaacagttaattgagaaggctaaggcactgcatatctcaaggtctaaagtgaccgaggagatcgccatcccactacgccgctcttccaggcatcaaaccctaccagagcgtaagaagctgtccgagaccgaggattctgttatcattatcgattcctctcccacggccttaaagcatccggagaaaaaccaaaaaaaactgcaatgcctcaacgacgtgctaggcaagaagctgaatacgtctacgaaaaatgtgcccgggaagatgaaggttgcccccctgtttctcgtgagaaaggcccaaaaagccgctgatcccgtgccttcctttgacgagtcaagtcaggatacatccgaaaaatctcaggactgcgacgtgcaatgcaaggctaagagagattttctgatgagcgggctgccagacctgttaaaacggcagattgcgaagaaagccgccgctttggatgtgtataatgctgtgtctacctcctttcagcgggtggtacacgtgcaacagaaggacgacgggtgttgcctgtggcatctaaaacccccctcctgtcctctgctgactaaatttaaggagctcaatactaaggtaatagatttatccaagtgtggaattgcacttggggagtttagcactcttaattctaaacttaaaagcggtaatagcgctgctgtattcatgaggacccggaaggaattcaccgaagaggtacgcaatctgctgctcgaggagattcgctggtccaacccagaatttagccttaagaagtattttcctctgttactgaagaaacaaatagaacaccaggtattgtcaagcgaatgccacagcaagcaggagctggaagctgatgtgtcccacaaagagaccaagaggaaactcgtggaagccgagaacagcaagagcaagcgcaagaaaccgaatgaatactctaagaatctagagaagacgaacaggaaatctgaggaactgagcaagaggaataacagctccggtattaaactggattctagtaaagacagcgggactgaagacatgctttggactgaaaagtaccagcctcagaccgcatcagagctgatcgggaacgagttggccataaaaaaactgcactcctggctcaaggactggaagagaagagctgaactcgaggagagacagaatctgaagggaaaacgggacgaaaagcacgaagatttttccggtggcatcgacttcaagggctcctctgatgacgaagaggaaagtaggctgtgcaatacagttttgattaccggcccgaccggagtgggtaagaccgccgctgtttacgcatgcgcccaagaactgggcttcaagatcttcgaggtcaatgcgtcgtcccagagaagcggtaggcagatcctgtctcaattgaaggaggccactcagtcacatcaggtcgacaaacagggtgtgaactcacaaaaaccatgtttttttaattcctattacattggcaagagccccaaaaagatctcctcacccaagaaggtggtgaccagccctcggaaagtgccccccccttcacccaagtcttctggtccaaagcgggccctcccacctaaaacactcgccaactattttaaagtctcgcccaagccaaaaaataacgaggagatcggcatgctgctggaaaataataaagggattaagaatagtttcgagcagaagcagatcacccaaacaaagtctacaaacgctaccaattcaaatgttaaagatgtaggtgcggaggaaccaagcagaaagaacgctacaagtctgatcctgtttgaagaggtagatgtgattttcgatgaagatgctgggttcctgaacgcgattaagacttttatggctacaacaaagagacctgtcatcctgaccacaagcgatcctacattttccctgatgtttgacggctgttttgaagagatcaagttttcaacgccttccctgctaaacgtggccagttatctgcagatgatatgtcttacagagaatttcaggactgatgtaaaagacttcgtaacactgctgacagccaatacttgcgacatcaggaaatccatcctgtacctgcagttctggattcgttctggcggtggggtactggaagaacggcctctgacactgtatcgaggtaactctagaaatgtgcaactggtctgtagcgaacacggacttgacaacaagatttaccctaaaaacacgaagaaaaaaagggtcgatctgcctaagtgtgatagcggttgcgctgaaactctctttggattgaaaaacatattttctcccagcgaggacctgttctcctttctgaagcacaagatcacaatgaaagaggagtggcacaaattcatccaactgttgactgagttccagatgcgtaatgtagatttcctgtacagcaatcttgagttcatcctaccactacccgtcgacactatccctgagactaagaatttttgcgggccttcggttaccgtcgatgcctcagcggccaccaaatccatgaattgcctcgctcgcaagcatagcgagcgggaacaacccttgaagaagagccaaaaaaagaagcagaaaaagactctggtcattctggatgactccgacctgttcgataccgacctcgattttccagaccagtccattagcttatcttctgtgtccagcagctccaacgcagaagaatcaaaaaccggtgatgaggagtccaaggcgcgggacaaggggaataacccagagactaaaaagtccataccatgcccaccaaagacaacggccgggaagaagtgcagtgccttggtttcacactgtctgaacagcctctcagagtttatggacaatatgtcattccttgatgcactgctcactgacgttcgggagcagaacaagtatggacgtaacgacttcagttggaccaatggaaaagtgacaagcggcctgtgtgacgaattcagcctggaaagcaatgacggctggacttcacagtcctctggcgaacttaaggccgcggccgaagccctctctttcaccaaatgctcgtcagcaatctcaaaagcccttgagactctcaattcttgcaaaaagttgggtcgggacccgactaatgacttgactttctatgtgtctcagaagcggaataacgtctacttctcacagtctgctgccaacttggacaatgcatggaagagaattagcgtgatcaagagcgtgttttccagtcgaagcctgctgtacgtggggaaccgtcaagctagtattatagagtatctgcccacgttgcggaacatctgtaaaactgagaaactcaaggaacaggggaagagtaagcggcggtttcttcactatttcgagggcattcacctcgacatcccgaaggaaacggttaacaccctggcggcagattttccttag

SEQ ID NO: 217205 - DNA, 5534 bp, Artificial Sequence
  derived and/or modified sequence
atggttggagtcctggcgatggcagccgctgctgcaccccctccagtgaaagattgcgaaattgaaccatgtaagaagaggaaaaaggatgatgacacctccacttgtaaaacgataacaaaatatctgtctcccctcggcaaaactagggaccgcgtgttcgctcctcctaagccatccaatattctagactatttcaggaaaacttcacctaccaacgagaaaactcaattaggcaaagagtgcaagataaagtcgcctgagtcggtacccgtggacagtaataaggattgtaccactccgctggagatgttctccaatgtcgaatttaaaaagaaacgtaaacgcgttaatctgagtcatcagctgaacaatataaagacagagaatgaggcaccaatcgaaattagcagtgacgattctaaagaagattattcgctgaacaacgatttcgtggagagttccacatcagttttacggtataaaaagcaggtggaagtcctcgctgagaatattcaggataccaaaagtcagcctaatactatgactagcctccaaaattcaaagaaggtgaaccctaaacagggaacaacaaaaaacgacttcaagaaactcagaaagaggaagtgtcgtgacgtggtcgatctttcagagtctcttcccttggccgaagagcttaaccttctaaagaaagacgggaaagatacaaagcaaatggagaatactacaagccacgccaatagtcgcgacaacgtaactgaagccgctcagctaaatgactctattatcaccgtaagctacgaggagtttcttaagtctcacaaagagaacaaagtcgaggagatccctgattcgacaatgtccatctgtgtcccaagcgaaaccgtggacgagatcgtgaaatcaggatatattagcgagagcgaaaactcggaaatatcccagcaggttcgcttcaaaactgtcaccgtgctggctcaggtgcatcctattcctccaaagaaaactggcaagatccctcggatctttctcaaacagaagcagtttgagatggaaaacagccttagcgaccctgagaatgagcaaaccgtgcaaaaacgaaagtccaatgttgtgattcaagaggaggagctggagttggcggtcctagaggctggctcttccgaggccgtgaagcctaaatgcacactggaggagaggcaacagttcatgaaggctttcaggcagccagcttctgacgccctcaaaaacggcgttaagaaatcgtctgataagcagaaggaccttaatgaaaagtgtttatacgaggtgggccgagacgacaacagcaaaaaaatcatggagaacagcgggattcagatggtgtcaaaaaacgggaaccttcagctgcacaccgataaaggaagtttcctgaaggagaagaataagaaactgaagaaaaagaataaaaaaacccttgataccggggcaatcccaggtaagaacagagaagggaatacacagaagaaagaaacaacgttcttcctgaaggaaaagcagtaccagaatagaatgagcctgcgccagcggaagacagaattcttcaaatcttcaactctgtttaataatgagtcgttggtctatgaagatattgctaacgatgacttattaaaagtttcatcattgtgcaacaacaacaagttaagccgcaaaacttccataccagtcaaggatatcaaactgactcaatcaaaagccgaatccgaggcctcactgttgaacgtctccacccccaaatccactcggaggtctggcaggatatctagcactccgaccacagagacaataagaggcatcgactccgacgatgtccaagacaattcacagctgaaggcctcaactcagaaggccgcaaacctgagcgaaaagcactccttatatacagcagagctgattaccgtccctttcgattccgagagccccatcaggatgaagtttacaaggatctccacacccaaaaaaagtaagaaaaaaagcaacaagcgctcagaaaaaagtgaggcaaccgatggaggctttacctctcagattcggaaggcttccaatacatcaaagaatatatccaaggccaagcaactcattgaaaaagccaaagcactgcatatctcacgctccaaggtcactgaggagattgccatcccattgcgcagaagcagtagacaccaaacgctccccgagcggaagaagctttccgaaacggaggatagcgttatcattatcgactcttctccgacagcgctgaagcaccctgaaaaaaatcagaaaaaacttcagtgtcttaatgatgttttgggaaagaagctgaatacctcaacgaagaacgttccaggcaagatgaaagtggcccctctgtttctcgtcaggaaggcccagaaggctgcagaccccgtcccgtctttcgatgaaagttcccaggatactagcgaaaaaagccaagactgcgacgttcaatgcaaggccaaacgggactttcttatgtcagggttgccggaccttcttaaaagacagatcgctaaaaaggcagctgcactagatgtgtacaatgccgtgagtacttccttccagcgagttgtgcacgtgcaacagaaggatgatggatgttgcctgtggcacttgaaacctccaagctgtcccctgctgacaaagtttaaggaactcaacacaaaggtcattgacctttctaaatgcggcattgcgctgggggaattctcgacactgaactctaagctgaagtctggcaacagcgctgctgtgtttatgcgaactcgtaaagagttcaccgaggaggtacgtaacctattgcttgaagaaataagatggagtaaccctgaattctcactcaaaaagtacttcccactcctactaaaaaagcaaatagagcaccaggtgttgtcttccgaatgccacagcaaacaagagctcgaagctgatgtcagccacaaagaaaccaagcggaaactcgtcgaggctgagaactctaaaagtaagcggaagaagccaaacgagtattcaaaaaatcttgagaaaacaaataggaaatccgaagaactttcaaagagaaataacagctcaggtatcaaactagatagtagtaaggattccggaacagaggacatgctctggacagagaagtaccagcctcagaccgctagcgaactgattgggaatgaattagcaataaagaagctccatagctggctcaaggattggaaaagacgagccgaactagaagaacgacagaatctcaaagggaagagagacgaaaagcatgaagatttctctgggggaatcgattttaaggggagctcggatgacgaagaggagagtcgcctgtgtaatacagtgcttattaccgggcctaccggagtaggcaagactgccgcagtgtacgcatgtgcgcaggagctggggtttaagatcttcgaggtgaatgctagctctcaaagatccggcaggcagatactgagtcagttaaaggaggctacccagagccatcaggtagataaacaaggggtgaatagccagaagccctgcttttttaatagctactacatcggaaaatcacctaagaagatatcgagccccaagaaggtggtaaccagtcccagaaaagtgccgccaccaagcccaaaatctagtggccctaaaagagccctgcctcccaagacgttggccaactatttcaaggtgtcaccaaagccgaagaataacgaggaaatcgggatgctgctggagaacaataagggtattaagaattcttttgaacaaaagcaaattacgcaaacgaagagcacaaacgccacgaatagtaacgtaaaagatgtgggcgctgaagaaccctctcgaaaaaatgcgacttcattgatcctcttcgaggaggtcgatgtgatattcgacgaagatgccggtttcctcaacgccattaaaacatttatggcgacgaccaagaggccagtcattctcactacttcagacccaactttctcattgatgtttgatgggtgctttgaggaaataaagttttctaccccctcgctccttaatgtggcgagttatctgcaaatgatttgtctcacagagaactttaggacggacgtcaaagatttcgttaccttattgaccgccaatacttgtgatatccgaaaaagtatcctttacctgcaattttggattcggtctggaggcggagtcctggaagaacgacccctgactctctaccgcggaaattcaagaaacgttcagctggtgtgctcagaacacggcctcgacaataagatctatcctaaaaacactaagaaaaagagagttgacctcccaaagtgcgacagcggatgtgccgagacactgttcggactcaagaacatcttctccccttcagaggatttgttctcatttcttaaacacaagatcaccatgaaggaggagtggcacaagtttattcagctgctcactgagtttcagatgcgtaacgtggacttcctttactccaatctggagttcatccttcctttacctgtggacactattccagagacgaagaacttctgcggcccatccgtgaccgtggatgcctctgcagctacaaagtcaatgaactgtctcgctcggaaacattctgaacgcgaacaacccttgaagaagtcacagaagaaaaaacaaaaaaagactctcgttatactggacgatagcgaccttttcgacacagacttagatttccctgaccagagcatttcactgagcagcgtatcatccagtagcaatgccgaggagtccaagaccggagatgaggaatcaaaagccagagacaaagggaacaacccagagaccaagaagtctataccatgcccccctaagaccacggccggtaaaaagtgctctgcactcgtctcacattgtctgaattcactcagcgaattcatggacaacatgtctttcctggacgctctcctaaccgacgtgagggagcagaacaaatatgggagaaatgacttctcttggacgaacggcaaagtcacgagcgggctatgcgatgaatttagtctggagagcaacgacggttggacaagtcaatcctctggtgaactgaaagccgcagccgaagctctgtccttcactaagtgctcaagcgccatctcaaaggcactggagaccctgaactcgtgtaagaagcttggccgagaccccacgaatgacctgactttttatgtgagccagaagagaaataacgtgtatttttcacagtcggctgcgaacctcgacaatgcatggaagagaataagcgtcattaagtctgtcttctcttcaaggagtctgttgtacgtgggaaaccgacaggctagcattatcgaatacctgccaaccctgagaaacatttgtaagactgaaaagctaaaggaacaaggcaagagcaaacgaaggttcctgcactattttgagggcatccacttagacataccaaaggaaacagtgaacaccctggccgctgattttcctta

SEQ ID NO: 217206 - DNA, 6277 bp, Artificial Sequence
  derived and/or modified sequence
gcaggacggcgcgaaaacccaattgacaagaattccctccgaagctctgtggtccgatctgcggtccgcttgctttccctgcccggtcccgagcgctcagcctgaagcgccgctttcgagggcaccctgcatacactggccgcgcctcagggatctcattgcccgcgctttctcattgcctctttccgtgttcgattcggctgatctgggcccagcctccgctcccgctctctgtcggtgggcgcgggggaatccgaaacggctcagcagaatcccagcagcttgctgctactggagcgggccgcctccatggcctccaggcaggccgggctggaccgcgtgaggtcctaggagacgggattccgggaagcggggagtatggtgggggtcctggccatggcggctgcagctgctccgcctcccgtgaaggactgcgagattgagccatgcaaaaagcgaaagaaagatgatgacacatctacctgcaaaacaattacaaaatatttatcaccactagggaagactagagacagggtttttgctccaccaaaacctagtaatattctggattattttagaaagacttcacccacaaatgagaagacacaattagggaaagagtgcaagataaagtcacctgaatcagtacctgttgacagcaacaaagactgtacgacacctttggaaatgttctcaaatgtagagtttaagaagaaaagaaagagggttaatttatctcatcaactaaataatattaaaactgaaaatgaagctccaattgaaattagtagcgacgatagcaaagaagactatagtttaaataatgattttgtggaaagtagtacttctgttttacgttacaagaaacaagtagaggtacttgcagaaaacattcaagatacaaaaagtcaaccaaatactatgacctccctgcaaaattctaaaaaagtaaatcctaaacaagggaccacaaaaaatgacttcaaaaagttgagaaaaaggaaatgcagagatgtagtagatctatctgaaagcttacccttggcagaggaactaaatttgcttaaaaaagatggtaaagatactaaacagatggagaatactacaagccatgcaaactctagagataacgtaactgaagcagcccagttaaatgatagtataataactgtctcatatgaggaatttttaaaaagtcacaaggaaaataaagtggaagagataccagactctacaatgtcaatttgtgttccttctgaaactgtcgacgaaatagtcaaaagtggttatataagtgaatcagaaaactccgaaatttcccagcaggtacgctttaagacagttactgttcttgcacaggttcaccctattccgcccaaaaagacagggaaaataccccgaattttcttgaaacaaaagcaatttgaaatggaaaatagtttatctgatcctgagaatgaacagacagttcagaaaagaaaatctaatgttgttatacaggaggaagaattagaattggctgttttggaagctggaagttctgaagctgtgaaaccaaaatgcactctagaagaaagacagcaatttatgaaagcatttaggcagccagcatcagatgcacttaaaaatggagttaaaaagtcttctgataagcagaaagaccttaatgaaaaatgtctatatgaagtaggaagagatgataattctaaaaaaatcatggaaaattctggtatccaaatggtttcaaaaaatggcaatttacagttacacactgataaaggaagttttctgaaggagaaaaataaaaagctaaagaagaagaataagaaaacattagatactggggctattccaggcaaaaacagagagggaaacactcaaaagaaagaaacaacctttttcttaaaagagaaacaatatcaaaatagaatgagtttaagacaaaggaaaacagagtttttcaaaagcagcactttatttaacaatgaaagtcttgtttatgaagatatagcaaatgatgaccttctaaaggtttcctctctgtgtaacaataataaattgtcaagaaaaaccagcataccagttaaagatattaagcttacacagtctaaagctgaatctgaagccagcttgctaaatgtttccacgcccaagtcaactagaagatctggaagaattagcagcacacctactacagaaaccattagaggtattgattctgacgatgtacaagataatagtcaactaaaggcttccactcaaaaagcagccaacttatcggaaaagcacagcttatatacagcagaattaataacagtaccctttgattcagagagccctattagaatgaaattcaccagaattagtactcccaaaaaatctaagaaaaaatctaacaaaagatctgagaaatctgaagcaactgatggaggttttacttctcagattagaaaggcaagcaatacttcaaaaaacatatcaaaagcaaaacaattgattgaaaaagcaaaagctttacacatcagtaggtcaaaggtgactgaagaaatagcgatacccttaaggcgctcctctagacatcagacacttcctgaaaggaagaaattgtcagaaacagaagattctgttataataatagattcaagtcctactgctttaaagcatccagagaaaaatcagaagaaacttcagtgtttgaatgatgtgctaggaaaaaaacttaacacatccactaaaaatgtacctggaaaaatgaaagtcgctcctttatttcttgtcagaaaagcacaaaaagcagctgatcctgtccctagttttgatgaaagcagtcaagatacatctgaaaaatctcaggattgtgatgttcaatgtaaagcaaagcgtgacttcctaatgagtggtttgccagatttgttgaaacggcaaattgcaaagaaagctgctgcgctggatgtgtacaatgcagtgagtaccagtttccagagagtcgtacatgtgcaacaaaaggatgatgggtgttgtttgtggcatttgaaaccaccctcttgtcctctcttaactaaatttaaagaactgaacactaaagtaatagatctctcaaaatgtggtattgctcttggtgaattttcaacattgaattcaaagttgaaaagcggtaactctgctgctgtgttcatgaggacaaggaaggaatttactgaagaagtaagaaatcttttgcttgaggaaattaggtggtcaaatcctgaattttcattgaaaaaatattttcccttactcctaaaaaaacaaattgagcaccaagtactttcttccgagtgtcatagtaaacaagaactggaggctgatgtcagccataaagaaaccaaaaggaaactcgtagaagcagaaaattctaagtcaaaaagaaagaaaccaaatgagtattcaaaaaatctggagaagaccaataggaagtcagaagaacttagcaaaagaaacaactcttctgggataaagctagattcttccaaagattctggaactgaagacatgctttggacagaaaagtatcaacctcagactgccagtgaacttataggaaatgagttagctataaaaaagttacatagttggttgaaagactggaaaagaagagctgaattggaagaaaggcagaatctgaagggaaaaagagatgagaaacatgaagatttctcgggtggcatagactttaaaggcagttcagatgatgaagaagagagtcgtctttgcaatactgtccttataacagggccaacaggagtgggaaaaactgctgcagtgtatgcttgtgcccaggagcttggatttaagatatttgaagtgaatgcctcttcccagcgcagtggtagacaaattctatctcagttgaaggaagctactcagtcccatcaagtagacaaacaaggtgtaaactcacaaaaaccctgtttttttaatagctactacataggcaagtcaccaaaaaaaataagctcccctaagaaagttgttacatcaccaagaaaagttcctccaccatcaccaaaaagtagtggaccaaagcgagcacttcctcccaaaaccttggcaaattattttaaagtatctcccaaacctaaaaataatgaagaaataggaatgcttctggaaaataataaaggaataaaaaattcttttgaacagaaacaaattactcagactaaatctacaaatgcaactaattcaaatgtcaaagacgttggagctgaagaacccagcagaaaaaatgcaacatctcttattctttttgaggaggttgatgtaatttttgatgaagatgctgggtttttgaatgcaatcaaaacattcatggcaacaactaaacgacctgtaatccttactacaagtgacccaacatttagtttaatgtttgatggctgctttgaagaaatcaagttcagtactccttccctgctaaatgttgccagctacctacaaatgatttgcttaactgagaattttagaactgatgtaaaagactttgtaaccttgttaactgcaaatacttgtgatatcagaaaaagtatcctttacttacaattctggattagaagtggaggtggagttttagaagaacgaccattaaccctttatcgtggaaatagcagaaatgtacaactagtttgctctgaacatggccttgataacaaaatttaccctaaaaatactaaaaagaaacgtgtagaccttccaaaatgtgacagtggctgtgctgagaccttgtttggccttaagaacattttttccccatctgaagacttattttcatttttaaagcacaaaatcacaatgaaggaagaatggcataaattcatccagcttcttacagaattccaaatgcggaatgtagattttttatatagtaatcttgagtttattctaccattaccagttgataccattccagaaactaaaaacttttgtggcccatcagtaactgtggatgccagtgcagcaacaaaaagtatgaattgtcttgctaggaaacactctgaaagagaacagccattgaaaaagtcccagaaaaagaaacaaaagaaaacattggtaatattagatgatagtgatctatttgacactgacttggactttcctgatcaatctattagcctgtcctctgtatcatcttcctcaaatgcagaagaaagcaaaaccggagacgaagaaagcaaagccagagacaaaggaaacaatccagagacaaagaaatctattccttgtcctcctaaaacaactgcaggaaaaaaatgttctgcccttgtttctcattgtttaaattctctctctgagttcatggataacatgtccttcttagatgcacttttaactgatgtaagggaacaaaacaaatacggtagaaatgactttagttggacaaatggaaaggttacaagtggactttgtgatgagtttagtcttgagagtaatgatggatggacttctcaaagctctggagaattaaaggcagctgcagaagctctcagctttactaaatgttcttctgctatttcaaaagcattggaaaccttgaattcttgcaagaaattaggaagagatccaaccaacgatcttactttttatgtttcacaaaagcgcaataatgtatactttagtcagtcagcagctaatttagacaatgcttggaagaggatatcagtcattaaaagtgtattttcgagtcgatctcttctctatgtgggtaatagacaagctagtataattgaatacctgccaacccttcgaaacatctgtaagactgagaagctaaaagaacaaggaaaaagtaaaagaagattcctgcactattttgaaggaattcatcttgacattccaaaagagactgtgaatactttggcagctgacttcccttaatgttccatactaacaatgctttgtatagattatcatgtggtccttaagatacatttttatattatgtggatcttcatggaaaagtatatttctcgatgtacattttaaacaaacaatttgtatatttttttattggcgggtaaatatttaaaatatttgagttacaaattttatatatgattgtaattttttttctgaattttttgtattatctgatttagctttgttggagtattttttgtatgtgagtgaactgtttctggaaggtagagttcattaagatgaactccctatttcaagtgtttatattatatattagcttaatattcagatacattatcttggctgctaacattagtgtcac

SEQ ID NO: 217207 - DNA, 5535 bp, Artificial Sequence
  derived and/or modified sequence
atggtgggcgtgctggccatggccgccgccgccgcccccccccccgtgaaggactgcgagatcgagccctgcaagaagagaaagaaggacgacgacaccagcacctgcaagaccatcaccaagtacctgagccccctgggcaagaccagagacagagtgttcgccccccccaagcccagcaacatcctggactacttcagaaagaccagccccaccaacgagaagacccagctgggcaaggagtgcaagatcaagagccccgagagcgtgcccgtggacagcaacaaggactgcaccacccccctggagatgttcagcaacgtggagttcaagaagaagagaaagagagtgaacctgagccaccagctgaacaacatcaagaccgagaacgaggcccccatcgagatcagcagcgacgacagcaaggaggactacagcctgaacaacgacttcgtggagagcagcaccagcgtgctgagatacaagaagcaggtggaggtgctggccgagaacatccaggacaccaagagccagcccaacaccatgaccagcctgcagaacagcaagaaggtgaaccccaagcagggcaccaccaagaacgacttcaagaagctgagaaagagaaagtgcagagacgtggtggacctgagcgagagcctgcccctggccgaggagctgaacctgctgaagaaggacggcaaggacaccaagcagatggagaacaccaccagccacgccaacagcagagacaacgtgaccgaggccgcccagctgaacgacagcatcatcaccgtgagctacgaggagttcctgaagagccacaaggagaacaaggtggaggagatccccgacagcaccatgagcatctgcgtgcccagcgagaccgtggacgagatcgtgaagagcggctacatcagcgagagcgagaacagcgagatcagccagcaggtgagattcaagaccgtgaccgtgctggcccaggtgcaccccatcccccccaagaagaccggcaagatccccagaatcttcctgaagcagaagcagttcgagatggagaacagcctgagcgaccccgagaacgagcagaccgtgcagaagagaaagagcaacgtggtgatccaggaggaggagctggagctggccgtgctggaggccggcagcagcgaggccgtgaagcccaagtgcaccctggaggagagacagcagttcatgaaggccttcagacagcccgccagcgacgccctgaagaacggcgtgaagaagagcagcgacaagcagaaggacctgaacgagaagtgcctgtacgaggtgggcagagacgacaacagcaagaagatcatggagaacagcggcatccagatggtgagcaagaacggcaacctgcagctgcacaccgacaagggcagcttcctgaaggagaagaacaagaagctgaagaagaagaacaagaagaccctggacaccggcgccatccccggcaagaacagagagggcaacacccagaagaaggagaccaccttcttcctgaaggagaagcagtaccagaacagaatgagcctgagacagagaaagaccgagttcttcaagagcagcaccctgttcaacaacgagagcctggtgtacgaggacatcgccaacgacgacctgctgaaggtgagcagcctgtgcaacaacaacaagctgagcagaaagaccagcatccccgtgaaggacatcaagctgacccagagcaaggccgagagcgaggccagcctgctgaacgtgagcacccccaagagcaccagaagaagcggcagaatcagcagcacccccaccaccgagaccatcagaggcatcgacagcgacgacgtgcaggacaacagccagctgaaggccagcacccagaaggccgccaacctgagcgagaagcacagcctgtacaccgccgagctgatcaccgtgcccttcgacagcgagagccccatcagaatgaagttcaccagaatcagcacccccaagaagagcaagaagaagagcaacaagagaagcgagaagagcgaggccaccgacggcggcttcaccagccagatcagaaaggccagcaacaccagcaagaacatcagcaaggccaagcagctgatcgagaaggccaaggccctgcacatcagcagaagcaaggtgaccgaggagatcgccatccccctgagaagaagcagcagacaccagaccctgcccgagagaaagaagctgagcgagaccgaggacagcgtgatcatcatcgacagcagccccaccgccctgaagcaccccgagaagaaccagaagaagctgcagtgcctgaacgacgtgctgggcaagaagctgaacaccagcaccaagaacgtgcccggcaagatgaaggtggcccccctgttcctggtgagaaaggcccagaaggccgccgaccccgtgcccagcttcgacgagagcagccaggacaccagcgagaagagccaggactgcgacgtgcagtgcaaggccaagagagacttcctgatgagcggcctgcccgacctgctgaagagacagatcgccaagaaggccgccgccctggacgtgtacaacgccgtgagcaccagcttccagagagtggtgcacgtgcagcagaaggacgacggctgctgcctgtggcacctgaagccccccagctgccccctgctgaccaagttcaaggagctgaacaccaaggtgatcgacctgagcaagtgcggcatcgccctgggcgagttcagcaccctgaacagcaagctgaagagcggcaacagcgccgccgtgttcatgagaaccagaaaggagttcaccgaggaggtgagaaacctgctgctggaggagatcagatggagcaaccccgagttcagcctgaagaagtacttccccctgctgctgaagaagcagatcgagcaccaggtgctgagcagcgagtgccacagcaagcaggagctggaggccgacgtgagccacaaggagaccaagagaaagctggtggaggccgagaacagcaagagcaagagaaagaagcccaacgagtacagcaagaacctggagaagaccaacagaaagagcgaggagctgagcaagagaaacaacagcagcggcatcaagctggacagcagcaaggacagcggcaccgaggacatgctgtggaccgagaagtaccagccccagaccgccagcgagctgatcggcaacgagctggccatcaagaagctgcacagctggctgaaggactggaagagaagagccgagctggaggagagacagaacctgaagggcaagagagacgagaagcacgaggacttcagcggcggcatcgacttcaagggcagcagcgacgacgaggaggagagcagactgtgcaacaccgtgctgatcaccggccccaccggcgtgggcaagaccgccgccgtgtacgcctgcgcccaggagctgggcttcaagatcttcgaggtgaacgccagcagccagagaagcggcagacagatcctgagccagctgaaggaggccacccagagccaccaggtggacaagcagggcgtgaacagccagaagccctgcttcttcaacagctactacatcggcaagagccccaagaagatcagcagccccaagaaggtggtgaccagccccagaaaggtgcccccccccagccccaagagcagcggccccaagagagccctgccccccaagaccctggccaactacttcaaggtgagccccaagcccaagaacaacgaggagatcggcatgctgctggagaacaacaagggcatcaagaacagcttcgagcagaagcagatcacccagaccaagagcaccaacgccaccaacagcaacgtgaaggacgtgggcgccgaggagcccagcagaaagaacgccaccagcctgatcctgttcgaggaggtggacgtgatcttcgacgaggacgccggcttcctgaacgccatcaagaccttcatggccaccaccaagagacccgtgatcctgaccaccagcgaccccaccttcagcctgatgttcgacggctgcttcgaggagatcaagttcagcacccccagcctgctgaacgtggccagctacctgcagatgatctgcctgaccgagaacttcagaaccgacgtgaaggacttcgtgaccctgctgaccgccaacacctgcgacatcagaaagagcatcctgtacctgcagttctggatcagaagcggcggcggcgtgctggaggagagacccctgaccctgtacagaggcaacagcagaaacgtgcagctggtgtgcagcgagcacggcctggacaacaagatctaccccaagaacaccaagaagaagagagtggacctgcccaagtgcgacagcggctgcgccgagaccctgttcggcctgaagaacatcttcagccccagcgaggacctgttcagcttcctgaagcacaagatcaccatgaaggaggagtggcacaagttcatccagctgctgaccgagttccagatgagaaacgtggacttcctgtacagcaacctggagttcatcctgcccctgcccgtggacaccatccccgagaccaagaacttctgcggccccagcgtgaccgtggacgccagcgccgccaccaagagcatgaactgcctggccagaaagcacagcgagagagagcagcccctgaagaagagccagaagaagaagcagaagaagaccctggtgatcctggacgacagcgacctgttcgacaccgacctggacttccccgaccagagcatcagcctgagcagcgtgagcagcagcagcaacgccgaggagagcaagaccggcgacgaggagagcaaggccagagacaagggcaacaaccccgagaccaagaagagcatcccctgcccccccaagaccaccgccggcaagaagtgcagcgccctggtgagccactgcctgaacagcctgagcgagttcatggacaacatgagcttcctggacgccctgctgaccgacgtgagagagcagaacaagtacggcagaaacgacttcagctggaccaacggcaaggtgaccagcggcctgtgcgacgagttcagcctggagagcaacgacggctggaccagccagagcagcggcgagctgaaggccgccgccgaggccctgagcttcaccaagtgcagcagcgccatcagcaaggccctggagaccctgaacagctgcaagaagctgggcagagaccccaccaacgacctgaccttctacgtgagccagaagagaaacaacgtgtacttcagccagagcgccgccaacctggacaacgcctggaagagaatcagcgtgatcaagagcgtgttcagcagcagaagcctgctgtacgtgggcaacagacaggccagcatcatcgagtacctgcccaccctgagaaacatctgcaagaccgagaagctgaaggagcagggcaagagcaagagaagattcctgcactacttcgagggcatccacctggacatccccaaggagaccgtgaacaccctggccgccgacttcccctag

SEQ ID NO: 217208 - protein, 353 aa, Artificial Sequence
  derived and/or modified sequence
MALLSTVRGATWGRLVTRHFSHAARHGERPGGEELSRLLLDDLVPTSRLELLFGMTPCLLALQAARRSVARLLLQAGKAGLQGKRAELLRMAEARDIPVLRPRRQKLDTMCRYQVHQGVCMEVSPLRPRPWREAGEASPGDDPQQLWLVLDGIQDPRNFGAVLRSAHFLGVDKVITSRRNSCPLTPVVSKSSAGAMEVMDVFSTDDLTGFLQTKAQQGWLVAGTVGCPSTEDPQSSEIPIMSCLEFLWERPTLLVLGNEGSGLSQEVQASCQLLLTILPRRQLPPGLESLNVSVAAGILLHSICSQRKGFPTEGERRQLLQDPQEPSARSEGLSMAQHPGLSSGPEKERQNEG

SEQ ID NO: 217209 - DNA, 1062 bp, Artificial Sequence
  derived and/or modified sequence
atggccctgctgagcaccgtgagaggcgccacctggggcagactggtgaccagacacttcagccacgccgccagacacggcgagagacccggcggcgaggagctgagcagactgctgctggacgacctggtgcccaccagcagactggagctgctgttcggcatgaccccctgcctgctggccctgcaggccgccagaagaagcgtggccagactgctgctgcaggccggcaaggccggcctgcagggcaagagagccgagctgctgagaatggccgaggccagagacatccccgtgctgagacccagaagacagaagctggacaccatgtgcagataccaggtgcaccagggcgtgtgcatggaggtgagccccctgagacccagaccctggagagaggccggcgaggccagccccggcgacgacccccagcagctgtggctggtgctggacggcatccaggaccccagaaacttcggcgccgtgctgagaagcgcccacttcctgggcgtggacaaggtgatcaccagcagaagaaacagctgccccctgacccccgtggtgagcaagagcagcgccggcgccatggaggtgatggacgtgttcagcaccgacgacctgaccggcttcctgcagaccaaggcccagcagggctggctggtggccggcaccgtgggctgccccagcaccgaggacccccagagcagcgagatccccatcatgagctgcctggagttcctgtgggagagacccaccctgctggtgctgggcaacgagggcagcggcctgagccaggaggtgcaggccagctgccagctgctgctgaccatcctgcccagaagacagctgccccccggcctggagagcctgaacgtgagcgtggccgccggcatcctgctgcacagcatctgcagccagagaaagggcttccccaccgagggcgagagaagacagctgctgcaggacccccaggagcccagcgccagaagcgagggcctgagcatggcccagcaccccggcctgagcagcggccccgagaaggagagacagaacgagggctag

SEQ ID NO: 217210 - DNA, 1062 bp, Artificial Sequence
  derived and/or modified sequence
atggcgcttctcagcactgtccggggtgccacctggggccgacttgtgactcgtcatttctcccatgccgcgaggcatggagaacgccccggcggggaggagctgtcaaggctgcttctggacgacctggtgcctaccagccgtctcgaacttcttttcggtatgaccccttgtctgctggcccttcaagctgctagacgtagcgttgcccggcttctactgcaagcaggcaaggcagggctgcagggtaaaagagctgagctcctgaggatggctgaggccagagacattcccgtactgcgcccgcgtcggcagaagctggacaccatgtgcagataccaggtccatcagggagtgtgtatggaggtgagccctctccgacccagaccttggcgagaggctggggaggcctcacccggggacgatcctcagcagctgtggctcgtgcttgacggcatccaggacccaaggaatttcggggccgtcctgcgcagcgcacactttctcggggtggacaaagtaatcacgtccaggcgcaactcttgcccactgacacccgttgtgagcaaaagctccgccggtgctatggaggtcatggacgttttttctactgacgatctgaccggtttcctccagaccaaggcccaacaaggctggctcgtggcaggcacagtcggctgcccatctacagaggatccccagagttctgagattcctattatgagttgcctggagttcctctgggaacgaccgacattgctagtcttgggcaatgaaggctcaggactgtcacaggaggttcaggcgtcctgccaactgctgctgacaattctgcccagacgccagttgcctcctggactagagagcctgaacgtcagtgtggcggctggtatcctgctccattccatctgctcccaaaggaagggcttccctaccgagggcgagcggcgacagttgctgcaggatccccaggagccaagcgctaggagcgaaggcctgtccatggcacagcatcccggcctctcttctggccctgaaaaggagcggcagaatgaaggctag

SEQ ID NO: 217211 - DNA, 1062 bp, Artificial Sequence
  derived and/or modified sequence
atggccctgctgagcacagtgcggggggccacctggggccgcctggtgaccaggcacttcagccatgctgcccggcacggggagaggcctggaggagaggagctgagccggctgctgctggatgacctggtgcccaccagccggctggagctgctgtttggcatgaccccctgcctgctggccctgcaggccgcccggcgctctgtggcccggctgctgctgcaggccggcaaggccggcctgcagggcaagagagctgagctgctgaggatggccgaggcccgggacatccctgtgctgcggccccggcggcagaagctggacaccatgtgccgctaccaggtgcaccagggcgtgtgcatggaggtgagccccctgcggccccggccctggagggaggccggggaggccagccctggagatgacccccagcagctgtggctggtgctggatggcatccaggaccccaggaactttggagctgtgctgcggagcgcccacttcctgggcgtggacaaggtgatcaccagcagaagaaacagctgccccctgacccctgtggtgtccaagagcagcgctggggccatggaggtgatggatgtgttcagcacagatgacctgaccggcttcctgcagaccaaggcccagcagggctggctggtggccggcaccgtgggctgccccagcacagaggacccccagagcagcgagatccccatcatgagctgcctggagttcctgtgggagcggcccaccctgctggtgctgggcaatgaaggcagcggcctgagccaggaggtgcaggccagctgccagctgctgctgaccatcctgccccggcggcagctgcccccaggcctggagagcctgaatgtgtctgtggccgccggcatcctgctgcacagcatctgcagccagaggaagggcttccccacagaaggagagcggcggcagctgctgcaggacccccaggagcccagcgcccggtctgagggcctgtccatggcccagcaccctggcctgagcagcggccctgagaaggagcggcagaatgaaggatag

SEQ ID NO: 217212 - DNA, 1847 bp, Artificial Sequence
  derived and/or modified sequence
ggcgggctcccgaacccggaagcgagggacccacgtgggagcctgggagcgggtggtcgtagctcggtagtccagttgtgggtaatcggggctgtttgttcctgtccgagagagctcggcggagacggctgtcgagtacccttcacctcggtgttgggagcctgggagcgaactgcggcgcgggttaccgctcccggggacgcagcaaggggcatcgagtccctggcgggagctgcgccatggcattgctctcgaccgtccggggcgcgacctggggtcgcctcgtcacccgtcatttctcccatgcagcgcggcatggggagcggcctggtggggaggagctaagccgcttgctgctggatgacctggtgccgacctctcggctggagcttctgtttggcatgaccccgtgtctcctggctctgcaggccgcccgccgctctgtggcccggctcctgctccaggcgggtaaagctgggctgcaggggaagcgggccgagctgctccggatggccgaggcgcgggacattccagttctgcggcccagacggcagaaactggacacaatgtgccgctaccaggtccaccagggtgtctgcatggaggtgagcccgctgcggccccggccttggagagaggccggggaggcgagcccaggcgacgacccccagcagttgtggctcgtcctcgatgggatccaggatccccggaattttggggctgtgctgcgttccgcacacttcctcggagtggataaggtcatcaccagccggagaaacagctgcccgctcactccagtagtcagcaagtccagcgcgggggctatggaggtgatggacgtgttctccactgatgacctcaccggatttttacagaccaaagcccagcagggctggctcgtggccggcacggtgggctgcccaagcacagaggatccccagtcctccgagatccccatcatgagttgcttggagttcctctgggaacggcctactctccttgtgctggggaatgagggctcaggtctatcccaggaggtgcaggcctcctgccagcttctcctcaccatcctgccccggcgccagctgcctcctggacttgagtccttgaacgtctctgtggctgcaggaattcttcttcactccatttgcagccagaggaagggtttccccacagagggggagagaaggcagcttctccaagacccccaagaaccctcagccaggtctgaagggctcagcatggctcagcacccagggctgtcttcaggcccagagaaagagaggcaaaatgagggctgacgtggactgtccacagtgttcatgtgctggagtcagggacggccgcacctgcctccgccggctccagtgtgcggggagcctctgcctgagtgtgcaccaggcccatgtttattgaccacagtctgagggggggggaaggggactgcggtggacaccagaggaagctgtttcctgttgtgatgttggacctgtagtaggacatggtgatttgttaatttccatgggaagccatgatggcctagcatggagggaatctgttcccaggccctgcctggaagttgagggaaagtttagacatctgcagagaggcaggcagcccagcccaggggacccgttcctcttgaaccagtcattgcctgtggcaaatgtgtgtatgagaatgtggggggtggagggcggggccctgatgtggagtagacagtgcgcacctcaggcccacacacggccccgccctggggccttgagcgcaggcctcatctttctgtgccgcgggactctgcacctacctcacagggttgttgtgaggctcaaataaaacatcactca

SEQ ID NO: 217213 - DNA, 1062 bp, Artificial Sequence
  derived and/or modified sequence
atggccctgctgagcaccgtgcggggcgccacctggggccggctggtgacccggcattttagtcacgcagccagacacggtgagcgccctgggggtgaggagctgtcccggctcctcctagacgatcttgtaccgacatcccggctggaattgctctttgggatgacaccatgcctattggcccttcaggctgcacgccggagcgttgcacgcctgctgctgcaggctggaaaggcgggcctccagggaaaacgtgccgaactgttgcgtatggctgaagctcgggacattcccgttctcaggcctagacggcagaagttagataccatgtgtagataccaggtccatcagggcgtctgtatggaagtctctccactccgaccacgaccctggcgagaagctggggaagcctccccaggtgatgaccctcaacagctttggttggtgctcgatggcatccaagaccctaggaacttcggagccgtcctaagatccgctcactttctgggggtagacaaagtgatcacttcacgcaggaattcttgtccgctgacccccgtcgtgtctaaaagctcagctggagcaatggaagtgatggatgtgtttagcaccgatgatcttaccggtttcctccagacgaaggcccagcagggatggctggtcgccggcaccgtggggtgtcctagcacggaagacccccagtcgtctgagatccccattatgtcctgtcttgaattcctctgggaaagacctaccctccttgtgctgggaaatgaaggatctggcctctcccaggaagtgcaggccagctgtcaactcctcctgaccatcctccctcggcgccagttgccccccggcctggagagcctgaatgtctcagtagccgcgggcatcctgctacactctatatgctcacagcgcaaggggttcccgacagagggtgaaaggcgccagcttctgcaggaccctcaggaaccctctgccaggtctgaaggactaagcatggcacagcaccctggccttagttccggtcccgaaaaagagcgtcaaaacgaaggatag

SEQ ID NO: 217214 - DNA, 1062 bp, Artificial Sequence
  derived and/or modified sequence
atggccctgctgtcaacagtgcggggagctacgtggggaaggttggtgacgcggcacttctcccacgcggctagacacggtgaaaggcctggaggtgaggaactgagccggctccttctggatgatttggtgcccacctctaggttggagcttttgtttggaatgaccccctgtctgttggcgctccaggccgctcgcagatctgtagcccgtctgctcctgcaggccggtaaagcaggcctccagggaaagcgggctgaactgctcagaatggccgaagctagagatatacccgtgctgagacctcggcgacaaaagcttgacacgatgtgcagataccaggtccaccagggcgtttgcatggaagtcagccccttaagacccagaccatggcgcgaagctggtgaagccagcccgggagatgacccccagcagctgtggctagtcttggacgggatccaggacccgcgaaattttggggctgtgctccggagtgcacatttcctgggtgttgataaggtgattacgtctagacgcaatagttgtcctctgacacccgtagtatccaagagcagtgccggtgcgatggaggttatggacgtattctccacagatgacctaacaggatttttgcagaccaaggcccagcagggttggctggtggcaggaacagtgggatgcccctcgacagaagatccgcagtcttctgaaatccctatcatgtcttgcctggagttcttgtgggaacggcctacgctgctagtcttagggaacgaagggagcggactttctcaggaggtgcaggccagttgtcagcttctgctgaccatccttccccgtagacagcttcctccagggctggaatctctcaacgtgtccgtggcagcgggaattctcctccatagtatctgtagccagcgcaagggatttcccaccgaaggcgaaaggcggcagctgctccaagacccgcaggaaccatctgcccgttccgaaggcttatctatggcccaacatcccggactatcctctggccctgagaaggagagacagaatgagggctag

SEQ ID NO: 217215 - protein, 305 aa, Artificial Sequence
  derived and/or modified sequence
MSVDPACPQSLPCFEASDCKESSPMPVICGPEENYPSLQMSSAEMPHTETVSPLPSSMDLLIQDSPDSSTSPKGKQPTSAEKSVAKKEDKVPVKKQKTRTVFSSTQLCVLNDRFQRQKYLSLQQMQELSNILNLSYKQVKTWFQNQRMKSKRWQKNNWPKNSNGVTQKASAPTYPSLYSSYHQGCLVNPTGNLPMWSNQTWNNSTWSNQTQNIQSWSNHSWNTQTWCTQSWNNQAWNSPFYNCGEESLQSCMQFQPNSPASDLEAALEAAGEGLNVIQQTTRYFSTPQTMDLFLNYSMNMQPEDV

SEQ ID NO: 217216 - DNA, 918 bp, Artificial Sequence
  derived and/or modified sequence
atgagcgtggaccccgcctgcccccagagcctgccctgcttcgaggccagcgactgcaaggagagcagccccatgcccgtgatctgcggccccgaggagaactaccccagcctgcagatgagcagcgccgagatgccccacaccgagaccgtgagccccctgcccagcagcatggacctgctgatccaggacagccccgacagcagcaccagccccaagggcaagcagcccaccagcgccgagaagagcgtggccaagaaggaggacaaggtgcccgtgaagaagcagaagaccagaaccgtgttcagcagcacccagctgtgcgtgctgaacgacagattccagagacagaagtacctgagcctgcagcagatgcaggagctgagcaacatcctgaacctgagctacaagcaggtgaagacctggttccagaaccagagaatgaagagcaagagatggcagaagaacaactggcccaagaacagcaacggcgtgacccagaaggccagcgcccccacctaccccagcctgtacagcagctaccaccagggctgcctggtgaaccccaccggcaacctgcccatgtggagcaaccagacctggaacaacagcacctggagcaaccagacccagaacatccagagctggagcaaccacagctggaacacccagacctggtgcacccagagctggaacaaccaggcctggaacagccccttctacaactgcggcgaggagagcctgcagagctgcatgcagttccagcccaacagccccgccagcgacctggaggccgccctggaggccgccggcgagggcctgaacgtgatccagcagaccaccagatacttcagcaccccccagaccatggacctgttcctgaactacagcatgaacatgcagcccgaggacgtgtag

SEQ ID NO: 217217 - DNA, 918 bp, Artificial Sequence
  derived and/or modified sequence
atgagtgttgaccccgcttgcccacaatcgctcccctgttttgaggcctccgactgcaaggagagcagtccaatgccagtcatttgcggtcctgaagaaaactatcctagcttgcaaatgtcttcggcagagatgcctcataccgaaactgtttcgcccctgccctcgagcatggaccttctaattcaggatagcccggatagtagcacctctccaaaaggcaaacagcccacaagcgcggagaaatccgttgcaaagaaagaggacaaagtccctgtaaaaaagcagaaaacccgcacagtgttttctagtactcagttatgtgtactgaatgataggttccagaggcagaagtacctcagccttcagcagatgcaggaactgtccaacattctcaatttgtcatataagcaggtgaaaacatggtttcagaaccagaggatgaaaagcaaacggtggcaaaaaaacaactggccgaagaatagcaacggagtcactcagaaggcttctgctcctacttacccatccttatactccagctatcaccagggctgcctggtgaatccaaccggcaatttgcctatgtggtcaaaccagacttggaacaactccacctggagtaatcaaactcaaaacatccaatcatggtccaaccattcatggaatactcagacctggtgtacccagtcgtggaacaaccaggcctggaattctcccttctacaactgcggcgaggagagtttgcaatcctgcatgcaattccagcctaatagccccgcctccgaccttgaagccgccctggaagccgcgggagaagggctgaatgtcatccagcaaaccactaggtatttctctacaccccaaacgatggatcttttcctgaattactctatgaatatgcagcctgaggacgtctag

SEQ ID NO: 217218 - DNA, 918 bp, Artificial Sequence
  derived and/or modified sequence
atgtctgtggaccctgcctgcccccagagcctgccctgctttgaggccagtgactgcaaggagagcagccccatgcctgtgatctgtggccctgaggagaactaccccagcctgcagatgagcagcgctgagatgccccacacagagaccgtgagccccctgcccagctccatggacctgctgatccaggacagcccagacagcagcaccagccccaagggcaagcagcccaccagcgctgagaagtctgtggccaagaaggaggacaaggtgcctgtgaagaagcagaagaccaggacagtgttcagcagcacccagctgtgtgtgctgaatgaccgcttccagaggcagaagtacctgagcctgcagcagatgcaggagctgagcaacatcctgaacctgagctacaagcaggtgaagacctggttccagaaccagaggatgaagagcaagcgctggcagaagaacaactggcccaagaacagcaatggagtgacccagaaggccagcgcccccacctaccccagcctgtacagcagctaccaccagggctgcctggtgaaccccaccggcaacctgcccatgtggagcaaccagacctggaacaacagcacctggagcaaccagacccagaacatccagagctggagcaaccacagctggaacacccagacctggtgcacccagagctggaacaaccaggcctggaacagccccttctacaactgtggggaggagagcctgcagagctgcatgcagttccagcccaacagccctgccagtgacctggaggccgccctggaggccgccggggagggcctgaatgtcatccagcagaccacccgctacttcagcaccccccagaccatggacctcttcctgaactacagcatgaacatgcagccagaagatgtgtag

SEQ ID NO: 217219 - DNA, 918 bp, Artificial Sequence
  derived and/or modified sequence
atgagcgtggaccccgcctgcccccagagcctgccctgcttcgaggcctctgattgtaaggagagtagccctatgcctgttatctgcggacctgaagaaaactacccttccttacagatgagcagtgctgaaatgccacataccgaaacagtgtcccctctcccaagctctatggatctcctgattcaagattcacctgattcctcaacctccccaaaagggaagcaaccaacttcagcagagaaaagcgtggccaagaaggaggacaaagttccagtgaagaaacagaagacaagaacggtgttctcaagcactcagctttgtgtcctcaacgataggttccagagacagaagtacctctccctgcagcagatgcaggaactgagcaatatcctcaacttgagctataaacaggttaagacgtggttccaaaatcagcggatgaagtccaaaagatggcagaaaaacaattggcccaagaactccaacggcgttacccaaaaagccagcgcaccaacgtatccctccctgtattcctcttatcatcagggctgcctggtcaaccctaccgggaacctcccgatgtggtccaatcagacttggaataatagtacctggtcaaaccagacccagaacatccagtcatggtcaaaccactcctggaatacccagacctggtgtacccaaagctggaataatcaggcgtggaacagcccattttacaactgtggtgaggaatcattgcagtcctgtatgcaatttcagcctaattctccggcttctgatctcgaagctgctctggaggcagctggggaaggactcaatgtgatccagcagactactagatacttttctacaccacagaccatggacctttttctgaactatagcatgaacatgcaacccgaggatgtctag

SEQ ID NO: 217220 - DNA, 918 bp, Artificial Sequence
  derived and/or modified sequence
atgtcagtggatccagcatgtcctcagtccctcccatgcttcgaagccagcgactgtaaggagtctagtccaatgcccgtgatctgcggtccggaggaaaattatcctagcctgcaaatgagcagcgctgaaatgccccatactgagactgtcagtccacttccatcgagtatggacctgctcatccaagactctcctgatagctctacgtctccgaagggaaaacagcctacttcagccgagaagagcgtggccaaaaaggaggacaaggtgcccgttaagaagcagaaaacacgaaccgttttcagctccactcagttgtgtgtcctgaacgaccgctttcaacgacagaagtatctctcactccagcagatgcaggaactgagtaacatcctgaacctgtcatacaagcaggtgaaaacctggtttcagaatcagcggatgaagtccaagcgttggcagaagaacaactggcccaagaactctaacggtgtcactcagaaggcctccgctccaacgtatcccagtctctatagctcataccaccagggatgcctggtgaaccctaccgggaatctcccaatgtggagtaaccagacctggaacaactcgacttggagcaaccagacccagaacatacagtcatggtcgaatcacagctggaacacacaaacatggtgcacgcagtcttggaataaccaagcgtggaacagcccattctacaactgtggcgaagagtccctccagagctgtatgcagtttcagcctaatagcccggcttcggatcttgaggccgcactcgaggcggctggagaaggtcttaacgtgattcagcagacaacccggtacttcagcactccacaaactatggacctgttcctgaactactccatgaacatgcagcctgaagatgtatag

SEQ ID NO: 217221 - DNA, 70 bp, Artificial Sequence
  derived and/or modified sequence
aatggaatcatcagtaatggaatggaaaggaatggaaaggactggaatggaatggaatggaatggaatgg

SEQ ID NO: 217222 - DNA, 84 bp, Artificial Sequence
  derived and/or modified sequence
aaacaatggaagataatggaaagatatcgaatggaatagaatggaatggaatggactcaaatggaatggactttaatggaatgg

SEQ ID NO: 217223 - DNA, 96 bp, Artificial Sequence
  derived and/or modified sequence
caacccgagtggaataaaatggaatggaatggaatgaaatggaatggatcggaatggaatccaatggaatcaactggaatggaatggaatggaatg

SEQ ID NO: 217224 - DNA, 71 bp, Artificial Sequence
  derived and/or modified sequence
gaatgatacggaatacaatggaatggaacgaaatgaaatggaatggaatggaatggaatggaatggaatgg

SEQ ID NO: 217225 - DNA, 72 bp, Artificial Sequence
  derived and/or modified sequence
atggaattcaatggaatggacatgaatggaatggacttcaatggaatggtatcaaatggaatggaattcagt

SEQ ID NO: 217226 - DNA, 99 bp, Artificial Sequence
  derived and/or modified sequence
atcaaaaggaacggaatggaatggaatggaatggaatggaatggaatggaatggaatgaaatcaacccgaatggaatggattggcatagagtggaatgg

SEQ ID NO: 217227 - DNA, 80 bp, Artificial Sequence
  derived and/or modified sequence
gaatggaattgaaaggaatggaatgcaatggaatggaatgggatggaatggaatgcaatggaatcaactcgattgcaatg

SEQ ID NO: 217228 - DNA, 2101 bp, Artificial Sequence
  derived and/or modified sequence
ttcattataaatctagagactccaggattttaacgttctgctggactgagctggttgcctcatgttattatgcaggcaactcactttatcccaatttcttgatacttttccttctggaggtcctatttctctaacatcttccagaaaagtcttaaagctgccttaaccttttttccagtccacctcttaaattttttcctcctcttcctctatactaacatgagtgtggatccagcttgtccccaaagcttgccttgctttgaagcatccgactgtaaagaatcttcacctatgcctgtgatttgtgggcctgaagaaaactatccatccttgcaaatgtcttctgctgagatgcctcacacggagactgtctctcctcttccttcctccatggatctgcttattcaggacagccctgattcttccaccagtcccaaaggcaaacaacccacttctgcagagaagagtgtcgcaaaaaaggaagacaaggtcccggtcaagaaacagaagaccagaactgtgttctcttccacccagctgtgtgtactcaatgatagatttcagagacagaaatacctcagcctccagcagatgcaagaactctccaacatcctgaacctcagctacaaacaggtgaagacctggttccagaaccagagaatgaaatctaagaggtggcagaaaaacaactggccgaagaatagcaatggtgtgacgcagaaggcctcagcacctacctaccccagcctttactcttcctaccaccagggatgcctggtgaacccgactgggaaccttccaatgtggagcaaccagacctggaacaattcaacctggagcaaccagacccagaacatccagtcctggagcaaccactcctggaacactcagacctggtgcacccaatcctggaacaatcaggcctggaacagtcccttctataactgtggagaggaatctctgcagtcctgcatgcagttccagccaaattctcctgccagtgacttggaggctgccttggaagctgctggggaaggccttaatgtaatacagcagaccactaggtattttagtactccacaaaccatggatttattcctaaactactccatgaacatgcaacctgaagacgtgtgaagatgagtgaaactgatattactcaatttcagtctggacactggctgaatccttcctctcccctcctcccatccctcataggatttttcttgtttggaaaccacgtgttctggtttccatgatgcccatccagtcaatctcatggagggtggagtatggttggagcctaatcagcgaggtttctttttttttttttttcctattggatcttcctggagaaaatactttttttttttttttttttgaaacggagtcttgctctgtcgcccaggctggagtgcagtggcgcggtcttggctcactgcaagctccgtctcccgggttcacgccattctcctgcctcagcctcccgagcagctgggactacaggcgcccgccacctcgcccggctaatattttgtatttttagtagagacggggtttcactgtgttagccaggatggtctcgatctcctgaccttgtgatccacccgcctcggcctccctaacagctgggatttacaggcgtgagccaccgcgccctgcctagaaaagacattttaataaccttggctgccgtctctggctatagataagtagatctaatactagtttggatatctttagggtttagaatctaacctcaagaataagaaatacaagtacaaattggtgatgaagatgtattcgtattgtttgggattgggaggctttgcttattttttaaaaactattgaggtaaagggttaagctgtaacatacttaattgatttcttaccgtttttggctctgttttgctatatcccctaatttgttggttgtgctaatctttgtagaaagaggtctcgtatttgctgcatcgtaatgacatgagtactgctttagttggtttaagttcaaatgaatgaaacaactatttttcctttagttgattttaccctgatttcaccgagtgtttcaatgagtaaatatacagcttaaacat

SEQ ID NO: 217229 - protein, 1822 aa, Artificial Sequence
  derived and/or modified sequence
MSEILCQWLNKELKVSRTVSPKSFAKAFSSGYLLGEVLHKFELQDDFSEFLDSRVSSAKLNNFSRLEPTLNLLGVQFDQNVAHGIITEKPGVATKLLYQLYIALQKKKKSGLTGVEMQTMQRLTNLRLQNMKSDTFQERLRHMIPRQTDFNLMRITYRFQEKYKHVKEDLAHLHFEKLERFQKLKEEQRCFDIEKQYLNRRRQNEIMAKIQAAIIQIPKPASNRTLKALEAQKMMKKKKEAEDVADEIKKFEALIKKDLQAKESASKTSLDTAGQTTTDLLNTYSDDEYIKKIQKRLEEDAFAREQREKRRRKLLMDQLIAHEAQEEAYREEQLINRLMRQSQQERRIAVQLMHVRHEKEVLWQNRIFREKQHEERRLKDFQDALDREAALAKQAKIDFEEQFLKEKRFHDQIAVERAQARYEKHYSVCAEILDQIVDLSTKVADYRMLTNNLIPYKLMHDWKELFFNAKPIYEQASVKTLPANPSREQLTELEKRDLLDTNDYEEYKNMVGEWALPEEMVDNLPPSNNCILGHILHRLAEKSLPPRAESTTPELPSFAVKGCLLGKTLSGKTTILRSLQKDFPIQILSIDTLVQEAIQAFHDNEKVSEVLPIQKNDEEDALPVLQEEIKESQDPQHVFSAGPVSDEVLPETEGETMLSANADKTPKAEEVKSSDSFLKLTTRAQLGAKSEQLLKKGKSIPDVLLVDIIVNAINEIPVNQDCILDGFPMTLNQAQLLEEALTGCNRNLTEVERKKAQKSTLAIDPATSKEIPLPSPAFDFVILLDVSDTSSMSRMNDIIAEELSYKTAHEDISQRVAAENQDKDGDQNLRDQIQHRIIGFLDNWPLLEQWFSEPENILIKINAEIDKESLCEKVKEILTTEIAKKKNKVEKKLEEKEAEKKAAASLAELPLPTPPPAPPPEPEKEKEIHQSHVASKTPTAKGKPQSEAPHGKQESLQEGKGKKGETALKRKGSPKGKSSGGKVPVKKSPADSTDTSPVAIVPQPPKPGSEEWVYVNEPVPEEMPLFLVPYWELIENSYINTIKTVLRHLREDQHTVLAYLYEIRTSFQEFLKRPDHKQDFVAQWQADFNSLPDDLWDDEETKAELHQRVNDLRDRLWDICDARKEEAEQERLDIINESWLQDTLGMTMNHFFSLMQAELNRFQDTKRLLQDYYWGMESKIPVEDNKRFTRIPLVQLDSKDNSESQLRIPLVPRISISLETVTPKPKTKSVLKGKMDNSLENVESNFEADEKLVMDTWQQASLAVSHMVAAEIHQRLMEEEKENQPADPKEKSPQMGANKKVKKEPPKKKQEDKKPKGKSPPMAEATPVIVTTEEIAEIKRKNELRVKIKEEHLAALQFEEIATQFRLELIKTKALALLEDLVTKVVDVYKLMEKWLGERYLNEMASTEKLTDVARYHIETSTKIQNELYLSQEDFFINGNIKVFPDPPPSIRPPPVEKEEDGTLTIEQLDSLRDQFLDMAPKGIIGNKAFTDILIDLVTLNLGTNNFPSNWMHLTQPELQELTSLLTVNSEFVDWRKFLLVTSMPWPIPLEEELLETLQKFKAVDKEQLGTITFEQYMQAGLWFTGDEDIKIPENPLEPLPFNRQEHLIEFFFRLFADYEKDPPQLDYTQMLLYFACHPDTVEGVYRALSVAVGTHVFQQVKASIPSAEKTSSTDAGPAEEFPEPEENAAREERKLKDDTEKREQKDEEIPENANNEKMSMETLLKVFKGGSEAQDSNRFASHLKIENIYAEGFIKTFQDLGAKNLEPIEVAVLLKHPFIQDLISNYSDYKFPDIKIILQRSEHVQGSDGERSPSRHTEEKK

SEQ ID NO: 217230 - DNA, 5469 bp, Artificial Sequence
  derived and/or modified sequence
atgagcgagatcctgtgccagtggctgaacaaggagctgaaggtgagcagaaccgtgagccccaagagcttcgccaaggccttcagcagcggctacctgctgggcgaggtgctgcacaagttcgagctgcaggacgacttcagcgagttcctggacagcagagtgagcagcgccaagctgaacaacttcagcagactggagcccaccctgaacctgctgggcgtgcagttcgaccagaacgtggcccacggcatcatcaccgagaagcccggcgtggccaccaagctgctgtaccagctgtacatcgccctgcagaagaagaagaagagcggcctgaccggcgtggagatgcagaccatgcagagactgaccaacctgagactgcagaacatgaagagcgacaccttccaggagagactgagacacatgatccccagacagaccgacttcaacctgatgagaatcacctacagattccaggagaagtacaagcacgtgaaggaggacctggcccacctgcacttcgagaagctggagagattccagaagctgaaggaggagcagagatgcttcgacatcgagaagcagtacctgaacagaagaagacagaacgagatcatggccaagatccaggccgccatcatccagatccccaagcccgccagcaacagaaccctgaaggccctggaggcccagaagatgatgaagaagaagaaggaggccgaggacgtggccgacgagatcaagaagttcgaggccctgatcaagaaggacctgcaggccaaggagagcgccagcaagaccagcctggacaccgccggccagaccaccaccgacctgctgaacacctacagcgacgacgagtacatcaagaagatccagaagagactggaggaggacgccttcgccagagagcagagagagaagagaagaagaaagctgctgatggaccagctgatcgcccacgaggcccaggaggaggcctacagagaggagcagctgatcaacagactgatgagacagagccagcaggagagaagaatcgccgtgcagctgatgcacgtgagacacgagaaggaggtgctgtggcagaacagaatcttcagagagaagcagcacgaggagagaagactgaaggacttccaggacgccctggacagagaggccgccctggccaagcaggccaagatcgacttcgaggagcagttcctgaaggagaagagattccacgaccagatcgccgtggagagagcccaggccagatacgagaagcactacagcgtgtgcgccgagatcctggaccagatcgtggacctgagcaccaaggtggccgactacagaatgctgaccaacaacctgatcccctacaagctgatgcacgactggaaggagctgttcttcaacgccaagcccatctacgagcaggccagcgtgaagaccctgcccgccaaccccagcagagagcagctgaccgagctggagaagagagacctgctggacaccaacgactacgaggagtacaagaacatggtgggcgagtgggccctgcccgaggagatggtggacaacctgccccccagcaacaactgcatcctgggccacatcctgcacagactggccgagaagagcctgccccccagagccgagagcaccacccccgagctgcccagcttcgccgtgaagggctgcctgctgggcaagaccctgagcggcaagaccaccatcctgagaagcctgcagaaggacttccccatccagatcctgagcatcgacaccctggtgcaggaggccatccaggccttccacgacaacgagaaggtgagcgaggtgctgcccatccagaagaacgacgaggaggacgccctgcccgtgctgcaggaggagatcaaggagagccaggacccccagcacgtgttcagcgccggccccgtgagcgacgaggtgctgcccgagaccgagggcgagaccatgctgagcgccaacgccgacaagacccccaaggccgaggaggtgaagagcagcgacagcttcctgaagctgaccaccagagcccagctgggcgccaagagcgagcagctgctgaagaagggcaagagcatccccgacgtgctgctggtggacatcatcgtgaacgccatcaacgagatccccgtgaaccaggactgcatcctggacggcttccccatgaccctgaaccaggcccagctgctggaggaggccctgaccggctgcaacagaaacctgaccgaggtggagagaaagaaggcccagaagagcaccctggccatcgaccccgccaccagcaaggagatccccctgcccagccccgccttcgacttcgtgatcctgctggacgtgagcgacaccagcagcatgagcagaatgaacgacatcatcgccgaggagctgagctacaagaccgcccacgaggacatcagccagagagtggccgccgagaaccaggacaaggacggcgaccagaacctgagagaccagatccagcacagaatcatcggcttcctggacaactggcccctgctggagcagtggttcagcgagcccgagaacatcctgatcaagatcaacgccgagatcgacaaggagagcctgtgcgagaaggtgaaggagatcctgaccaccgagatcgccaagaagaagaacaaggtggagaagaagctggaggagaaggaggccgagaagaaggccgccgccagcctggccgagctgcccctgcccacccccccccccgcccccccccccgagcccgagaaggagaaggagatccaccagagccacgtggccagcaagacccccaccgccaagggcaagccccagagcgaggccccccacggcaagcaggagagcctgcaggagggcaagggcaagaagggcgagaccgccctgaagagaaagggcagccccaagggcaagagcagcggcggcaaggtgcccgtgaagaagagccccgccgacagcaccgacaccagccccgtggccatcgtgccccagccccccaagcccggcagcgaggagtgggtgtacgtgaacgagcccgtgcccgaggagatgcccctgttcctggtgccctactgggagctgatcgagaacagctacatcaacaccatcaagaccgtgctgagacacctgagagaggaccagcacaccgtgctggcctacctgtacgagatcagaaccagcttccaggagttcctgaagagacccgaccacaagcaggacttcgtggcccagtggcaggccgacttcaacagcctgcccgacgacctgtgggacgacgaggagaccaaggccgagctgcaccagagagtgaacgacctgagagacagactgtgggacatctgcgacgccagaaaggaggaggccgagcaggagagactggacatcatcaacgagagctggctgcaggacaccctgggcatgaccatgaaccacttcttcagcctgatgcaggccgagctgaacagattccaggacaccaagagactgctgcaggactactactggggcatggagagcaagatccccgtggaggacaacaagagattcaccagaatccccctggtgcagctggacagcaaggacaacagcgagagccagctgagaatccccctggtgcccagaatcagcatcagcctggagaccgtgacccccaagcccaagaccaagagcgtgctgaagggcaagatggacaacagcctggagaacgtggagagcaacttcgaggccgacgagaagctggtgatggacacctggcagcaggccagcctggccgtgagccacatggtggccgccgagatccaccagagactgatggaggaggagaaggagaaccagcccgccgaccccaaggagaagagcccccagatgggcgccaacaagaaggtgaagaaggagccccccaagaagaagcaggaggacaagaagcccaagggcaagagcccccccatggccgaggccacccccgtgatcgtgaccaccgaggagatcgccgagatcaagagaaagaacgagctgagagtgaagatcaaggaggagcacctggccgccctgcagttcgaggagatcgccacccagttcagactggagctgatcaagaccaaggccctggccctgctggaggacctggtgaccaaggtggtggacgtgtacaagctgatggagaagtggctgggcgagagatacctgaacgagatggccagcaccgagaagctgaccgacgtggccagataccacatcgagaccagcaccaagatccagaacgagctgtacctgagccaggaggacttcttcatcaacggcaacatcaaggtgttccccgaccccccccccagcatcagacccccccccgtggagaaggaggaggacggcaccctgaccatcgagcagctggacagcctgagagaccagttcctggacatggcccccaagggcatcatcggcaacaaggccttcaccgacatcctgatcgacctggtgaccctgaacctgggcaccaacaacttccccagcaactggatgcacctgacccagcccgagctgcaggagctgaccagcctgctgaccgtgaacagcgagttcgtggactggagaaagttcctgctggtgaccagcatgccctggcccatccccctggaggaggagctgctggagaccctgcagaagttcaaggccgtggacaaggagcagctgggcaccatcaccttcgagcagtacatgcaggccggcctgtggttcaccggcgacgaggacatcaagatccccgagaaccccctggagcccctgcccttcaacagacaggagcacctgatcgagttcttcttcagactgttcgccgactacgagaaggaccccccccagctggactacacccagatgctgctgtacttcgcctgccaccccgacaccgtggagggcgtgtacagagccctgagcgtggccgtgggcacccacgtgttccagcaggtgaaggccagcatccccagcgccgagaagaccagcagcaccgacgccggccccgccgaggagttccccgagcccgaggagaacgccgccagagaggagagaaagctgaaggacgacaccgagaagagagagcagaaggacgaggagatccccgagaacgccaacaacgagaagatgagcatggagaccctgctgaaggtgttcaagggcggcagcgaggcccaggacagcaacagattcgccagccacctgaagatcgagaacatctacgccgagggcttcatcaagaccttccaggacctgggcgccaagaacctggagcccatcgaggtggccgtgctgctgaagcaccccttcatccaggacctgatcagcaactacagcgactacaagttccccgacatcaagatcatcctgcagagaagcgagcacgtgcagggcagcgacggcgagagaagccccagcagacacaccgaggagaagaagtag

SEQ ID NO: 217231 - DNA, 5469 bp, Artificial Sequence
  derived and/or modified sequence
atgtccgagattctgtgtcagtggctcaataaagagctgaaggtctcgcggacagtctccccaaaaagcttcgctaaggctttctcctctggttacctgctcggcgaagtgttgcacaaattcgagctgcaggacgattttagtgagttcctggattcacgagtctcaagtgccaaactgaacaactttagtcgcctcgagcctacgctcaacttattaggtgtccagttcgatcaaaatgttgctcatgggatcattaccgagaagcccggtgtcgctaccaagttgctgtaccagttgtacatcgccctgcaaaagaaaaagaaatctggacttaccggtgttgagatgcagacaatgcagaggctgactaatctgagactacagaacatgaaatcagacacatttcaagagcgactgcggcacatgataccaaggcaaaccgacttcaaccttatgagaatcacctacaggttccaagaaaagtacaagcacgttaaagaagatcttgctcacctgcactttgaaaaattagagcgattccagaaactgaaagaagaacaacgctgtttcgatattgagaagcagtacttgaatcggagacggcaaaacgagataatggcgaagatccaggccgcaataattcaaattcctaaacctgcctccaataggaccctgaaagctctggaggcacagaaaatgatgaagaaaaaaaaagaggctgaagatgtcgcagatgaaatcaagaaattcgaagccctaataaaaaaagacttacaggcaaaagagtcggcatctaaaactagccttgacaccgccggccagactactacggatctcctgaacacgtatagcgacgacgagtacatcaagaaaatccagaagcgcctggaggaagatgcattcgccagagagcagcgagagaagcggaggcgaaagctgttaatggaccaattgattgcccacgaagcccaggaggaagcctaccgggaagaacaactgatcaatcgcctgatgcgtcagtctcagcaggagcgtcgcatagccgtacaactgatgcatgtgagacatgagaaagaggtgctgtggcagaatagaatttttcgagagaagcagcatgaagaacggagactcaaagacttccaggatgctttggacagagaggccgcgctggccaaacaagcaaaaattgacttcgaagagcagtttcttaaggagaaacgcttccacgatcagatagctgtcgagagagcccaggcacggtacgaaaaacactactctgtgtgcgccgagattctggatcagatcgtcgacctgagcactaaagtggccgactacaggatgttgaccaacaacctgattccatataaattaatgcatgactggaaggaactattcttcaacgcgaagcccatctatgagcaagcaagcgtcaagacgctccctgcaaatcccagtagagaacagttaacagaactggagaaacgcgatctactagatacaaacgattacgaggagtataagaatatggtcggcgaatgggcgctgcccgaggagatggtggataacctacccccgtcaaataattgtattctcgggcacatcctccacagactggccgagaaatctctgccacccagggcagagtcaacgacgccggagctaccttcctttgctgtaaagggctgccttctgggcaagaccctgtcaggcaagacaacaatactcagatccctccaaaaggacttccctattcagatcttatcgatcgacacactggtccaggaagcaatccaggcgtttcacgacaacgaaaaagtgagcgaggtcttgcccatccaaaaaaatgatgaggaggacgccctgccagtgctgcaggaggagattaaggaaagtcaagacccccagcatgtctttagcgctggcccagtctcagacgaagtgttgcctgagacagagggagagacgatgctctcagccaatgcagataagactcctaaagcagaagaggtgaaaagctcggattcctttctgaagctgacgacgagggcgcagttgggcgccaaaagtgagcagttactaaagaaaggaaaatctatcccagatgtcctgctcgtggatattatagtcaacgcgattaatgaaattccagtgaaccaagattgcatcctggacgggtttcctatgacactcaaccaggctcagctgctggaagaggccctgacgggctgtaatagaaacttgaccgaggtggagcgcaagaaggcccaaaaatccacactggcaatcgaccccgcaacgtctaaggagatcccactgccaagccctgcctttgatttcgtgattcttctggacgtctcagatacgagttctatgtctcggatgaacgatatcattgccgaggaattaagttataagactgctcacgaggacattagtcaacgtgtagctgctgagaaccaagataaggacggagatcagaacctgcgcgatcaaattcagcatcggatcatcggatttctcgataactggcccctcctcgaacaatggtttagcgaaccggaaaatatactgatcaagatcaacgccgagatagataaagagagcctttgcgagaaggtgaaggagatcctgaccacagagattgcaaagaagaagaacaaggtggagaagaagctggaggagaaggaggccgaaaaaaaggcggctgcttctctggctgagctccctttacctactccgccacctgctcctcctcccgagccagagaaagagaaagagattcatcagtcacatgtagcctccaagacgcccactgcaaagggaaagccacagagcgaagccccccatggcaagcaggagagcctgcaggagggcaaagggaaaaaaggggagaccgctctaaagcgaaaggggagccccaaagggaaaagctctggcggaaaggtccccgtcaagaaatctccggctgattccacagacaccagccctgttgccatcgttccacagcctcctaaacccggtagcgaggagtgggtatatgtgaatgaaccagttccagaggaaatgcctctgtttctcgtcccatactgggaactgattgagaatagttatatcaacaccatcaagactgttctgcgccacttgagggaggaccaacacacggtgctagcctacctgtacgagatcagaactagcttccaggagttccttaagaggcctgaccacaaacaggacttcgtcgcacagtggcaggccgattttaactctctgccagacgatctctgggatgacgaagagaccaaagcagagttgcatcagcgtgttaacgacctgcgagatcgcctttgggacatttgtgacgcgcggaaggaagaagctgaacaagaaaggttggatataattaacgaatcctggctccaggatacgctaggtatgacaatgaatcacttcttcagcctgatgcaagctgagctgaacagattccaggatacaaagaggctgcttcaggattattattgggggatggaatcaaagatccctgtggaggacaataaaaggtttaccaggattccattagtgcagctggactccaaagataacagtgagtcacagctcagaattccgttagtgcccaggatctcaatttccttagagaccgtaacccctaagcctaagacaaaatccgtcctgaagggtaaaatggacaattccctcgaaaatgtggaatccaatttcgaggccgacgagaaactggtgatggacacctggcagcaggcttcacttgcagtttctcacatggtcgccgctgaaatccaccaacgactcatggaagaagaaaaggagaaccaaccagccgaccccaaagagaaatccccccaaatgggtgccaacaaaaaagtcaagaaggagcctccgaaaaagaagcaagaggacaagaagcctaagggcaaatcaccccccatggccgaagcaactccagttattgtaactacagaagagatagccgaaatcaaacggaaaaacgagctgcgagtgaagatcaaggaagaacatctagcagcgctgcagtttgaagagatcgcaacccagttccgtttggaactcatcaaaaccaaggcccttgcattgctagaggacttagtgaccaaagtggtggatgtttacaaactgatggagaagtggttgggagaaaggtacctgaacgagatggcgtctactgaaaagctcactgacgtggcccgatatcacatagagacaagcaccaaaatccagaatgagctgtacttatctcaagaggacttttttattaacggcaacattaaggtgtttcctgatcctccccccagcatacggcctcccccggtcgaaaaggaggaagacggtaccctgaccattgagcagctggactctttacgagatcagttcctcgatatggcccctaaaggaattattggtaacaaagccttcacagacatccttatcgacttggttactctgaatcttggtaccaacaattttcctagcaattggatgcatcttacacaacccgaattacaagaacttacatcgctcctcacagtcaattctgagtttgttgattggcgtaaattccttctggtgacgtccatgccttggccaattccactcgaggaagagcttctcgagaccctccagaagttcaaagccgtggataaggagcaactgggcaccatcacgtttgaacagtatatgcaggcgggcctttggtttactggggatgaagacattaaaatcccggagaaccctttggagcccttgcctttcaacagacaagagcacctcatagaattcttcttcaggcttttcgcagattacgaaaaagatccgccccagctggactatacccagatgctcctgtatttcgcctgccaccctgacacagttgaaggcgtctatcgcgcactttccgtcgccgtgggtacacatgtgttccaacaggtcaaggccagtattccctcagctgaaaagacaagcagtacagacgccggccctgcagaggagtttcctgagccagaggaaaacgcggcacgggaggaaaggaaacttaaagacgataccgaaaagcgggaacagaaggacgaggagattcccgaaaacgccaataacgaaaagatgagcatggagacgttactgaaggtgttcaagggcggatcagaagcacaggactctaacagattcgctagccatctcaagattgagaacatttacgctgaaggctttattaaaacctttcaggacctgggcgccaaaaatctggagccaatcgaagtcgctgtattactcaaacacccttttatccaggatctgatctcgaactacagcgactataagtttcccgacatcaagatcatcctgcagcggagtgagcatgttcagggctcggacggggagagaagcccttctcggcataccgaagagaagaaatag

SEQ ID NO: 217232 - DNA, 5469 bp, Artificial Sequence
  derived and/or modified sequence
atgtctgagatcctgtgccagtggctgaacaaggagctgaaggtgtccaggacagtgagccccaagagctttgccaaggccttcagcagcggctacctgctgggggaggtgctgcacaagtttgagctgcaggatgacttcagcgagttcctggacagccgggtgtcctctgccaagctgaacaacttcagccggctggagcccaccctgaacctgctgggcgtgcagtttgaccagaatgtggcccacggcatcatcacagagaagccaggagtggccaccaagctgctgtaccagctgtacatcgccctgcagaagaagaagaagagcggcctgactggagtggagatgcagaccatgcagaggctgaccaacctgcggctgcagaacatgaagagtgacaccttccaggagcggctgcggcacatgatcccccggcagacagacttcaacctgatgaggatcacctaccgcttccaggagaagtacaagcacgtgaaggaggacctggcccacctgcactttgagaagctggagcgcttccagaagctgaaggaggagcagcgctgctttgatattgagaagcagtacctgaacagaagacggcagaatgagatcatggccaagatccaggccgccatcatccagatccccaagccagccagcaacagaaccctgaaggccctggaggcccagaagatgatgaagaagaagaaggaggccgaggatgtggctgatgagatcaagaagtttgaggccctgatcaagaaggacctgcaggccaaggagagcgccagcaagaccagcctggacacagctggccagaccaccacagacctgctgaacacctacagtgatgatgagtacatcaagaagatccagaagaggctggaggaggatgcctttgcccgggagcagcgggagaagagaagaaggaagctgctgatggaccagctgattgcccacgaggcccaggaggaggcctaccgggaggagcagctgatcaaccggctgatgaggcagagccagcaggagaggagaattgctgtgcagctgatgcacgtgagacatgagaaggaggtgctgtggcagaaccgcatcttccgggagaagcagcacgaggagcggcggctgaaggacttccaggatgccctggaccgggaggccgccctggccaagcaggccaagattgactttgaggagcagttcctgaaggagaagcgcttccatgaccagattgctgtggagcgggcccaggcccgctatgagaagcactacagcgtgtgtgccgagatcctggaccagatcgtggacctgagcaccaaggtggccgactacaggatgctgaccaacaacctgatcccctacaagctgatgcatgactggaaggagctgttcttcaatgccaagcccatctatgagcaggcctctgtgaagaccctgcctgccaaccccagccgggagcagctgacagagctggagaagagggacctgctggacaccaatgactatgaggagtacaagaacatggtgggggagtgggccctgcctgaggagatggtggacaacctgccccccagcaacaactgcatcctgggccacatcctgcaccggctggccgagaagagcctgccccccagggctgagagcaccaccccagagctgcccagctttgctgtgaagggctgcctgctgggcaagaccctgagcggcaagaccaccatcctgcggagcctgcagaaggacttccccatccagatcctgagcattgacaccctggtgcaggaggccatccaggccttccatgacaatgagaaggtgtctgaggtgctgcccatccagaagaatgatgaagaagatgccctgcctgtgctgcaggaggagatcaaggagagccaggacccccagcacgtgttttctgctggccctgtgtctgatgaggtgctgcctgagacagaaggagagaccatgctgagcgccaatgctgacaagacccccaaggccgaggaggtgaagagcagtgacagcttcctgaagctgaccacccgggcccagctgggcgccaagtctgagcagctgctgaagaagggcaagagcatcccagatgtgctgctggtggacatcatcgtgaatgccatcaatgagatccctgtgaaccaggactgcatcctggatggcttccccatgaccctgaaccaggcccagctgctggaggaggccctgaccggctgcaacagaaacctgacagaggtggagaggaagaaggcccagaagagcaccctggccattgatcctgccaccagcaaggagatccccctgcccagccctgcctttgattttgtgatcctgctggatgtgtctgacaccagctccatgagcaggatgaatgacatcatcgccgaggagctgagctacaagacagcccacgaggacatcagccagagggtggccgctgagaaccaggacaaggatggagaccagaacctgcgggaccagatccagcaccgcatcatcggcttcctggacaactggcccctgctggagcagtggttcagcgagcctgagaacatcctgatcaagatcaatgctgagattgacaaggagagcctgtgtgagaaggtgaaggagatcctgaccacagagatcgccaagaagaagaacaaggtggagaagaagctggaggagaaggaggccgagaagaaggctgctgccagcctggccgagctgcccctgcccaccccacctccagcccctcctcctgagcctgagaaggagaaggagatccaccagagccacgtggccagcaagacccccacagccaagggcaagccccagagcgaggccccccacggcaagcaggagagcctgcaggagggcaagggcaagaagggggagacagccctgaagaggaagggcagccccaagggcaagagcagcggcggcaaggtgcctgtgaagaagagccctgctgacagcacagacaccagccctgtggccatcgtgccccagccccccaagccaggcagcgaggagtgggtgtatgtgaatgaacctgtgcctgaggagatgcccctcttcctggtgccctactgggagctgattgaaaattcctacatcaacaccatcaagacagtgctgcggcacctgcgggaggaccagcacacagtgctggcctacctgtatgagatccgcaccagcttccaggagttcctgaagaggccagaccacaagcaggactttgtggcccagtggcaggccgacttcaacagcctgcctgatgacctgtgggatgatgaggagaccaaggccgagctgcaccagagggtgaatgacctgcgggaccggctgtgggacatctgtgatgccaggaaggaggaggccgagcaggagcggctggacatcatcaatgaatcctggctgcaggacaccctgggcatgaccatgaaccacttcttcagcctgatgcaggccgagctgaaccgcttccaggacaccaagaggctgctgcaggactactactggggcatggagagcaagatccctgtggaggacaacaagcgcttcacccgcatccccctggtgcagctggacagcaaggacaacagcgagagccagctgcgcatccccctggtgccccgcatcagcatcagcctggagaccgtgacccccaagcccaagaccaagtctgtgctgaagggcaagatggacaacagcctggagaatgtggagagcaactttgaagcagatgagaagctggtgatggacacctggcagcaggccagcctggccgtgagccacatggtggccgctgagatccaccagaggctgatggaggaggagaaggagaaccagcctgctgaccccaaggagaagagcccccagatgggcgccaacaagaaggtgaagaaggagccccccaagaagaagcaggaggacaagaagcccaagggcaagagcccccccatggccgaggccacccctgtgattgtgaccacagaggagattgctgagatcaagaggaagaatgagctgcgggtgaagatcaaggaggagcacctggccgccctgcagtttgaggagatcgccacccagttccggctggagctgatcaagaccaaggccctggccctgctggaggacctggtgaccaaggtggtggatgtgtacaagctgatggagaagtggctgggggagcgctacctgaatgagatggccagcacagagaagctgacagatgtggcccgctaccacatcgagaccagcaccaagatccagaatgagctgtacctgagccaggaggacttcttcatcaatggaaacatcaaggtgtttcctgaccccccacccagcatccggcccccacctgtggagaaggaggaggatggcaccctgaccatcgagcagctggacagcctgcgggaccagttcctggacatggcccccaagggcatcatcggcaacaaggccttcacagacatcctgattgacctggtgaccctgaacctgggcaccaacaacttccccagcaactggatgcacctgacccagcctgagctgcaggagctgaccagcctgctgactgtgaacagcgagtttgtggactggaggaagttcctgctggtgacctccatgccctggcccatccccctggaggaggagctgctggagaccctgcagaagttcaaggctgtggacaaggagcagctgggcaccatcacctttgagcagtacatgcaggccggcctgtggttcaccggagatgaggacatcaagatccctgagaaccccctggagcccctgcccttcaaccggcaggagcacctgattgagttcttcttccggctgtttgctgactatgagaaggaccccccccagctggactacacccagatgctgctgtactttgcctgccacccagacacagtggagggcgtgtaccgggccctgtctgtggccgtgggcacccacgtgttccagcaggtgaaggccagcatccccagcgctgagaagaccagcagcacagatgctggccctgctgaggagttccctgagccagaagaaaatgctgcccgggaggagaggaagctgaaggatgacacagagaagcgggagcagaaggatgaggagatcccagaaaatgccaacaatgagaagatgtccatggagaccctgctgaaggtgttcaagggcggcagcgaggcccaggacagcaacagatttgccagccacctgaagattgagaacatctatgcagagggcttcatcaagaccttccaggacctgggcgccaagaacctggagcccatcgaggtggccgtgctgctgaagcaccccttcatccaggacctgatcagcaactacagcgactacaagttcccagacatcaagatcatcctgcagaggtctgagcacgtgcagggcagtgatggagagaggagccccagccgccacacagaggagaagaagtag

SEQ ID NO: 217233 - DNA, 5469 bp, Artificial Sequence
  derived and/or modified sequence
atgagcgagatcctgtgccagtggctgaacaaggagctgaaggtgagccgcacagtatcgccaaagtcttttgcgaaagcctttagctctggctacctcctgggagaggtgttacacaagtttgaactgcaggatgacttttctgagttcttagactccagggtgagctccgcgaagctgaacaatttttctagactagaacccaccctgaatttgttgggcgtgcagtttgaccaaaatgtcgcacatggcataataaccgaaaagccaggagtggccaccaagctactctaccaactttacatcgctcttcagaagaagaagaaaagtggactgactggggtggagatgcaaaccatgcaacgcctaacgaatctgaggctgcagaacatgaaaagcgatacctttcaggagcgccttaggcacatgatcccaagacagacagactttaacctcatgcgcattacatacaggttccaagagaaatataaacatgtcaaggaagacctggcccacctacatttcgaaaaacttgaacgcttccaaaagctcaaagaagagcagcgctgctttgatatagaaaaacaatacctcaaccgccgtaggcaaaatgagatcatggccaaaatccaagccgccatcattcagatccccaagcccgcgtcaaaccgcactctgaaagcccttgaagctcaaaaaatgatgaaaaagaagaaggaggccgaggacgtggctgatgagattaagaaatttgaagccctgatcaaaaaggacctgcaagcaaaagaaagcgcgagcaagacctctcttgacaccgccggtcaaaccaccaccgacttactcaatacctacagcgatgatgagtatatcaagaagatccagaaaaggctggaggaggacgcgtttgcaagagaacagcgggagaagcggaggagaaagctgctcatggatcagttaattgcccatgaagctcaggaggaagcatacagggaggagcagctcataaatcgcctgatgagacagtctcagcaggaaaggcggattgctgtgcagctcatgcacgtgcgtcacgaaaaagaggttctgtggcagaatcgcattttcagagagaagcagcatgaagagagacggcttaaggacttccaggacgctctggatcgcgaggcagcactggctaaacaggcgaagatcgacttcgaggaacaattcctcaaggagaaacggttccacgatcaaatcgccgtagagcgagcgcaggcacgctatgaaaagcactacagcgtctgcgccgagattctcgaccagattgtggacctgtctacgaaggttgcagattacaggatgttgacaaacaacttgatcccctacaaactcatgcatgactggaaggaactgtttttcaacgccaagccaatctacgaacaggcgagcgtgaagacgctgccagccaacccctccagggagcaactgaccgaactcgagaaaagagatctcctcgataccaatgactacgaggaatacaaaaatatggtgggcgagtgggctctccctgaagagatggtggacaacctgccccctagcaacaattgcattctgggccacattctgcaccgactggccgagaagtctcttccaccacgcgcagagagtacaaccccagagcttccttcttttgccgtgaagggctgcctcctcgggaaaacactttccggcaagacgactattctgagaagtctgcaaaaggatttcccgatacagattttgtcaatagatacgctcgtgcaggaggcgatccaggccttccacgataacgagaaagtatccgaagtcctccccatacagaagaacgatgaggaagacgccctcccagtgttgcaggaggaaattaaggagtcccaggacccacagcacgtgttcagtgcgggtcctgtctctgacgaggtgttgcctgagactgaaggcgagaccatgttgtcagcaaacgccgataagacaccgaaggcagaggaggtgaaatcttccgattccttcttaaagctaaccacgagagcccaactgggcgcaaagtccgagcagctcctgaagaaaggcaagtcaattcctgacgttttactcgtggatattatcgtgaatgccatcaatgaaatccccgttaatcaggattgcatcctggatggcttccctatgactctgaaccaagcacaactgctcgaggaagctctgacggggtgtaatagaaatcttaccgaggtcgaaagaaagaaggcccagaaatccacattggccattgatcccgccacaagcaaagagatcccgctgcctagtcccgcctttgactttgtcatcctgctagatgtctcagacaccagctcaatgtctcgtatgaacgacatcattgcagaagagttaagctacaaaaccgcccacgaggatatcagccaacgtgtggcagcagagaatcaggataaagatggcgaccaaaatctgcgtgatcagatacagcaccgtatcatcgggttcctcgacaactggcctctgcttgaacagtggttttcagagcccgaaaacattctgatcaaaatcaacgcggaaattgacaaggaaagcttgtgtgaaaaggtcaaggagatccttaccactgaaattgccaagaagaagaataaggtggagaagaagttggaggaaaaagaggctgagaaaaaagctgcagcaagccttgccgagctccctctcccaacccccccccccgcccccccacctgagccagaaaaggagaaggagatccaccagagccacgtcgcgagcaaaactcccacggccaaggggaaaccccagtctgaggcgccccatgggaagcaggagagtctccaagagggtaaaggcaagaagggggaaaccgcactcaagcgcaaaggttctcccaaaggcaaaagctctggcggaaaagtgccggtcaagaagagcccagccgacagcactgacacatcacccgtggccatcgtgcctcaacccccaaagcctgggagcgaggagtgggtatatgtcaacgagcctgtccctgaggaaatgccactgttcctagttccatattgggagctcattgagaatagctatattaataccatcaagacagtgctccggcacctcagagaggatcaacatacggtgttggcatacctctatgagatcagaacatcttttcaggagtttctaaaacggcctgaccacaagcaggacttcgttgctcaatggcaggctgacttcaattctttacctgatgacctgtgggatgatgaagagacaaaggccgaattacaccagagagtcaacgatctcagagataggctgtgggatatctgcgacgcgagaaaagaggaagccgaacaggaaaggctggatatcatcaacgagagctggctccaggacacactgggcatgacgatgaatcatttcttttccttgatgcaagccgaactcaatcgcttccaggataccaaacggctgctgcaggattattactggggcatggaatctaaaatccccgtcgaggataacaaaaggtttaccaggataccactggttcagctcgattcaaaggataactccgaaagccagcttcggattccactggttccaagaatcagcatttctctggaaaccgtgacgcctaaaccaaaaaccaaatccgtgctaaagggcaaaatggacaatagccttgaaaatgttgagagcaactttgaggcagacgaaaagttagtcatggatacctggcaacaggcttcactcgccgtgtcccacatggtggcagctgagatacatcaaagactgatggaggaagagaaagaaaatcagcctgctgacccaaaggaaaagagtccacaaatgggtgctaataaaaaagtaaaaaaggagcctcccaaaaagaaacaagaggataaaaagcccaagggaaagagtccgccaatggctgaagccaccccggttatagtaacaactgaggagattgccgaaataaaaagaaagaacgaactacgagtgaaaattaaggaggaacatcttgccgcactacagtttgaagagatcgcaacgcagttccggctggagctgattaaaactaaggctcttgccctcctagaggatctcgtaactaaggtagtcgacgtgtacaagctcatggagaagtggctcggagagcggtacttgaacgagatggcttccaccgaaaaacttacagatgtagccagataccatatagagaccagtacgaagatccagaacgagctgtacctttcgcaggaggacttctttattaatggcaatattaaggtgttccctgatcccccaccatcaatcagacctcctcccgttgagaaggaggaggatgggactctgacaatcgagcagctcgacagcttaagagatcagttcctggacatggcacctaaagggattatcggtaacaaggcttttacggacattttgatagatctcgtgaccttaaacctggggaccaacaatttcccttctaactggatgcacctgacacagccggagctccaggaactgacaagccttctgacagtaaatagcgaattcgttgactggcggaagttcctcttagtaacatctatgccatggcctattccactcgaagaggaactgctcgagaccctccagaagtttaaggcagtggataaagaacaactcggaactatcaccttcgagcagtacatgcaggctgggttgtggttcacgggggacgaggatattaagattccagaaaatcccctggaaccattacccttcaaccgtcaggaacatctgatagaattcttttttagattgtttgccgactacgaaaaggacccgccccagctggactatacacagatgttattgtactttgcatgccatcctgacacagtcgagggcgtttatcgggctctgagcgtcgctgtgggcacgcacgtctttcagcaggtcaaggccagcatcccaagtgccgagaagaccagtagcaccgacgccgggccagctgaggagttccctgagcctgaggagaatgccgccagggaagagcgtaaattgaaagatgatacagaaaaaagggagcagaaagacgaagaaatccccgaaaatgcaaacaatgaaaaaatgtcaatggagacactgcttaaggtgttcaaaggcggttcggaagcccaggacagtaatcgatttgcgagccaccttaagattgagaacatctatgccgaaggatttatcaagactttccaggacctgggggccaaaaatctggaaccaatcgaagtcgccgtcttgttgaagcacccgtttatccaagacctgattagcaattattcagactacaagttcccagatatcaaaatcattttgcagcgcagcgagcatgtacaagggtctgacggggagcgaagtcctagcaggcataccgaagagaaaaaatag

SEQ ID NO: 217234 - DNA, 5468 bp, Artificial Sequence
  derived and/or modified sequence
atgagtgaaattttatgccagtggctgaacaaagagctgaaggtcagtagaaccgtttcccccaagtcattcgctaaagcattctcgagtggatacctcctgggggaggtgctccacaaatttgaattgcaggacgacttctccgaattcttggattcacgcgtgagctccgcaaagcttaataatttctctcggttggaacctacactgaacttgctgggggtgcaatttgatcagaatgttgcccacggcattatcaccgaaaaaccaggcgtcgccaccaagctactgtatcaactatatattgctcttcagaagaaaaaaaaatccggtctaactggggtcgaaatgcagacaatgcagcggctgaccaatttgcggcttcagaacatgaaatccgatacgttccaagagaggttaagacatatgatccctcgtcagacagactttaacctcatgagaattacgtataggttccaggaaaaatacaaacacgttaaagaagacctggcccacctccacttcgagaaactcgagaggttccaaaaactcaaagaggaacagagatgcttcgatatagagaagcaataccttaacagacgacggcagaacgagatcatggccaagatccaggccgctatcatccaaataccaaagcctgcctccaaccggactctcaaggccctggaagctcaaaagatgatgaagaagaagaaggaagcagaagatgtggccgacgaaatcaaaaagttcgaagccctcatcaagaaggatctccaggccaaggagtccgcctcaaagacctcacttgacaccgccggacagaccacaaccgacctcctcaatacttactccgatgatgagtacatcaagaagatccagaaacgcctggaggaggatgcattcgcgagagaacaaagggagaaaagacgacgcaagttactcatggaccagctcatcgcccatgaagcgcaggaagaagcttacagggaggagcagctgatcaacagactaatgaggcagagtcagcaggagagaaggatagctgtgcagctgatgcacgtccgccatgaaaaagaagtgctgtggcagaatcgtattttccgggaaaagcagcacgaggaacggaggcttaaagactttcaggacgccctggaccgggaagcggcattggctaaacaggctaagattgacttcgaggaacagttccttaaagagaaaaggtttcacgaccagattgcagtggaacgagcacaggctagatacgaaaaacactattctgtctgcgccgagatactggatcagatagtcgatcttagtaccaaggtagcggattacagaatgctcactaacaacctgattccatacaagctaatgcatgactggaaggaacttttttttaatgccaagcccatctatgaacaggcttccgttaagaccctgccagccaacccttcacgagaacagctgacggagctggaaaagcgggatctgctggataccaacgactacgaagagtacaagaacatggtaggcgagtgggccctgcccgaagaaatggttgacaatctgccgccttcgaataactgtattctgggtcatatccttcataggctggccgagaaatccctcccacctcgcgcagagtcaaccacacctgaacttcctagttttgccgtaaaaggatgtctccttggtaaaacactgtctggtaagacaaccatcctgcgtagcctccagaaagattttccaatacaaatcctgtcaattgatactctcgtgcaggaagctatacaggcttttcacgacaatgagaaagtgagtgaagtgttacctattcaaaagaacgatgaggaggatgcacttcctgttttgcaggaggagataaaggagtcacaggacccccagcacgtcttcagtgccggaccggtctcagatgaggtccttccggaaaccgagggagagactatgctgagtgcaaacgccgacaagacacccaaggccgaagaggtgaagagttccgacagcttcctcaagctcacaacccgcgcacaattgggggcaaagtccgaacagcttctcaagaagggaaagagcatccctgacgtgctattagttgatattattgtcaatgccatcaatgagatccccgtgaaccaggattgtatcttggacggattcccaatgactcttaatcaggcccaactgctggaagaggccctcaccggatgcaaccgcaacctcaccgaggtggaacggaagaaggcacagaaatccaccctggcaattgatcctgcaacctccaaagaaatccccctaccatccccagcttttgactttgtgatcctgctggatgtgagcgacaccagttcaatgtcccgcatgaatgacatcatcgccgaggagctgtcctataagactgcccacgaagatataagtcagcgggttgcagctgaaaatcaggacaaggatggcgaccagaacctcagggaccaaatccagcacaggatcatcggtttcctcgacaactggcctctgctggagcagtggttcagtgagcctgagaacatcctgattaaaattaacgccgaaattgacaaagagagcctttgtgagaaggtcaaggagatacttactaccgaaatcgccaagaagaaaaataaggtagaaaagaagctcgaagaaaaagaagcagaaaagaaggccgcagccagcctcgcagagttgcccctgccaacccccccacccgcaccaccacctgagcccgagaaggaaaaagagattcaccaatctcacgtcgcttccaagacgcctaccgccaaagggaaaccacaatccgaagccccacacggcaagcaggagtctctgcaggaagggaaaggaaaaaaaggcgaaacagctctgaagcggaagggttccccaaagggcaaaagctccggtgggaaagtccccgtgaagaagagcccagctgactctaccgacacgtcaccagtggccatcgtcccccaacctcccaaacccggatctgaagaatgggtctatgttaacgagccagttcccgaggagatgccgcttttcctggttccttactgggagctcatcgaaaactcctacatcaacaccattaagactgtgttaagacatctgagagaggaccaacatacagtgcttgcttacctttacgagatcaggacatcttttcaagagttcttgaagcggccagaccacaagcaagactttgtggcccagtggcaggcagatttcaactccctgcctgacgatctctgggacgacgaggagacgaaggcggagctgcatcagagggtgaacgatttgagggacagactgtgggatatctgcgacgcacgcaaagaagaggctgaacaggaacgtctggacataatcaacgaatcctggctccaggatacccttggcatgactatgaaccatttcttctctctaatgcaggcagagctgaataggtttcaggacacaaagcgcctgttgcaagattattactggggtatggagagtaagataccagtggaagacaataaacggtttacccgaataccactggttcagttggactctaaggataattctgagtcccaactgagaatccctctggtgcctcggattagtatcagtctggaaacagtaacacccaaaccgaagaccaagtccgtgttgaaggggaaaatggataactcattggaaaacgttgaaagcaattttgaggcggacgagaaactggtaatggatacctggcaacaagcttcactggccgtgagtcacatggtcgctgctgagattcatcagagactgatggaagaagagaaggaaaaccaaccagccgatcctaaggagaaaagtccccagatgggcgcaaataagaaggtcaaaaaagagccccctaaaaaaaagcaggaggacaaaaagccgaagggcaagtctcctccaatggccgaggcaacacctgtgatagtgactacggaagagattgcagaaattaagcgaaaaaacgagctgcgcgtaaaaattaaagaagagcacctggccgctctgcaatttgaggaaatagccacacagttccggctggagctgattaaaacaaaggctctcgctctgctagaggatctcgtcacaaaagtggttgatgtgtacaaactaatggagaagtggctgggggagagatatttaaacgaaatggcgagcaccgaaaagttgaccgatgttgcaagataccatatcgaaacgtccacaaaaattcaaaacgagctttatctgagccaggaggacttttttatcaacggtaacatcaaggtatttccagacccacccccatcgattcgtcccccacccgtcgagaaggaggaagacgggaccctcacaatcgagcagctcgactctctgagagaccaattcttagacatggcgcctaagggaataatcggtaacaaggcttttaccgacatcttgattgacctggtgactctgaacctgggcacaaacaactttccctccaattggatgcatctcacccagcctgagctccaggagctgaccagcctgctgaccgtgaactcagaatttgtggattggcgcaagttcctcttagtgactagcatgccttggccaatccctctggaagaggagttacttgagacgttgcagaagttcaaggctgtcgacaaagaacagctgggtactattacctttgaacagtacatgcaagctggactttggttcactggtgatgaggacataaagatccctgaaaatccacttgaacccttaccattcaaccggcaggagcacctcatcgaattcttttttagactgttcgcagactatgagaaggaccctcctcagctggattacacacagatgcttctctattttgcttgtcatcccgatacagttgagggagtataccgggcactctccgtggcagtaggtactcacgtgtttcagcaggtcaaggcctccatcccgagtgccgaaaaaacctcttcgaccgatgccggacccgctgaggagtttcccgaaccggaagaaaatgccgctcgggaagagagaaagctgaaggatgacaccgaaaaacgagaacagaaagacgaagagatccccgagaacgcaaacaatgagaaaatgagcatggagactttgctgaaggtgtttaaagggggaagcgaagcccaggattcaaaccggttcgcgagtcatttaaagatcgaaaacatttatgccgaaggctttatcaagacattccaggacctgggtgcgaaaaatttggagcccattgaggtagcagttttattaaaacatccctttatacaagatctgataagtaattattccgactacaaatttccagatatcaagatcatactgcagcgctccgagcatgtacaggggagcgatggcgagaggtcaccctctagacatactgaagaaaagaaata

SEQ ID NO: 217235 - DNA, 5681 bp, Artificial Sequence
  derived and/or modified sequence
gtcccctcttctctaaggcctttcgcctagttccagcctggatacgcttccatagcaaagggttgcccttggctacaggaggacgcgggctggcaggcttggttcctggcgagtttctaagcccccgcctgcggtctgaggcaccggctgaaccatgtcggagatcctgtgccagtggctcaacaaggagttgaaggtgtcccggaccgtgagtcccaagtcatttgcaaaggcattttccagtggctatctacttggagaagttctacacaagtttgaacttcaggatgatttttcagaatttttggacagcagggtttcaagtgccaaacttaataatttttctcgcttggagccaacacttaaccttctgggtgtgcagtttgatcagaatgtggcccatggcatcatcacagaaaagcctggggtggcaacaaagctgttatatcaattgtacattgctcttcagaaaaagaagaaaagtggactgactggagtggagatgcaaaccatgcaacgtctgacaaatttaagacttcaaaacatgaaaagtgatacttttcaagagagacttagacacatgataccacgtcaaactgatttcaatctgatgcggattacatacaggtttcaagaaaaatataaacacgtgaaagaagatcttgcccatttgcattttgagaaacttgaaagatttcaaaaactcaaggaagagcaaagatgttttgatattgaaaagcaatacttaaacagaagacgacaaaatgaaataatggccaaaatccaagcagctattatacagattcctaaacctgcatcaaatcgtactttgaaagcactcgaggcccaaaaaatgatgaaaaagaaaaaagaggcagaagatgtggctgatgaaattaagaagttcgaagcattaataaaaaaggatctccaagcaaaagaaagtgcatccaagacttctttagatacagcaggccagacaaccaccgatttgttaaatacttactcagatgacgagtacattaaaaaaatccagaagcgccttgaagaagatgcttttgcacgagagcaaagggagaaaagacggcggaaattgttaatggaccagttaatagcccacgaagcacaagaggaggcttatcgggaggaacagctgattaaccggctgatgcggcagtcccagcaggagcgcaggattgccgtgcagctcatgcatgttcggcatgaaaaggaagttttatggcaaaacagaattttcagagaaaaacaacatgaggaaagacgacttaaagatttccaggatgctcttgatcgagaagcggctttggcaaaacaagccaagattgactttgaagaacaattccttaaagaaaagagatttcatgatcagattgctgtggaaagagctcaagctcgttatgaaaagcattattcagtatgtgcagaaattttggatcaaatagttgatttgtccactaaagtggcagactatcgaatgttgacaaataatctgattccgtataagttgatgcatgattggaaggaactattttttaatgcaaaacccatatatgaacaagcctctgttaagacactacctgctaacccctcaagagaacaacttacagaactggagaaaagggacttgctagataccaatgattatgaagaatataagaacatggttggagagtgggccttaccagaagaaatggttgacaatttaccaccctccaacaattgcatactgggccatattcttcacaggctagctgaaaaatctcttcctcctcgagcggaatcaacaacacctgaattaccttcatttgctgttaaaggatgcttattggggaaaacattaagtggaaaaactaccattttaaggtctctacaaaaagactttcctatacagatactttctattgacactcttgtccaagaagctatccaagcatttcatgacaatgaaaaagtcagtgaggttctaccaattcagaaaaatgatgaagaagatgctctaccagttctgcaagaggagattaaagaaagccaggatccacaacatgtattttcagctggtccagtttcagatgaagtattaccagaaacagaaggtgaaacaatgcttagtgctaatgctgataaaacaccaaaagctgaagaagtcaaatcaagtgatagtttcttaaaactcactacacgtgctcagcttggtgcaaaatcagaacagttgctgaagaaaggaaagagcattcctgatgtgctgcttgttgacatcatagtaaatgctattaatgagatacctgtgaatcaagactgtatcctagatggttttccaatgactttaaaccaagcacagcttctggaagaagctcttacaggctgcaatagaaacctcacagaagtggaaagaaaaaaagcacaaaaatccacattggctattgatcctgcgacttccaaagaaatacctcttccctctcctgcatttgattttgtcatattattagatgtttcagatacttcctcaatgagtcgcatgaatgatattatagctgaagaattgtcctataaaactgctcacgaagatatcagtcaacgtgtagctgctgaaaaccaagataaggatggagaccaaaatttaagagaccagatacaacatagaattataggcttcttggacaactggcctttattggagcaatggttttcagagccagaaaatattttgataaaaatcaatgctgaaatagataaggaatctttatgtgaaaaagtaaaagaaattcttacgactgaaatagcaaaaaaaaagaataaagttgagaagaaattagaagaaaaggaagctgagaaaaaagcagcagcttccctggctgagcttccacttcctacacctcctcctgctcctcctcctgaaccagaaaaagagaaggaaattcatcaaagccatgtggcttcaaaaactcctactgcaaaaggaaaacctcaatcagaagccccgcatggtaagcaagaatctcttcaggaaggaaaagggaagaaaggtgagaccgcactcaaaagaaaaggttctcctaaaggaaaatcatcaggaggaaaagtaccagtaaagaaatcacctgctgactctacagatacatcacctgttgcaatagtgccacagccacctaagccaggatcagaagaatgggtctatgtgaatgaaccagttcctgaggaaatgcctttgtttttagtaccttactgggaactaatagaaaattcctatataaacaccatcaaaacagtactcaggcatctgagggaagaccagcatactgtgcttgcttacttatatgagattagaacaagtttccaggagtttctaaagcgtccggatcacaagcaagattttgtagctcaatggcaggctgatttcaactcccttcctgatgacctgtgggatgatgaggaaacaaaggctgaactacatcaacgagtgaatgatctgcgagaccgcctgtgggacatttgtgatgcccggaaggaagaggcggagcaggagcggcttgacatcattaatgagagctggttacaggacactcttggaatgacaatgaaccatttcttttccctgatgcaggcagagctgaaccgtttccaagatacaaagagactccttcaagattattactggggaatggaaagtaaaatcccagtagaggacaacaagagatttactcgaatccctttggtccaactggatagtaaagacaattctgaaagccagcttagaattcctctagttcctcgaatatccatttctctggaaacagttacacccaaaccaaaaacaaaatcagtactgaagggcaagatggataactccctagaaaacgttgagtccaactttgaggccgatgaaaagttggtcatggacacctggcagcaggcttctttagcagtatctcacatggtggctgctgaaattcatcagaggcttatggaagaagaaaaagaaaaccagccagcagaccccaaagaaaaatctcctcagatgggtgcaaataaaaaagtcaaaaaggagccacccaagaaaaaacaggaagacaaaaaacccaaaggtaaatcaccacctatggcagaagcaactcctgtcatagtaacaacagaggaaattgctgaaatcaaaaggaaaaatgaactgagggtcaaaataaaagaagaacaccttgctgccttgcaatttgaagaaatagccacgcaatttcgacttgaactgataaagacaaaagcattggctcttcttgaagatttagtaacaaaggtggttgatgtatataaactcatggaaaaatggcttggtgagaggtatttgaatgaaatggccagtacagaaaaattaactgacgtagctcgctatcacattgaaacatctacaaaaattcagaatgaactttatttaagccaagaagacttcttcattaatggcaatataaaagtcttcccagatcctcccccatcaatacgtcctccacctgtagaaaaggaagaagatggtaccctgaccattgaacagcttgacagtcttcgagatcagttcttagatatggcacctaaaggcataataggaaataaagcatttactgacattctgatcgatttggtgaccctgaaccttggcacaaacaactttcctagtaattggatgcaccttacccaacctgaattacaggaattaacatctttattaacagtcaactccgagttcgtggactggcggaagttcctgttagtaacctcaatgccttggcccattcccttggaggaggagctccttgagacccttcagaagttcaaggctgtggataaggagcagttgggcaccatcacttttgagcagtatatgcaggctggtctgtggtttacaggagatgaagatataaaaattccagaaaatcctcttgaaccccttccatttaataggcaggagcatcttatagagtttttctttaggctatttgctgactatgagaaggatccaccccagcttgactacacacagatgctgctttactttgcttgccacccagacaccgtggaaggagtctacagggccctcagtgtggctgttggaactcatgtcttccaacaagtcaaagcttccattccaagtgcagaaaagacctcctcaactgatgcaggtccagctgaggaatttcctgaacctgaggaaaatgctgcaagagaagaaaggaaattaaaagacgacacggagaaaagggaacagaaggatgaagaaatccctgaaaatgcaaacaatgaaaagatgtccatggaaacactactcaaagtgttcaaagggggaagtgaagcacaggactccaatagatttgccagccacctaaagatagagaacatttatgcagagggcttcataaaaacatttcaagacctaggtgccaagaacctggagccaattgaagtcgctgttctcttgaagcatccttttattcaagacctgatttcaaattattcagactataagtttcctgatattaaaataattctccaaaggagtgaacatgtacaaggaagtgatggagagagatcaccttcaagacatacagaggaaaagaaatgaagacaaaagagtgtgatttttttaattctgcaataaatcttccaaaaattaaatgtga

SEQ ID NO: 217236 - protein, 1606 aa, Artificial Sequence
  derived and/or modified sequence
MSEDSRGDSRAESAKDLEKQLRLRVCVLSELQKTERDYVGTLEFLVSAFLHRMNQCAASKVDKNVTEETVKMLFSNIEDILAVHKEFLKVVEECLHPEPNAQQEVGTCFLHFKDKFRIYDEYCSNHEKAQKLLLELNKIRTIRTFLLNCMLLGGRKNTDVPLEGYLVTPIQRICKYPLILKELLKRTPRKHSDYAAVMEALQAMKAVCSNINEAKRQMEKLEVLEEWQSHIEGWEGSNITDTCTEMLMCGVLLKISSGNIQERVFFLFDNLLVYCKRKHRRLKNSKASTDGHRYLFRGRINTEVMEVENVDDGTADFHSSGHIVVNGWKIHNTAKNKWFVCMAKTPEEKHEWFEAILKERERRKGLKLGMEQDTWVMISEQGEKLYKMMCRQGNLIKDRKRKLTTFPKCFLGSEFVSWLLEIGEIHRPEEGVHLGQALLENGIIHHVTDKHQFKPEQMLYRFRYDDGTFYPRNEMQDVISKGVRLYCRLHSLFTPVIRDKDYHLRTYKSVVMANKLIDWLIAQGDCRTREEAMIFGVGLCDNGFMHHVLEKSEFKDEPLLFRFFSDEEMEGSNMKHRLMKHDLKVVENVIAKSLLIKSNEGSYGFGLEDKNKVPIIKLVEKGSNAEMAGMEVGKKIFAINGDLVFMRPFNEVDCFLKSCLNSRKPLRVLVSTKPRETVKIPDSADGLGFQIRGFGPSVVHAVGRGTVAAAAGLHPGQCIIKVNGINVSKETHASVIAHVTACRKYRRPTKQDSIQWVYNSIESAQEDLQKSHSKPPGDEAGDAFDCKVEEVIDKFNTMAIIDGKKEHVSLTVDNVHLEYGVVYEYDSTAGIKCNVVEKMIEPKGFFSLTAKILEALAKSDEHFVQNCTSLNSLNEVIPTDLQSKFSALCSERIEHLCQRISSYKKFSRVLKNRAWPTFKQAKSKISPLHSSDFCPTNCHVNVMEVSYPKTSTSLGSAFGVQLDSRKHNSHDKENKSSEQGKLSPMVYIQHTITTMAAPSGLSLGQQDGHGLRYLLKEEDLETQDIYQKLLGKLQTALKEVEMCVCQIDDLLSSITYSPKLERKTSEGIIPTDSDNEKGERNSKRVCFNVAGDEQEDSGHDTISNRDSYSDCNSNRNSIASFTSICSSQCSSYFHSDEMDSGDELPLSVRISHDKQDKIHSCLEHLFSQVDSITNLLKGQAVVRAFDQTKYLTPGRGLQEFQQEMEPKLSCPKRLRLHIKQDPWNLPSSVRTLAQNIRKFVEEVKCRLLLALLEYSDSETQLRRDMVFCQTLVATVCAFSEQLMAALNQMFDNSKENEMETWEASRRWLDQIANAGVLFHFQSLLSPNLTDEQAMLEDTLVALFDLEKVSFYFKPSEEEPLVANVPLTYQAEGSRQALKVYFYIDSYHFEQLPQRLKNGGGFKIHPVLFAQALESMEGYYYRDNVSVEEFQAQINAASLEKVKQYNQKLRAFYLDKSNSPPNSTSKAAYVDKLMRPLNALDELYRLVASFIRSKRTAACANTACSASGVGLLSVSSELCNRLGACHIIMCSSGVHRCTLSVTLEQAIILARSHGLPPRYIMQATDVMRKQGARVQNTAKNLGVRDRTPQSAPRLYKLCEPPPPAGEE

SEQ ID NO: 217237 - protein, 1174 aa, Artificial Sequence
  derived and/or modified sequence
MSEDSRGDSRAESAKDLEKQLRLRVCVLSELQKTERDYVGTLEFLVSAFLHRMNQCAASKVDKNVTEETVKMLFSNIEDILAVHKEFLKVVEECLHPEPNAQQEVGTCFLHFKDKFRIYDEYCSNHEKAQKLLLELNKIRTIRTFLLNCMLLGGRKNTDVPLEGYLVTPIQRICKYPLILKELLKRTPRKHSDYAAVMEALQAMKAVCSNINEAKRQMEKLEVLEEWQSHIEGWEGSNITDTCTEMLMCGVLLKISSGNIQERVFFLFDNLLVYCKRKHRRLKNSKASTDGHRYLFRGRINTEVMEVENVDDGTADFHSSGHIVVNGWKIHNTAKNKWFVCMAKTPEEKHEWFEAILKERERRKGLKLGMEQDTWVMISEQGEKLYKMMCRQGNLIKDRKRKLTTFPKCFLGSEFVSWLLEIGEIHRPEEGVHLGQALLENGIIHHVTDKHQFKPEQMLYRFRYDDGTFYPRNEMQDVISKGVRLYCRLHSLFTPVIRDKDYHLRTYKSVVMANKLIDWLIAQGDCRTREEAMIFGVGLCDNGFMHHVLEKSEFKDEPLLFRFFSDEEMEGSNMKHRLMKHDLKVVENVIAKSLLIKSNEGSYGFGLEDKNKVPIIKLVEKGSNAEMAGMEVGKKIFAINGDLVFMRPFNEVDCFLKSCLNSRKPLRVLVSTKPRETVKIPDSADGLGFQIRGFGPSVVHAVGRGTVAAAAGLHPGQCIIKVNGINVSKETHASVIAHVTACRKYRRPTKQDSIQWVYNSIESAQEDLQKSHSKPPGDEAGDAFDCKVEEVIDKFNTMAIIDGKKEHVSLTVDNVHLEYGVVYEYDSTAGIKCNVVEKMIEPKGFFSLTAKILEALAKSDEHFVQNCTSLNSLNEVIPTDLQSKFSALCSERIEHLCQRISSYKKVSVLLILYTIIVEMYHFTEMITLYNILELVRPPNSEFFFSFLPTKRMKTLNQKKVTHMKKTNIQLQFSRVLKNRAWPTFKQAKSKISPLHSSDFCPTNCHVNVMEVSYPKTSTSLGSAFGVQWKLSPMVYIQHTITTMAAPSGLSLGQQDGHGLRYLLERKTSEGIIPTDSDNEKGERNSKRVCFNVAGDEQEDSGHDTISNRDSYSFSDCNSNRNSIASFTSICSSQCSSYFHSDEMDSGSDELPLSVRISHDKQDKIHSCLEHLFSQ

SEQ ID NO: 217238 - DNA, 4821 bp, Artificial Sequence
  derived and/or modified sequence
atgtctgaggactccagaggagattccagagctgaatcagcgaaagacctggagaagcagctacggctgcgagtctgcgttctatcggaactgcagaaaactgagagagattatgtaggcacactggagttcctggtctccgccttcttacatcgcatgaaccagtgcgctgcatcaaaagttgacaagaacgttacagaggagacagttaagatgctcttcagtaatatagaagacattctggctgtccacaaggaattcttgaaagtcgtcgaagagtgcctgcaccctgagcctaacgcccagcaggaagtcggaacatgcttcctccattttaaggataagtttcgcatctatgatgagtactgctccaaccacgagaaagcccagaagcttctgctggagctgaataagataagaaccatacgcactttcctccttaattgcatgctcttaggcggacgaaagaatacagatgttccattggagggctacctggtaacccccattcagcgcatctgtaagtatccactgatcctgaaggagctcctgaagcgaacgcccaggaagcattcagactacgcggctgtgatggaagcattgcaggccatgaaggcggtgtgcagcaacatcaatgaggcaaagagacaaatggagaaactggaggtgctcgaggaatggcaatctcacattgagggctgggaaggatccaacatcacagatacttgcactgagatgctgatgtgcggtgtgctacttaaaatttcaagcggaaacattcaggagagggtgttctttttattcgataatctgctggtgtattgtaagcgcaagcaccggcgactgaaaaacagcaaggcgagcactgacggacaccgctatctattccggggtagaatcaacacagaggtaatggaagttgagaatgttgatgacggaacggccgacttccattcctccgggcatatcgtggtcaacggatggaagattcataacactgccaaaaataaatggtttgtgtgcatggctaagacgcccgaagagaagcacgagtggttcgaggcaatccttaaggaaagagaacgccgcaaaggcttaaagcttggtatggagcaggacacatgggtgatgatatccgaacagggtgagaagctatataagatgatgtgccgccagggtaatctgattaaggaccgcaagcgcaaacttaccacattcccgaaatgttttttagggtccgagtttgtgagctggcttctggagattggcgaaattcataggcccgaggagggcgttcacctcgggcaggcactgttagagaatgggatcatccatcacgtgactgacaagcatcagtttaagcccgaacagatgttgtaccgctttaggtatgatgacggcacgttttacccccggaatgagatgcaagatgtgatttcaaagggagtgcgactgtattgtcggcttcactcattgttcacaccagtgataagggataaagactatcatctgcgaacttataaaagtgtagtcatggccaacaaactgattgactggctcatcgcacagggagattgtcggaccagagaggaggcaatgattttcggagtaggtctttgtgataacggtttcatgcatcatgtgctcgagaagagcgaatttaaagacgagccgctcctgttcaggtttttcagcgacgaagagatggaggggtctaacatgaaacatcgcctcatgaaacatgacttgaaagtggttgaaaacgtgattgccaagtccctactcattaaaagtaatgagggttcctacggttttggcctggaagacaaaaacaaagtaccgatcatcaaactagtggaaaaggggagcaacgcggagatggctgggatggaagtgggtaaaaaaattttcgcgatcaatggcgatcttgtgttcatgcgtccttttaatgaagtcgactgctttttgaaatcatgtttaaactctagaaagccactgcgggtgctggtatctaccaagccacgggaaaccgtaaagatcccagacagtgccgatggattaggattccagataagaggcttcgggccttccgttgtgcacgctgtcggccgtgggacagtggctgctgcagctggtctgcatccagggcagtgcattattaaagtgaatggtattaacgtgtctaaggagacccatgcctccgttatcgcgcacgtaactgcctgtcgtaagtataggaggcccactaaacaagactccatccagtgggtgtataactctattgagagtgcacaggaggacctgcagaaatcacattcgaaaccaccaggagacgaagcgggggatgcgttcgattgcaaagtggaggaggtgatcgataaattcaacacaatggccataattgacggcaagaaagaacatgtgagcttgacagtggataacgtgcacctagaatatggcgtggtttacgaatacgacagcaccgctggcattaagtgcaacgtggtggaaaagatgattgagcctaaggggttttttagtctcacagctaagatcctggaagccttggccaagagcgacgagcactttgttcagaactgcacctcgctgaactctcttaatgaggtcattcctacagacctacagtccaaattctcagcactttgctccgagagaatcgaacacttgtgccaacgcatcagctcatataaaaagtttagccgcgtgctcaaaaatagagcttggccgacttttaaacaagctaaaagtaaaataagtccattgcactctagtgacttctgccctacgaactgtcatgtaaatgtaatggaagtatcttacccaaagacatcaacatctttggggagcgcctttggcgttcagctagacagtcgcaagcacaattcccacgataaggagaacaagtcatccgagcagggtaaactgagtcccatggtatatatccagcataccattactactatggctgccccgagcggactcagtctcgggcagcaagacgggcatggtctgcggtacctgctaaaggaggaagatctcgagacccaggacatttaccagaaactcctcggcaagctccaaaccgccctgaaggaagtggagatgtgtgtatgtcagatcgatgacctcctctcaagcatcacctactccccaaaactagagagaaagacgagtgagggcatcatacctaccgactcagataatgagaagggagaacggaactctaagagagtgtgtttcaatgtcgctggggatgagcaggaggattctggccacgataccattagtaatcgggactcctacagcgattgcaactccaacaggaattcaatcgcgtctttcacttccatctgcagctcccagtgttctagctattttcatagcgacgagatggactccggagatgagctgcccctctccgtcaggatcagccacgataaacaggataagatacattcatgccttgaacacctcttctctcaagttgactcgatcactaacctgcttaaagggcaggcagtggtgagggcttttgaccaaacaaagtatctgaccccgggccgggggctgcaggagtttcagcaggagatggaaccaaaattatcttgtccgaagcggcttaggctgcacataaagcaagacccctggaacctcccctctagcgtgaggacgcttgcgcagaacattcgcaagtttgtggaagaagtcaaatgccggctcctcctcgcacttctggaatatagcgactccgagacacagctaaggagagacatggtgttttgccagacactcgttgccactgtgtgtgccttcagcgagcaattgatggccgcactgaatcagatgttcgataacagtaaagaaaatgaaatggagacgtgggaagcgagcagacgatggttggatcagattgcgaatgcgggcgtcctcttccatttccagtcactcctcagcccgaacctaacagacgaacaggccatgctggaggacaccctggtggcattgttcgacctagagaaggtgtctttctacttcaaaccttcagaggaggaaccccttgtcgcaaatgtcccgctgacttaccaggctgagggcagtagacaggcgctgaaagtgtacttttatatcgattcctatcacttcgaacaactgccacagagactgaaaaatggcggaggcttcaagatacaccccgtgctcttcgcacaggcgctggaatcgatggaaggatattactaccgggataatgttagcgtagaagaattccaggcccagatcaatgctgcaagtttggaaaaagtcaaacagtataatcagaagctgagggccttctatttagacaagtccaattcaccaccaaactcgacttccaaggcagcgtacgtagacaagttgatgcgacccctgaacgctctagatgagctgtaccgcctggtagcatcattcatcagatctaagcgcacagccgcctgcgccaatactgcctgttccgcgagcggtgttggattactaagcgtttcaagtgagttgtgtaatcgacttggcgcctgccatattatcatgtgctcttccggcgtccacagatgcactctcagtgtgaccttggagcaggctataatcctggcccgttcacatggcttgcctcctaggtacatcatgcaggcaactgacgtgatgcggaagcagggagccagagtccagaacactgccaagaacttgggcgtaagagaccgtaccccccagtccgcgccaagactgtataagctctgcgagccacctcccccagccggtgaagaatag

SEQ ID NO: 217239 - DNA, 4821 bp, Artificial Sequence
  derived and/or modified sequence
atgtctgaggacagcagaggagacagcagagctgagagcgccaaggacctggagaagcagctgcggctgcgggtgtgtgtgctgtctgagctgcagaagacagagcgggactatgtgggcaccctggagttcctggtgtctgccttcctgcacaggatgaaccagtgtgccgccagcaaggtggacaagaatgtgacagaggagaccgtgaagatgctgttcagcaacatcgaggacatcctggccgtgcacaaggagttcctgaaggtggtggaggagtgcctgcaccctgagcccaatgcccagcaggaggtgggcacctgcttcctgcacttcaaggacaagttccgcatctatgatgagtactgcagcaaccacgagaaggcccagaagctgctgctggagctgaacaagatccgcaccatccgcaccttcctgctgaactgcatgctgctgggcggcaggaagaacacagatgtgcccctggagggctacctggtgacccccatccagaggatctgcaagtaccccctcatcctgaaggagctgctgaagaggacccccaggaagcacagcgactatgctgctgtgatggaggccctgcaggccatgaaggctgtgtgcagcaacatcaatgaggccaagaggcagatggagaagctggaggtgctggaggagtggcagagccacatcgagggctgggagggcagcaacatcacagacacctgcacagagatgctgatgtgtggggtgctgctgaagatcagcagcggcaacatccaggagagggtcttcttcctgtttgacaacctgctggtgtactgcaagaggaagcaccggcggctgaagaacagcaaggccagcacagatggccaccgctacctgttccggggccgcatcaacacagaggtgatggaggtggagaatgtggatgatggaacagctgacttccacagcagcggccacatcgtggtgaatggctggaagatccacaacacagccaagaacaagtggtttgtgtgcatggccaagaccccagaggagaagcatgagtggtttgaggccatcctgaaggagcgggagaggaggaagggcctgaagctgggcatggagcaggacacctgggtgatgatcagcgagcagggcgagaagctgtacaagatgatgtgccggcagggcaacctgatcaaggacaggaagaggaagctgaccaccttccccaagtgcttcctgggcagcgagtttgtgtcctggctgctggagatcggggagatccacaggcctgaggagggcgtgcacctgggccaggccctgctggagaatggcatcatccaccacgtgacagacaagcaccagttcaagccagagcagatgctgtaccgcttccgctatgatgatggcaccttctaccccagaaatgagatgcaggatgtgatcagcaaaggagtgcggctgtactgccgcctgcacagcctcttcacccctgtgatccgggacaaggactaccacctgcggacctacaagtctgtggtgatggccaacaagctgattgactggctgattgcccagggcgactgcaggacccgggaggaggccatgatctttggagtgggcctgtgtgacaatggcttcatgcaccacgtgctggagaagtctgagttcaaggatgagcccctgctcttccgcttcttcagtgatgaggagatggagggcagcaacatgaagcaccggctgatgaagcatgacctgaaggtggtggagaatgtcatcgccaagagcctgctgatcaagagcaatgaaggcagctatggcttcggcctggaggacaagaacaaggtgcccatcatcaagctggtggagaagggcagcaatgctgagatggccggcatggaggtgggcaagaagatctttgccatcaacggggacctggtgttcatgaggcccttcaatgaggtggactgcttcctgaagagctgcctgaacagcaggaagcccctgcgggtgctggtgtccaccaagccccgggagaccgtgaagatcccagattctgcagatggcctgggcttccagatccggggcttcggccccagcgtggtgcatgctgtgggccggggcaccgtggccgctgctgctggcctgcaccctggccagtgcatcatcaaggtgaatggcatcaacgtgtccaaggagacccacgccagcgtcatcgcccacgtgacagcctgcaggaagtaccgccggcccaccaagcaggacagcatccagtgggtgtacaacagcattgaaagtgcccaggaggacctgcagaagagccacagcaagcccccaggagatgaggccggagatgcctttgactgcaaggtggaggaggtgattgacaagttcaacaccatggccatcattgatggcaagaaggagcacgtgtccctgactgtggacaacgtgcacctggagtatggagtggtgtatgaatatgacagcacagctggcatcaagtgcaatgtggtggagaagatgattgagcccaagggcttcttcagcctgacagccaagatcctggaggccctggccaagagtgatgagcactttgtgcagaactgcaccagcctgaacagcctgaatgaggtgatccccacagacctgcagagcaagttcagcgccctgtgcagcgagagaattgagcacctgtgccagaggatcagcagctacaagaagttcagccgggtgctgaagaacagagcctggcccaccttcaagcaggccaagagcaagatcagccccctgcacagcagtgacttctgccccaccaactgccacgtgaatgtgatggaggtgtcctaccccaagaccagcaccagcctgggcagcgccttcggcgtgcagctggacagcaggaagcacaacagccatgacaaggagaacaagagcagcgagcagggcaagctgagccccatggtgtacatccagcacaccatcaccaccatggccgcccccagcggcctgagcctgggccagcaggacggccacggcctgcgctacctgctgaaggaggaggacctggagacccaggacatctaccagaagctgctgggcaagctgcagacagccctgaaggaggtggagatgtgtgtgtgccagattgatgacctgctgagcagcatcacctacagccccaagctggagaggaagaccagcgagggcatcatccccacagacagcgacaatgaaaaaggagagaggaacagcaagagggtgtgcttcaacgtggccggagatgagcaggaggacagcggccatgacaccatcagcaacagagacagctacagcgactgcaacagcaacagaaattccatcgccagcttcaccagcatctgcagcagccagtgcagcagctacttccacagtgatgagatggacagcggagatgagctgcccctgtctgtgcgcatcagccatgacaagcaggacaagatccacagctgcctggagcacctgttcagccaggtggacagcatcaccaacctgctgaagggccaggccgtggtgcgggcctttgaccagaccaagtacctgaccccaggccggggcctgcaggagttccagcaggagatggagcccaagctgagctgccccaagaggctgcggctgcacatcaagcaggacccctggaacctgcccagctctgtgaggaccctggcccagaacatcaggaagtttgtggaggaggtgaagtgccgcctgctgctggccctgctggagtacagcgacagcgagacccagctgcggcgggacatggtgttctgccagaccctggtggccaccgtgtgtgccttcagcgagcagctgatggccgccctgaaccagatgtttgacaacagcaaagaaaatgagatggagacctgggaggccagccgccgctggctggaccagatcgccaatgctggggtgctcttccacttccagagcctgctgagccccaacctgacagatgagcaggccatgctggaggacaccctggtggccctgtttgacctggagaaggtgtccttctacttcaagcccagcgaggaggagcccctggtggccaacgtgcccctgacctaccaggccgagggcagccggcaggccctgaaggtgtacttctacatcgacagctaccactttgagcagctgccccagaggctgaagaatggaggcggcttcaagatccaccctgtgctgtttgcccaggccctggagagcatggagggctactactacagagacaacgtgtctgtggaggagttccaggcccagatcaatgctgccagcctggagaaggtgaagcagtacaaccagaagctgcgggccttctacctggacaagagcaacagcccccccaacagcaccagcaaggccgcctacgtggacaagctgatgaggcccctgaatgccctggatgagctgtaccgcctggtggccagcttcatccgcagcaagaggacagctgcctgtgccaacacagcctgcagcgccagcggcgtgggcctgctgtctgtgtcctctgagctgtgcaaccggctgggcgcctgccacatcatcatgtgcagcagtggagtgcaccgctgcaccctgtctgtgaccctggagcaggccatcatcctggcccggagccacggcctgcccccacgctacatcatgcaggccacagatgtgatgaggaagcagggcgcccgggtgcagaacacagccaagaacctgggcgtgcgggacaggaccccccagagcgccccccggctgtacaagctgtgtgagcccccacctcctgctggggaggagtag

SEQ ID NO: 217240 - DNA, 4821 bp, Artificial Sequence
  derived and/or modified sequence
atgagcgaggacagccggggcgacagccgggccgagagcgccaaggacctcgaaaagcagctccgcctcagagtgtgtgtactgtcagagcttcagaaaacggagcgagactacgtgggcacattggagttccttgtgtccgcgttcctgcatagaatgaatcagtgtgctgctagcaaggtagataagaacgtgacggaggaaacagtaaaaatgctcttctccaatatcgaagatatcctggcagtgcacaaggaatttttgaaggtggtcgaggaatgcttgcacccggaaccaaacgctcagcaagaggttggcacctgcttcctccacttcaaggataagtttcgcatctacgatgaatattgtagcaatcacgaaaaggcacagaagctgctgctggaacttaataaaatcaggactatccgcaccttcctattaaattgcatgctactcggtggacggaagaataccgacgtccccctggaagggtacctggtaacacccattcagcggatctgcaaatatcccctgattctgaaggagctcttgaaacggaccccacgcaaacattcggattacgccgcagtgatggaagcactgcaggctatgaaggccgtgtgcagcaatataaatgaagcaaagaggcagatggagaaacttgaagttctggaagagtggcaatctcatatcgagggttgggagggaagtaacattaccgatacttgtacagaaatgctaatgtgtggggtgttgctgaagatttcgtccggcaatatccaagagcgtgtcttcttcttgtttgataacctgttagtctactgtaagcggaagcatcggcgcctgaaaaattccaaggccagtactgacggacaccgttatctctttagaggtaggattaacaccgaagtgatggaagtggaaaacgtggatgacggaaccgctgacttccattcctccggtcacatcgtggttaacgggtggaaaattcataacactgctaagaacaaatggttcgtctgtatggcaaagaccccggaagagaaacacgagtggttcgaagctatcctaaaggaacgggagcgtaggaaagggctcaaactaggaatggaacaggacacctgggtcatgatcagcgaacagggcgagaagctgtacaagatgatgtgccgtcaaggaaacctcattaaagataggaaaagaaagttgaccacctttcccaagtgtttcctgggctcggagtttgttagttggttgctggagatcggggagatccatagaccagaagagggggttcatctgggccaggctctgcttgagaatggaattatccaccacgtaacagataaacaccagtttaaaccagagcagatgttatatcgattcaggtacgatgacggaacattctaccctcgcaacgaaatgcaggatgttatctctaaaggggtgagactgtactgccgacttcacagcctgtttactccagtgatcagagataaagactaccacctgaggacctataagagcgtggttatggccaacaagctcatcgactggctaatcgcccagggggactgccgcaccagagaagaagctatgatctttggagtagggctttgcgataacggcttcatgcaccacgtcctcgaaaagtctgaattcaaggacgaacccctcctgttcagattcttcagtgatgaggagatggaggggtcaaatatgaaacacagactgatgaaacacgacctgaaggtggtggaaaatgtaatcgcgaaatccctgttgattaaatcaaatgaaggtagctatggctttggtttggaagacaagaataaagtccccataattaaactggtggagaaaggttcaaatgcggaaatggcaggtatggaggtcggaaaaaagatattcgcgatcaatggagatttggtcttcatgcgacctttcaacgaggtcgactgttttttgaaatcatgtctgaactccagaaagccacttcgcgtcctcgtgtcaactaaaccccgcgagacagtgaaaatccctgactctgctgatgggcttggattccagatccgaggatttggcccctccgtcgtgcatgcagtgggcaggggaacagtagccgccgctgccggacttcatcccggccagtgcatcattaaggtgaacggcattaacgtgtctaaggagacccacgccagtgtgatcgcccacgttacagcctgtcgcaaatatcgccggcctacaaaacaagactccattcagtgggtctacaactctatcgagagtgcccaggaagacctgcagaagagtcattccaagccaccaggagacgaggctggcgacgcttttgattgcaaggtagaggaagtaatagacaaattcaacaccatggctatcatcgacggcaagaaagagcacgtgtctctaacagttgacaatgttcatttggaatatggggtggtgtatgagtatgacagcacggctggcattaaatgcaacgtggtggagaaaatgatagaacctaaaggtttctttagcttgaccgccaagatcctggaggcgctggctaagagcgacgaacactttgtgcagaattgtactagtttgaactccctgaacgaggtcatcccaacggaccttcaatccaaattttctgccttatgtagtgaaagaattgagcacctctgtcagcgcatatctagctataagaaattttctcgtgtcctcaagaatagagcatggcctacgtttaagcaagccaaatctaaaatctctccactacacagttccgatttttgccctaccaattgtcatgtgaacgtgatggaggtaagctacccaaagacatcaacctcactaggctctgcattcggagttcagctggattcgcggaagcacaactcacatgacaaagaaaataagtccagcgaacagggtaagctgtctcccatggtttatatccagcatactatcaccacgatggctgctccctccgggctgtccctcgggcaacaggacggacacggcctccggtatctgcttaaagaagaggaccttgagacgcaggacatttaccagaaacttctcggcaagctgcagaccgcgcttaaggaggtggagatgtgcgtatgccagatcgacgacctactttcaagcattacgtacagcccgaagctcgaaagaaaaacatcagagggaatcatcccgaccgacagtgataacgagaagggggagaggaattctaaacgcgtttgcttcaatgtggctggggatgaacaggaggactccggccacgataccatctctaatagggacagctacagtgactgtaactccaaccggaattctattgcctccttcacctcaatctgttcttctcagtgctccagctactttcactccgatgagatggactctggcgacgaactgcccctatctgtacgcatatcgcacgacaagcaagacaagattcatagctgcctggagcacctgtttagccaggtggacagcatcaccaatttacttaagggccaggcggtagtaagggccttcgaccaaacaaaatacctgacccccggaaggggtctgcaggaattccaacaagaaatggaaccaaagctctcgtgtcctaagagactccgtctgcatatcaaacaggatccttggaatttgcccagcagtgtacggaccctcgctcagaatattaggaaattcgtggaagaagtgaagtgtcgactgctgctggccttattggaatatagcgattctgagacccagctacggcgcgacatggtattttgtcaaacactagttgcgactgtgtgtgcgttttccgagcagcttatggctgctctcaatcagatgttcgacaatagcaaagagaacgaaatggagacctgggaagcaagtaggcgctggcttgaccagatcgccaatgcaggtgttttgtttcacttccaaagtctgctcagtccgaatcttactgacgaacaggcaatgctcgaggataccctggtcgcactcttcgacctggagaaggtctctttttactttaaaccttccgaagaggagcccttggtggctaacgttcccctgacataccaggccgagggatcaagacaagcactgaaggtgtacttttatatagactcgtaccatttcgagcagttaccacaacgtctcaagaacgggggcgggttcaagatacatcccgttcttttcgcacaggcactggagagtatggaggggtattactacagagataacgtttctgtcgaagagttccaggctcagatcaacgccgcttcgctggagaaggtaaaacagtacaatcaaaagctcagagctttctatctcgataagtcaaactcaccccctaatagtactagtaaggccgcttatgtggataagttgatgagacctttgaatgcactggacgagctgtataggctggtcgctagcttcatcaggagcaaacgcaccgctgcctgtgccaatactgcctgttcagccagcggggttggccttctgagtgtgagttctgagctatgcaatcgccttggggcttgtcacatcattatgtgcagcagtggagtgcatcggtgcacactctccgtgactcttgagcaggccattatccttgcaagaagccacggcttaccacctaggtacattatgcaggcaactgacgtaatgaggaaacagggagctcgcgtgcaaaacactgccaagaacttgggggtgcgggaccgtacacctcagtcagcgcctcgactttacaagctgtgcgaaccgcccccccccgcaggtgaggagtag

SEQ ID NO: 217241 - DNA, 10750 bp, Artificial Sequence
  derived and/or modified sequence
gccagagcagcggggccgggcgcgcagggcctggccggagcccccactcccaggagtttcctctgcagagccccgcgccccccgcgccgggatttcagcccgatcccctcctctccctgcgcccagcctctccccagcatgtaaagtcttctgtctctcctcggagttggcggaggcggcaactttccattctcgccgccgggggccgggcagcagcgggcgcgcgggtcagcgctcagcacggcgggcagcgccgcgctgcgcaccgccgccgaccatgagcgaggacagccgcggagacagccgcgccgagagcgccaaggacctggagaagcagcttcgcctgcgcgtgtgcgtgctcagcgagctccagaagaccgagcgggactatgtgggcacgctggagttcctggtgtcggcattcttacacagaatgaaccagtgtgcagcatcaaaagttgacaaaaatgtgacagaagaaacagtgaagatgttgttctcaaacattgaagacatccttgcagtacataaagaattcttaaaagtcgtggaagaatgcttacaccccgaacctaatgctcaacaagaagtgggaacctgctttcttcactttaaagacaagtttcgtatctatgatgaatattgtagtaaccatgagaaggcacaaaaattacttcttgaactcaacaaaataagaacaatccggacatttcttttgaactgcatgctgcttggaggacggaagaacacagatgttcccttggaaggatatttagtaacaccaatacaaagaatatgcaagtaccctcttattttgaaggagttgctgaagcggactccacggaaacacagtgactatgcagcagtgatggaagccctccaagccatgaaagctgtctgttccaacataaacgaggccaagagacagatggagaagttagaagttttagaggaatggcagtctcacattgaaggctgggaggggtccaacatcactgacacctgcactgaaatgctaatgtgtggagtcttactgaaaatttcttctggaaatattcaagaacgggtgttttttcttttcgataatcttttggtgtactgcaaaagaaaacacagacggttgaagaacagcaaggcatctacagatggacatcggtacctttttcgtggccggatcaacacggaggtgatggaagtggagaatgtggatgatggcaccgctgatttccatagcagtggacacattgttgttaatggatggaagatacataacacagcaaaaaataaatggtttgtttgtatggcaaaaacacctgaagagaagcatgaatggtttgaagctattttgaaagaaagagaacggcggaaaggtttaaaattaggaatggagcaagatacctgggtcatgatctctgaacagggtgagaaactttataaaatgatgtgcagacaaggaaatctgatcaaagaccgaaagagaaaactgactacgttccctaaatgctttcttggaagcgaatttgtgtcatggctgttggaaattggagagattcacaggcctgaggaaggcgtgcacttgggacaagcattattagaaaatggaatcattcaccatgttactgataaacatcaattcaaaccagaacagatgttatatagatttcgctatgatgatggaacattttatccaagaaatgagatgcaggacgtgatttcaaagggtgtaagattatattgtcgtcttcatagcctttttactccagtgataagagataaagattaccatttaaggacctacaaatctgtggtcatggccaacaaactgatagactggttaattgcacagggagattgccgcaccagagaagaggcaatgatatttggcgttggactctgtgacaatggatttatgcaccatgtccttgaaaaaagcgaattcaaagatgaacccctacttttccgttttttttcggatgaggaaatggagggatcaaatatgaaacatcgacttatgaaacatgacttaaaagttgtggaaaatgttatagctaagtcattattgattaaatccaatgaaggcagctatggctttggattagaagacaaaaataaagttccaataataaagttggtagaaaagggatctaatgctgagatggctggcatggaagtcgggaaaaagatttttgctattaatggtgacctagtttttatgagacctttcaatgaagtggattgcttcctgaaatcgtgtttaaacagcagaaaacctctaagagttcttgtgagcacaaagccaagagagacagtgaaaattccagattcagctgatggacttggcttccagatccggggatttggcccttctgttgtgcatgctgtaggaagaggaactgtggctgcagcagctggtcttcaccctggacagtgcattatcaaggtgaatggaatcaatgtcagcaaagagacacatgccagtgtcattgcacacgttacagcctgcaggaagtacaggcggccaacgaagcaagattccatacaatgggtttataatagcattgagagtgctcaagaagaccttcaaaaatctcactccaagccccctggagatgaagcaggggatgcttttgactgtaaagtagaagaggttattgacaaattcaacactatggccatcattgatgggaagaaggagcatgtgagtctgacagtggacaatgtccacctggaatatggtgtcgtgtatgagtacgacagcacagctggcatcaagtgcaatgtggtggaaaagatgattgagcccaaaggtttcttcagcttaactgccaagattcttgaagccctggctaaaagtgatgagcattttgtacaaaactgtaccagcctaaattctctaaatgaagtgattcctactgaccttcagagtaaattcagtgccctttgcagtgaaagaattgaacacctatgtcagagaatatccagttataaaaagttttctcgtgtactgaagaatagggcctggcctacttttaaacaggccaaatctaaaatctccccactgcacagcagtgatttctgccctaccaactgccatgtcaatgtgatggaagtttcttatcccaaaacatcaacctctttgggaagtgcatttggtgttcagttggatagcaggaagcataattctcatgataaagaaaacaaatcttcggagcaagggaaactgagccctatggtgtacattcagcacaccatcacaaccatggcggccccttcaggtctgtctctgggacagcaggatggccatggtctcaggtatctgctaaaagaagaagacttagaaacccaagacatctatcagaaactgctgggcaaacttcagactgcactgaaagaggtggagatgtgtgtttgtcaaatagatgaccttctgtcttcaataacatattctcctaaattagaacgtaagacatcagagggcataataccaacagacagtgacaatgagaagggagaaagaaacagcaaacgggtatgttttaatgtagcaggagatgaacaggaagattctggtcatgacaccatcagcaacagagactcttacagtgactgcaacagcaataggaattccatcgcctccttcaccagcatctgcagcagccagtgcagctcgtatttccacagtgatgaaatggactcaggtgatgaacttcccttaagtgttcgcatatctcatgataaacaggacaagatacatagttgccttgagcatcttttcagccaggtggattcaattaccaatctcctaaaagggcaggctgttgtgagggcctttgaccaaaccaagtatctcactccaggccgaggattgcaagaatttcaacaggaaatggaaccaaagctgagttgtccaaaaaggctacggcttcatatcaagcaagatccttggaatcttcccagcagcgtccggactcttgctcagaacatcaggaaatttgttgaagaggtaaagtgtaggctactcctggctcttcttgaatattcagatagtgagacacagctccgtagagacatggttttctgccagactcttgtggccactgtctgtgccttctctgagcagctcatggcggccttgaaccagatgtttgacaacagcaaggaaaatgagatggaaacttgggaagccagcaggaggtggctggaccagatagcgaatgcaggtgttctttttcactttcagtcacttctgtcaccaaacttgacagatgaacaagccatgttagaagatacactggttgcactatttgatttggaaaaggtttccttttactttaaaccatcagaagaggaacctctggttgcaaatgttcctcttacatatcaagcagaaggaagtcggcaagctctgaaagtttacttctacattgatagttatcattttgaacaacttcctcaacggctgaaaaatggaggagggtttaaaattcatcctgttctttttgcacaagcactagagagcatggaaggatattattacagagacaatgtttctgtggaagaatttcaagctcagataaatgcagcctcactggaaaaggtcaaacagtacaaccagaagctcagggcattctacttggacaagtcaaattcaccaccaaactccacatccaaagctgcctatgtagataagctaatgaggcctctcaacgctttggatgaactttaccgactggtagcctcgtttatcagatccaagcgcacagctgcctgtgcaaacacagcttgcagtgcttctggggttggactgctgtcagtttcctcggagctgtgcaacaggctgggcgcctgccacatcatcatgtgcagcagcggtgtgcatcggtgcaccctgagcgtgacgctggagcaagccatcattctggccagaagccacggactgccacctcgttacatcatgcaggctacagatgtgatgcggaagcagggagcaagagttcagaacacagcgaagaatttgggagtcagagaccggactccacagtctgcaccaaggctgtacaagctgtgcgagccacctcccccagctggagaagaatgaaaagaactcccaagaaaccaggcaggcagaagctcctgaatgctggactagacaaactacatgctggctaaacattctccactgaagatacatcaatgcttttttttttttttttttctgtaaatctttcttcccattgcaaacaagtagtgatcagtttatactttgatatttatgctggaaatggatagaagttcaatcagacagttcagcttcacgaactgatgtctctctgtattgacattaagtattcacttttagagtaaaatccatccctgggacataaagaaaaaaatattagagatttaaaaattaaccaccatgcctcctctcccattcattaaaatggttttattatgcttgttttcatctttcccaagtggacacatgtaataatggagagttcctcttgaagaaggccattattgaagaaacctggcgacatcttgcaaatcatcatgagaaatgttaaggacaatatagactgtgtgctatacattttcagtcccccatttgcaagagagaaagtcattaatgtgtaaaaggtggaaaagcatgctttactctttctcctaagggcttatttcttattagaggagaagaaagctgactaaggcctccagcaggactcactttcttctagctgcctttgggcatcctttattcttgtggacagctctagcaaatcaatgctatttttggtgtctgcaatgggcatggcttccttgggccatgaatactgggtgctgtgccataatggccctggggatcagggaagtgccctggggatcagggaggggaaccaggatgaagaaggggactgtaagcctattttaaaactaaacctttaagttagatacctaaaactcttaattttatgaaggctctcatatgagaggtcagactcttcaaagaatacaccatcatgagaatttttctgttaagatatatgtataagatatgaaaataaggctttatttgtactttaaaaggaccattaggggacttgtaatttatggatgcacaaggtgtattctatccttattctaaagtatatgtaatgtttatcatttctacattgatgcaataacattgtttttagcatagtaaatacagtaatatttattttaaatccataattttcaaacaaaacactcatgattgtgataattatatgggtttacactaatttagtatgtgaaatgcttttcatatctaaattatgtgcaaactattattaattttttttttattttttgaaactgagtctcactctgttacccagactggagtgcggtggtgcaatcttggctcactgcaacctccacctcctgggttcaagccattctcttgcctcagcctcccaggagctgggactacaggtgtgcaccaccatgctcagctaatttttgtatttttagtagagacgtgttttcaccatgttggccaggctggtcttgaactcctgacatcaagtgatccacccacctcagcctcccaaagtgctaggattacaggcgtgagccgctgctcccggcccattattaaattttaatttatgaaatttgatcatggttttcaaactattattaaaacctttatcattaaccattatgtattgaataacaaaaataccatgttacatgtgtaggcaatatgtgtatactactaggtaaggtaataataattgttatttggcacagaagctctagagacttttgtgagaagtccatatacaatgaaaaacaaggaacctaacatcagagttttcaagaaaaagttgaacattttgaatttaataaagatatctttacaaaaataaccttcaaggatttaacatttgtaggactaataaaggaacacagctgattagctagcaagtcctttcatattgtcatgactgttttctcatcaccatcctggaagcagtaatcctcattagaggcatgcaagggtcattaaaatgatttcagttgtactttgccatatttcatggggcaaattatcagctatattgtggtatttataagctaacatattttatatttttaaggatctactttcttcataatagaatgtgcttcatattatttttagggttaaacataagtgtgtcgtctatcatgcttggtacttactaaatgctcaaaaattagtaatggtttatattaacatcagtcactctaacttctgatcgtaataaaaattgtagctaacacttattaagggattactacatgcccagtaatacctccaaatgctttgcctgtattctgttgttattgcttcacttaatcctcataataatgacgtgacatggtactctttttatcgcgcccatttttagagttgaggaaccaaagcaaagaataacccagtgacttgcacaaagtcacatgattgacaaggggtagaaccaaaatttgaacccaggaagtctgccttcttaatgcattatgctacttttccttatcaatataagaactattgtaatattacgatgatttgtaagtaaatttggagttatgcggcatgtgttgtcattaaattatacatcttgtattaaaaaacggtgaatggaaatatgtaaatgctttaattatatgaaaattatagtgtttcctggacattttacaactctggatgcacattttgaggtaactcaacagtgttgcaatctgaaaaactattttgtatcatgttcctcctcatcaaaaataacagttttagatagtacatctcatacaactttattataattccaacacagtggtaagagtaaaaaacatacctaatggatgaatgaataatgacaattttttcaatgccatatgtacctccatgtgacattgggcattaaatggccttgaggttttaggatgtgtttaccttaatgctacatgctcctctataaccagtgcaccttcaaatactgctaaaacctgctaacttcttccaggttctgagcatggacaactcccaccgccccccaacctaaaagggaaggtcatgcatagaaagtttggattttaacttagagcctgactcaaaaataattgtgaactaaaaattcatagtcaatactttttaagcattctattatctcctataattttttctaatattaattccaaatattacaaaatttaatgtgatattaaagtatgaaaaatttgagaagattagaattttacatgtatttccattcctatttaaagagagaaaatggggagataatttctgtgctagttttacttatattggatatataatattgaatttatagtataagctttattttatcagttcgcaaatctgaagtctcatactgttttctgtctctttaaaacacattcttctggtggcttgggttcattgtgcattcattggccactcttcttgcagcaaattttaaatcaatttaaaattaggtaaactttttatgatactataatatatatgacgttgaaatgacattggttctgagtctattaatttaaattttgggatcattacattcagaatgaaatgaaattgaccttgatactaactttgagagccaaaaaaatgaatgggtaaacaaagcctaagggtcatgttaattaatttaacaaaacacactattttcagtcctttgggcttgtacattttatagacaaaattagcatttattgatttggaagtgttcaattgagagtaaatgactctgtgttttgaaactaatacctttgcatttaaaatactgaagtattattttgttagttgaagtagatcttttcctgtgtagcatgatttaatgcagagcagttattcacttatacttctgaaaagccataatattgaaatttaaaatgaatagtcttactttaaggtcacttttactttacattttactttaaaggtcgtttttagactttatgcactagtggtattgaaactaacctttaatatttgactaaattgcttgtgaatttttggaaactatgtttaatttttaaagacattgttatgtgaattatcttactaaattatcacttaagaactctctcatagcagtaatttcattaacacatatatatactaaccaatttgctaaatgaattgtcggttgtcctgcttaagtactagggccaagctttgaaatgacttaaagtgatctgaattttgattgagaaaaataatctgtcttctatcgaatgtttgaacttttagtgatgagcctcagcaaagtttcaccctgcatgaagcagaacaggtgggggaaaattacaagaggggtctgtaccaaaaatggccccaggatattccattgaacaaatattgaccattatcttcctaggtgctacaactccatactagtcattacagttagtctttggtttcacaaaaatgttactgcttcaaaggcttggcattaacagtgatgtcagcattcatactgccaacagtctgctggtcatacatggaagactgttaaagtgtggtctgtgcatcattgagcaattgttatgtagacacaaggcctgcttcactcaggatagcttgctcctctcgctgagaagagatacctgaagtctactaagtctactaaatgagatatatatgtgtatgtatatgcctatatatattattatatttactagtgtttgtgataatgttataaaaattaataagattgttttgttttgtatgaatgtacgacaaatcgagttgttcaatgtattgaatgaatgtcttactgtaagcatcagagctgtccaaccatgtgtaaatgtacctggtcttttgatcactgacactactttgctgttcaatctggaatcaactgacctggctctgccattgagaaataactaatttagaacaaaattgttaaattttaaaattgcatttctactagaaatagctttggagagttaattttaggtgcgaataacaggataaatgctatctgatcaagcattcatccgaaaaatgtttttgagaattcactttgtgcaaggcacagctgttggggctggtatatgtgtggacatgtttgatttgaaaaccttcgtggtgtctctgtgtgttattgatcatctgtgtcttttgcttaaaatggcattatttgtaacacaaacctaatatcatatatacaaatatactgtatgtagccaagaacactaaattggtaagacgctttagaaaatatgcatttgaatttgaatatctaatgcctcaagcaaatttattagagtttcagatgaatatatatttttgtaactggcaagtaaatgagtagaacagagctttttgcctaaaaatatttttataagtactcatttacatagtattcattattttaaatgacaaaatatcaaattggttctataaatagtaattgttttgaatatatccatacttaacatcatatgaaatccaaaatttaatgataaatttcatctggatgtgttattataaaagtcatctttttttcctttgtaaaatatccatgtaacatagcttccattactccatattttatgtatggttaaaattatcaaagtgcattatgtattttatattgtttatttttgtctgcatgaaagattggaatagtaaccgtgtatgataaatgttaataataataaagtgaaatgtagtatgacc

SEQ ID NO: 217242 - DNA, 4821 bp, Artificial Sequence
  derived and/or modified sequence
atgtccgaggatagtcgcggtgattcaagggccgagtcagcaaaagatctggagaagcagttgaggctgcgagtgtgcgtgctgtcagagcttcaaaaaactgagcgcgactatgtgggaacccttgagtttctggttagtgcctttctacacagaatgaaccagtgcgctgcttccaaggtcgacaagaacgttaccgaggagacagttaagatgctcttctccaatatcgaggacattctggctgtgcacaaagaattcctgaaggttgtcgaggagtgtctccatcccgaacctaatgcccaacaggaagtggggacatgttttctgcactttaaggataaatttagaatctacgacgagtattgttcaaaccatgagaaagctcagaagctgttgctagagctgaacaagattcggaccatccggacattcctgttaaactgtatgctcttaggcggacgtaagaacactgatgtacccttggagggatatttggtcacacctatacagaggatctgcaagtaccctttaattctcaaagagctgctaaagcgcaccccaagaaagcactctgactacgccgctgttatggaagccctccaggccatgaaagctgtttgctcaaacataaatgaagcaaaaaggcagatggaaaaactcgaggtgctagaggaatggcagagtcatatcgaaggatgggagggtagtaacataacggacacatgtaccgagatgctaatgtgcggagttctgcttaagatcagctccgggaatatccaagagagggtctttttcttgtttgacaacttgctggtgtactgtaagcgcaaacacagaaggcttaaaaactctaaggcttcaacagatggtcacagatacctgtttcggggaaggataaatactgaagttatggaagtggaaaacgtagacgacggcaccgctgattttcactccagcgggcacatcgtggtcaatggttggaagattcacaacaccgctaagaataagtggtttgtgtgtatggccaagacccccgaagaaaagcatgaatggttcgaagcgatccttaaagaacgggaacgtagaaaagggctaaagctcggcatggaacaggacacttgggtgatgatctccgaacaaggagagaagttatacaagatgatgtgccggcaaggcaacttgatcaaagaccgcaagcgtaagctgaccaccttccccaaatgtttcctgggctcagagttcgtaagttggctcctggagattggtgaaatccaccgccctgaagagggggtacacctggggcaagcactactggagaacggtataatccaccatgttacagataagcatcaattcaaaccagagcaaatgctttaccgctttagatatgacgacggaaccttctacccacggaacgagatgcaggacgttattagtaagggggtcaggctgtattgtcggctacactctttatttacccctgtaatccgcgacaaggattatcacttgcggacatataaatccgtcgtgatggcgaataaactcattgactggctaatcgcccaaggagactgccgcaccagagaagaggcgatgatctttggggttgggctgtgcgacaacgggtttatgcaccatgttcttgagaagagcgaattcaaagatgagccattattatttcgctttttctcagacgaggaaatggaaggttcaaatatgaaacacagattaatgaaacacgacctcaaggtcgttgaaaacgtaattgccaagtctctgctaataaagtccaatgaaggttcatacggatttggtctggaagacaagaacaaagttcccatcattaagctcgttgaaaaagggagtaacgccgaaatggccggtatggaagtgggcaagaaaattttcgctatcaatggagacctcgtctttatgcggcctttcaacgaagttgactgctttctgaaatcctgccttaatagtcgcaaacccctgagggttttagtttcaactaaaccaagagagaccgtgaagatcccggactcagctgatggactcggcttccagatacgaggattcggcccatccgtggttcatgctgtaggcagggggactgtggctgcagccgcagggctgcacccaggccagtgcattatcaaagttaacgggataaacgtgagcaaggagactcatgccagcgtcatcgcgcacgtcactgcctgtagaaagtaccgccgtccaacaaagcaggatagcatccaatgggtctataactcaatcgagtccgcacaagaggatctgcagaagagtcatagcaagccgccaggggatgaagcgggtgacgcgtttgactgtaaagtcgaggaagtgattgacaaattcaacaccatggctatcatcgacgggaagaaggaacatgtttccctgacggtggataatgtccacctcgaatatggtgtggtgtatgaatatgactcgacggctggcataaagtgcaatgtcgttgagaaaatgatagagccaaaaggatttttctcactgactgcaaagatcctcgaagcactcgcaaagagcgatgagcactttgtgcagaattgcactagtttgaacagcctgaatgaggtgatacctactgatctccagagcaagtttagtgctctttgtagcgagaggattgagcacctctgccagcgcatatccagctacaaaaagttttcaagagtgctgaaaaacagggcctggccgacgtttaagcaggctaagagtaagatctctcccctccacagtagcgacttctgtccaactaattgtcatgttaatgtgatggaggtgtcttaccctaaaacttcaacttccctaggatccgcgttcggagtgcagctagacagtcggaagcacaacagccatgacaaggaaaacaagagctctgaacagggaaagcttagccccatggtgtacatccaacatacaattactacaatggctgcgccatccggcttgtcgctcgggcagcaggacggccacgggcttcgatacctgttgaaggaggaagatctggaaacgcaggatatctatcagaaactactcggcaagctgcagaccgctctgaaagaggttgagatgtgtgtttgccagatcgacgacctgctttctagcattacttactcacctaaacttgaaaggaaaacgtctgagggaatcataccaacagactcagacaatgagaaaggcgagcgtaactctaaaagggtgtgtttcaacgtggccggagacgaacaggaggacagcggccatgatactatcagcaatcgggacagctatagcgattgcaattccaacaggaatagcattgcctcattcacctcaatatgctcatcccagtgtagttcctactttcactccgacgagatggacagtggcgatgagttacctcttagcgttaggatatcacatgataagcaagacaagatccactcgtgtctagaacatcttttctcccaagttgatagtattaccaatttactgaagggacaagctgttgtccgggcttttgatcagactaagtacctgacccctgggagagggctccaggaatttcaacaagagatggagcctaaattgtcttgtccaaagcgcctgagactgcatattaaacaggatccttggaacttaccctcgagtgtacgtaccctcgcgcagaacatccgtaaattcgtggaggaagttaaatgtcgtctcctgctagctctcctggagtactctgacagcgagacacagttgagacgggacatggtattttgtcaaaccctagtggcaactgtgtgcgcttttagcgaacagctaatggccgcacttaaccagatgtttgataactcaaaggaaaacgagatggaaacttgggaagcctctcgacgctggctggatcagattgccaacgctggcgtgctgtttcactttcagtctctcctcagtccgaatctgaccgatgaacaggccatgctagaggacacgttagtcgcactgtttgatctggagaaggtctccttttatttcaagccctcagaagaggaacccctcgtagcaaatgtgcccctgacttaccaggccgagggctcaaggcaggctctgaaggtctatttttacatagatagttaccacttcgaacagctgccccagcgtctcaagaatgggggaggtttcaaaatccaccccgtgctcttcgctcaggccctggaaagcatggaaggctattactacagggacaacgtttccgtggaagaattccaggctcagattaatgccgcaagtctcgaaaaagtgaagcagtacaaccaaaagctgcgcgctttttacctggacaaaagtaattcccccccaaacagcacttccaaagccgcttacgtggataaacttatgcgtcccctaaacgctcttgacgagctgtatcgattagtcgccagctttatacgctcaaagcgcacagcggcttgtgctaataccgcgtgtagcgctagcggggtaggcctgctgtccgtcagtagtgagctttgtaatcgcctgggcgcttgtcatattatcatgtgttcttccggggtgcacaggtgcacactgtctgtgacactggagcaagcaattattctcgctaggtctcacggcctcccgccaaggtatattatgcaggcaacagatgtcatgagaaagcaaggggctagggtccagaacaccgctaagaatctgggggttagggatcggaccccccagagcgctcccagactttataagctgtgtgagcccccaccgcctgccggtgaggagtat

SEQ ID NO: 217243 - DNA, 4821 bp, Artificial Sequence
  derived and/or modified sequence
atgagcgaggacagcagaggcgacagcagagccgagagcgccaaggacctggagaagcagctgagactgagagtgtgcgtgctgagcgagctgcagaagaccgagagagactacgtgggcaccctggagttcctggtgagcgccttcctgcacagaatgaaccagtgcgccgccagcaaggtggacaagaacgtgaccgaggagaccgtgaagatgctgttcagcaacatcgaggacatcctggccgtgcacaaggagttcctgaaggtggtggaggagtgcctgcaccccgagcccaacgcccagcaggaggtgggcacctgcttcctgcacttcaaggacaagttcagaatctacgacgagtactgcagcaaccacgagaaggcccagaagctgctgctggagctgaacaagatcagaaccatcagaaccttcctgctgaactgcatgctgctgggcggcagaaagaacaccgacgtgcccctggagggctacctggtgacccccatccagagaatctgcaagtaccccctgatcctgaaggagctgctgaagagaacccccagaaagcacagcgactacgccgccgtgatggaggccctgcaggccatgaaggccgtgtgcagcaacatcaacgaggccaagagacagatggagaagctggaggtgctggaggagtggcagagccacatcgagggctgggagggcagcaacatcaccgacacctgcaccgagatgctgatgtgcggcgtgctgctgaagatcagcagcggcaacatccaggagagagtgttcttcctgttcgacaacctgctggtgtactgcaagagaaagcacagaagactgaagaacagcaaggccagcaccgacggccacagatacctgttcagaggcagaatcaacaccgaggtgatggaggtggagaacgtggacgacggcaccgccgacttccacagcagcggccacatcgtggtgaacggctggaagatccacaacaccgccaagaacaagtggttcgtgtgcatggccaagacccccgaggagaagcacgagtggttcgaggccatcctgaaggagagagagagaagaaagggcctgaagctgggcatggagcaggacacctgggtgatgatcagcgagcagggcgagaagctgtacaagatgatgtgcagacagggcaacctgatcaaggacagaaagagaaagctgaccaccttccccaagtgcttcctgggcagcgagttcgtgagctggctgctggagatcggcgagatccacagacccgaggagggcgtgcacctgggccaggccctgctggagaacggcatcatccaccacgtgaccgacaagcaccagttcaagcccgagcagatgctgtacagattcagatacgacgacggcaccttctaccccagaaacgagatgcaggacgtgatcagcaagggcgtgagactgtactgcagactgcacagcctgttcacccccgtgatcagagacaaggactaccacctgagaacctacaagagcgtggtgatggccaacaagctgatcgactggctgatcgcccagggcgactgcagaaccagagaggaggccatgatcttcggcgtgggcctgtgcgacaacggcttcatgcaccacgtgctggagaagagcgagttcaaggacgagcccctgctgttcagattcttcagcgacgaggagatggagggcagcaacatgaagcacagactgatgaagcacgacctgaaggtggtggagaacgtgatcgccaagagcctgctgatcaagagcaacgagggcagctacggcttcggcctggaggacaagaacaaggtgcccatcatcaagctggtggagaagggcagcaacgccgagatggccggcatggaggtgggcaagaagatcttcgccatcaacggcgacctggtgttcatgagacccttcaacgaggtggactgcttcctgaagagctgcctgaacagcagaaagcccctgagagtgctggtgagcaccaagcccagagagaccgtgaagatccccgacagcgccgacggcctgggcttccagatcagaggcttcggccccagcgtggtgcacgccgtgggcagaggcaccgtggccgccgccgccggcctgcaccccggccagtgcatcatcaaggtgaacggcatcaacgtgagcaaggagacccacgccagcgtgatcgcccacgtgaccgcctgcagaaagtacagaagacccaccaagcaggacagcatccagtgggtgtacaacagcatcgagagcgcccaggaggacctgcagaagagccacagcaagccccccggcgacgaggccggcgacgccttcgactgcaaggtggaggaggtgatcgacaagttcaacaccatggccatcatcgacggcaagaaggagcacgtgagcctgaccgtggacaacgtgcacctggagtacggcgtggtgtacgagtacgacagcaccgccggcatcaagtgcaacgtggtggagaagatgatcgagcccaagggcttcttcagcctgaccgccaagatcctggaggccctggccaagagcgacgagcacttcgtgcagaactgcaccagcctgaacagcctgaacgaggtgatccccaccgacctgcagagcaagttcagcgccctgtgcagcgagagaatcgagcacctgtgccagagaatcagcagctacaagaagttcagcagagtgctgaagaacagagcctggcccaccttcaagcaggccaagagcaagatcagccccctgcacagcagcgacttctgccccaccaactgccacgtgaacgtgatggaggtgagctaccccaagaccagcaccagcctgggcagcgccttcggcgtgcagctggacagcagaaagcacaacagccacgacaaggagaacaagagcagcgagcagggcaagctgagccccatggtgtacatccagcacaccatcaccaccatggccgcccccagcggcctgagcctgggccagcaggacggccacggcctgagatacctgctgaaggaggaggacctggagacccaggacatctaccagaagctgctgggcaagctgcagaccgccctgaaggaggtggagatgtgcgtgtgccagatcgacgacctgctgagcagcatcacctacagccccaagctggagagaaagaccagcgagggcatcatccccaccgacagcgacaacgagaagggcgagagaaacagcaagagagtgtgcttcaacgtggccggcgacgagcaggaggacagcggccacgacaccatcagcaacagagacagctacagcgactgcaacagcaacagaaacagcatcgccagcttcaccagcatctgcagcagccagtgcagcagctacttccacagcgacgagatggacagcggcgacgagctgcccctgagcgtgagaatcagccacgacaagcaggacaagatccacagctgcctggagcacctgttcagccaggtggacagcatcaccaacctgctgaagggccaggccgtggtgagagccttcgaccagaccaagtacctgacccccggcagaggcctgcaggagttccagcaggagatggagcccaagctgagctgccccaagagactgagactgcacatcaagcaggacccctggaacctgcccagcagcgtgagaaccctggcccagaacatcagaaagttcgtggaggaggtgaagtgcagactgctgctggccctgctggagtacagcgacagcgagacccagctgagaagagacatggtgttctgccagaccctggtggccaccgtgtgcgccttcagcgagcagctgatggccgccctgaaccagatgttcgacaacagcaaggagaacgagatggagacctgggaggccagcagaagatggctggaccagatcgccaacgccggcgtgctgttccacttccagagcctgctgagccccaacctgaccgacgagcaggccatgctggaggacaccctggtggccctgttcgacctggagaaggtgagcttctacttcaagcccagcgaggaggagcccctggtggccaacgtgcccctgacctaccaggccgagggcagcagacaggccctgaaggtgtacttctacatcgacagctaccacttcgagcagctgccccagagactgaagaacggcggcggcttcaagatccaccccgtgctgttcgcccaggccctggagagcatggagggctactactacagagacaacgtgagcgtggaggagttccaggcccagatcaacgccgccagcctggagaaggtgaagcagtacaaccagaagctgagagccttctacctggacaagagcaacagcccccccaacagcaccagcaaggccgcctacgtggacaagctgatgagacccctgaacgccctggacgagctgtacagactggtggccagcttcatcagaagcaagagaaccgccgcctgcgccaacaccgcctgcagcgccagcggcgtgggcctgctgagcgtgagcagcgagctgtgcaacagactgggcgcctgccacatcatcatgtgcagcagcggcgtgcacagatgcaccctgagcgtgaccctggagcaggccatcatcctggccagaagccacggcctgccccccagatacatcatgcaggccaccgacgtgatgagaaagcagggcgccagagtgcagaacaccgccaagaacctgggcgtgagagacagaaccccccagagcgcccccagactgtacaagctgtgcgagccccccccccccgccggcgaggagtag

SEQ ID NO: 217244 - protein, 496 aa, Artificial Sequence
  derived and/or modified sequence
MTRGARLRSDARAQLNQLSLDGGTGSGQKGKCEEFPSSLSSVSPGLEAAALLLAVTMDPLETPIKDGILYQQHVKFGKKCWRKVWALLYAGGPSGVARLESWEVRDGGLGAAGDRSAGPGRRGERRVIRLADCVSVLPADGESCPRDTGAFLLTTTERSHLLAAQHRQAWMGPICQLAFPGTGEASSGSTDAQSPKRGLVPMEENSIYSSWQEVGEFPVVVQRTEAATRCQLKGPALLVLGPDAIQLREAKGTQALYSWPYHFLRKFGSDKGVFSFEAGRRCHSGEGLFAFSTPCAPDLCRAVAGAIARQRERLPELTRPQPCPLPRATSLPSLDTPGELREMPPGPEPPTSRKMHLAEPGPQSLPLLLGPEPNDLASGLYASVCKRASGPPGNEHLYENLCVLEASPTLHGGEPEPHEGPGSRSPTTSPIYHNGQDLSWPGPANDSTLEAQYRRLLELDQVEGTGRPDPQAGFKAKLVTLLSRERRKGPAPCDRP

SEQ ID NO: 217245 - protein, 144 aa, Artificial Sequence
  derived and/or modified sequence
MDPLETPIKDGILYQQHVKFGKKCWRKVWALLYAGGPSGVARLESWEVRDGGLGAAGDRSAGPGRRGERRVIRLADCVSVLPADGESCPRDTGAFLLTTTERSHLLAAQHRQAWMGPICQLAFPGTGEASSGSTDAQSPKRGLV

SEQ ID NO: 217246 - protein, 156 aa, Artificial Sequence
  derived and/or modified sequence
MDPLETPIKDGILYQQHVKFGKKCWRKVWALLYAGGPSGVARLESWEVRDGGLGAAGDRSAGPGRRGERRVIRLADCVSVLPADGESCPRDTGAFLLTTTERSHLLAAQHRQAWMGPICQLAFPGTGEASSGSTDAQSPKRGLVPMEENSIYSSWQ

SEQ ID NO: 217247 - protein, 43 aa, Artificial Sequence
  derived and/or modified sequence
MDPLETPIKDGILYQQHVKFGKKCWRKVWALLYAGGPSGVARL

SEQ ID NO: 217248 - protein, 213 aa, Artificial Sequence
  derived and/or modified sequence
MDPLETPIKDGILYQQHVKFGKKCWRKVWALLYAGGPSGVARLESWEVRDGGLGAAGDRSAGPGRRGERRVIRLADCVSVLPADGESCPRDTGAFLLTTTERSHLLAAQHRQAWMGPICQLAFPGTGEASSGSTDAQSPKRGLVPMEENSIYSSWQEVGEFPVVVQRTEAATRCQLKGPALLVLGPDAIQLREAKGTQALYSWPYHFLRKFGS

SEQ ID NO: 217249 - protein, 85 aa, Artificial Sequence
  derived and/or modified sequence
MDPLETPIKDGILYQQHVKFGKKCWRKVWALLYAGGPSGVARLESWEVRDGGLGAAGDRSAGPGRRGERRVIRLADCVSVLPADG

SEQ ID NO: 217250 - DNA, 1491 bp, Artificial Sequence
  derived and/or modified sequence
atgaccaggggcgctagactgaggagtgacgcccgagcccagctaaaccagctctcactggatggtgggacgggaagcggtcagaagggtaagtgtgaagaattcccttctagtctcagtagcgtcagccccggactcgaagccgccgccctactgctcgcggtgactatggacccgttggagacgccaatcaaagatggaattttgtaccaacagcatgtcaagtttggtaagaagtgctggcgcaaggtatgggcactgttgtatgccgggggcccatcaggtgtcgctcgtctggaatcatgggaagtgagggacggcggcctgggcgccgcaggggatcgatcagccgggcctggtcggaggggcgagcggcgcgtgatccgcctcgccgactgcgtgagtgtgctgcccgccgacggcgaatcttgtccacgggataccggagcgttccttttaaccacgacagaacgcagtcatctccttgccgcccagcaccgacaggcctggatgggtcccatatgccagttagcatttcccgggacaggcgaggctagctcaggctctactgatgcccagtcccccaaaagaggcctcgtccctatggaggaaaactccatatatagctcttggcaagaagtgggcgaattccctgtcgtggtccaaagaactgaagccgccactcgttgtcagctgaaaggccccgcgctcctggtacttggacctgacgcaattcagctcagggaggcaaaaggcactcaggcactctactcctggccctaccattttttacgcaagttcggctccgacaaaggtgtgttcagtttcgaggcggggaggcgatgccactccggtgaggggctcttcgctttttcaacgccttgcgcacctgatttatgccgggccgttgccggcgcaattgccaggcagagagagaggctgcccgagctgacaaggccccagccctgtccactgcccagagctacaagtttaccttcgttggacacccccggagaattacgcgaaatgcctcccggccctgaaccacccacatcacgaaaaatgcacctggcagaacctggaccccagtccctgcccctgctgctgggaccggagccgaatgacctagcctctggcctgtatgcgagcgtatgcaaaagagccagcggtccgcctggaaacgagcacctctacgaaaatctgtgtgttctggaggccagtcccaccttgcacggcggggagcctgaaccccatgagggaccaggatcgcggtcccccacaactagtcccatctaccacaacggccaggatctttcttggccgggacctgccaacgactctaccctggaagctcagtatcgccgtcttctggagcttgaccaagtggagggcactggcagaccggaccctcaagctggatttaaagcgaaactggtgaccctgctgagtcgagaacggaggaagggacccgcaccttgcgacagaccgtag

SEQ ID NO: 217251 - DNA, 42 bp, Artificial Sequence
  derived and/or modified sequence
atggatcctctcgagactccaatcaaggatggaatattgtag

SEQ ID NO: 217252 - DNA, 1491 bp, Artificial Sequence
  derived and/or modified sequence
atgaccaggggggcccggctgcggagtgatgcccgggcccagctgaaccagctgagcctggatggcggcaccggcagcggccagaagggcaaatgtgaggagttccccagcagcctgagctctgtgtccccaggcctggaggccgccgccctgctgctggccgtgaccatggaccccctggagacccccatcaaggatggcatcctgtaccagcagcacgtgaagtttgggaagaagtgctggaggaaggtgtgggccctgctgtatgctgggggccccagcggcgtggcccggctggagagctgggaggtgagagatggcggcctgggcgccgccggggacagatctgctggccctggaagaagaggagagaggagggtcatccggctggccgactgtgtgtctgtgctgcctgcagatggagagagctgcccccgggacaccggggccttcctgctgaccaccacagagaggagccacctgctggccgcccagcaccggcaggcctggatgggccccatctgccagctggccttccctggcaccggggaggccagcagcggcagcacagatgcccagagccccaagaggggcctggtgcccatggaggagaacagcatctacagctcctggcaggaggtgggggagttccctgtggtggtgcagaggacagaggccgccacccgctgccagctgaagggccctgccctgctggtgctgggcccagatgccatccagctgcgggaggccaagggcacccaggccctgtacagctggccctaccacttcctgaggaagtttggaagtgacaagggcgtcttctcctttgaggccggccgccgctgccacagcggggagggcctgtttgccttcagcaccccctgtgccccagacctgtgcagagctgtggccggggccatcgcccggcagcgggagcggctgcctgagctgacccggccccagccctgccccctgccccgggccaccagcctgcccagcctggacaccccaggagagctgcgggagatgcctcctggccctgagccccccaccagcaggaagatgcacctggccgagcccggcccccagagcctgcccctgctgctgggccctgagcccaatgacctggccagcggcctgtatgcctctgtgtgcaagagggccagcggccccccaggaaatgagcacctgtatgagaacctgtgtgtgctggaggccagccccaccctgcatggaggagagcctgagccccatgagggccctggcagccgcagccccaccaccagccccatctaccacaacggccaggacctgtcctggccaggccctgccaatgacagcaccctggaggcccagtaccgccgcctgctggagctggaccaggtggagggcaccggccgcccagacccccaggccggcttcaaggccaagctggtgaccctgctgagccgggagaggaggaagggccctgccccctgtgaccggccctag

SEQ ID NO: 217253 - DNA, 42 bp, Artificial Sequence
  derived and/or modified sequence
atggaccccctggagacccccatcaaggatggcatcctgtag

SEQ ID NO: 217254 - DNA, 1491 bp, Artificial Sequence
  derived and/or modified sequence
atgacccggggcgcccggctgcggagcgacgcccgggcccagctgaaccagctgagtctcgatggaggtactgggagcgggcagaagggaaagtgcgaggaattccccagctcgctaagctccgtgtcgccaggtttagaagccgccgctctgctcctggctgtcactatggatcctctagagacccccatcaaggatgggatcctttatcagcagcatgtaaagtttgggaaaaaatgctggcgcaaggtttgggcactgttgtacgcaggggggcctagtggcgtggcaagactcgagtcctgggaagtgcgcgacggaggccttggcgctgccggggaccggtcagcaggacctggcaggaggggggagcggcgtgttatccggttggcagactgcgtgtctgtgctgccagcggatggggagtcttgcccacgcgataccggcgctttcctacttacgacgacggaacgctcccatctgctggcagcccagcaccggcaagcgtggatgggtcctatatgtcagttggcgttcccaggcacaggagaggcaagctcagggagtacagacgcgcagtcccctaaacggggattagtgccgatggaggagaattctatctattcttcatggcaggaagttggggagttcccagtagtggtccagaggacagaagctgctaccagatgccagttaaaggggcccgcccttctggtgcttggacccgacgctatacagttacgagaggccaagggaactcaagcactgtactcttggccgtaccactttctgaggaaattcgggtcagacaagggcgtcttctccttcgaggccggcaggcgctgccattcgggcgaagggctgttcgcattttcgacaccctgtgcacctgacctgtgtagggcggtcgctggggctattgctcgccaaagagagaggcttcccgaattgacccgtccacaaccctgtccactgccccgcgcaacctcgctgccctctctcgacacgcccggggaactgagggaaatgcctcctggcccagaacccccaacatctcgtaaaatgcatctggccgagccgggccctcaaagcctgcccctgctactgggcccagaacctaatgatcttgccagcggtctgtacgcttcagtttgcaaacgggcctcaggcccaccaggtaatgaacacctgtacgagaacctatgtgttctggaagcgagccccacattgcatggaggagagcccgaaccgcatgaggggccaggaagtagaagccctacaacctctccgatctaccataacggtcaggacctctcttggccaggccccgccaacgactccaccttagaagcccagtaccggagactgctcgagctcgatcaggtggaggggaccggacgccccgacccgcaggccgggttcaaagctaaactcgtaacactgttgtcacgggagaggcgtaaaggtccggccccttgtgacaggccgtag

SEQ ID NO: 217255 - DNA, 1491 bp, Artificial Sequence
  derived and/or modified sequence
atgactcgcggagccaggttacgcagcgacgctagggcccagctaaaccaactctcccttgacgggggaaccggtagcggccagaagggcaagtgcgaagaatttccgagctctcttagctcggtttcacccggactggaggccgctgcattgctccttgctgtgacaatggaccccctggagacccccattaaagacggaattctctatcaacagcacgtgaagttcgggaaaaaatgttggcgcaaagtctgggctctgctatatgccggagggccttccggagttgcaagactggagtcctgggaggtacgggatggcggtcttggggctgcaggggaccgcagcgcaggccctggcaggcgcggagagaggcgcgtgatccggctggccgattgtgttagtgtgctgccagccgacggggagagttgcccccgagacaccggcgcatttttgctgaccacgaccgagcgctcacacctgctcgcagcccaacacagacaggcctggatgggacctatttgtcagctcgcttttcccggtactggagaggcctcaagtggatctacagacgcacaatctcccaagcggggtctcgtgcccatggaggagaattccatttactccagctggcaggaggtgggagagtttcctgtagtcgtacagcgaaccgaggccgctacacgctgccagctgaaaggacccgctctcctagtcctaggtcctgatgccattcaactgagggaagccaaggggacacaggcactatactcctggccctatcacttcctacggaagttcggatcggataagggagtcttcagtttcgaagccggacggcgatgtcattccggggaagggctgtttgcattttccacaccatgcgctccggatctctgcagagccgtcgcaggggcaatagctcggcagagggaacgcctccccgagctcactcgcccacaaccttgtcctctgcctcgagctacaagcctgccctctctagacacgcccggagaactcagggaaatgcccccaggtcccgaaccccctacatctcggaagatgcacttggctgagccaggtcctcagtcattacctctgctcctgggccctgagccgaatgacctggcttccgggctatacgccagcgtctgcaaaagagccagcgggcctccaggcaatgagcatctgtacgagaatctgtgcgtgctggaggcatctcctaccttgcatgggggagaacctgagcctcatgagggccctggctccagatctcctaccacgtccccgatctaccacaacggtcaagatctctcatggcctggccctgcaaacgattctactctcgaggcccaatatcgcagactactcgagttggatcaggtggaaggcactgggaggcctgaccctcaggctggatttaaagcaaaattggtgaccctgctctccagggagcgtcggaaaggcccagcaccttgcgacaggccatag

SEQ ID NO: 217256 - DNA, 42 bp, Artificial Sequence
  derived and/or modified sequence
atggacccactggagacaccgatcaaggatgggatactttag

SEQ ID NO: 217257 - DNA, 1491 bp, Artificial Sequence
  derived and/or modified sequence
atgaccagaggcgccagactgagaagcgacgccagagcccagctgaaccagctgagcctggacggcggcaccggcagcggccagaagggcaagtgcgaggagttccccagcagcctgagcagcgtgagccccggcctggaggccgccgccctgctgctggccgtgaccatggaccccctggagacccccatcaaggacggcatcctgtaccagcagcacgtgaagttcggcaagaagtgctggagaaaggtgtgggccctgctgtacgccggcggccccagcggcgtggccagactggagagctgggaggtgagagacggcggcctgggcgccgccggcgacagaagcgccggccccggcagaagaggcgagagaagagtgatcagactggccgactgcgtgagcgtgctgcccgccgacggcgagagctgccccagagacaccggcgccttcctgctgaccaccaccgagagaagccacctgctggccgcccagcacagacaggcctggatgggccccatctgccagctggccttccccggcaccggcgaggccagcagcggcagcaccgacgcccagagccccaagagaggcctggtgcccatggaggagaacagcatctacagcagctggcaggaggtgggcgagttccccgtggtggtgcagagaaccgaggccgccaccagatgccagctgaagggccccgccctgctggtgctgggccccgacgccatccagctgagagaggccaagggcacccaggccctgtacagctggccctaccacttcctgagaaagttcggcagcgacaagggcgtgttcagcttcgaggccggcagaagatgccacagcggcgagggcctgttcgccttcagcaccccctgcgcccccgacctgtgcagagccgtggccggcgccatcgccagacagagagagagactgcccgagctgaccagaccccagccctgccccctgcccagagccaccagcctgcccagcctggacacccccggcgagctgagagagatgccccccggccccgagccccccaccagcagaaagatgcacctggccgagcccggcccccagagcctgcccctgctgctgggccccgagcccaacgacctggccagcggcctgtacgccagcgtgtgcaagagagccagcggcccccccggcaacgagcacctgtacgagaacctgtgcgtgctggaggccagccccaccctgcacggcggcgagcccgagccccacgagggccccggcagcagaagccccaccaccagccccatctaccacaacggccaggacctgagctggcccggccccgccaacgacagcaccctggaggcccagtacagaagactgctggagctggaccaggtggagggcaccggcagacccgacccccaggccggcttcaaggccaagctggtgaccctgctgagcagagagagaagaaagggccccgccccctgcgacagaccctag

SEQ ID NO: 217258 - DNA, 42 bp, Artificial Sequence
  derived and/or modified sequence
atggaccccctggagacccccatcaaggacggcatcctgtag

SEQ ID NO: 217259 - DNA, 1729 bp, Artificial Sequence
  derived and/or modified sequence
aactcatgactcggggagccagactgcgatcagacgcgcgtgcccagctgaaccagctgtctctagacggagggacgggaagtggccagaaggggaagtgtgaggagttcccgtccagcctgtcatcagtctccccaggtcttgaagcggcggccctgctcctggccgtgaccatggaccctctggagacccctatcaaggatggcatcctctaccagcagcatgtcaagtttggcaagaagtgctggcggaaggtgtgggctctgctgtatgcaggaggcccatcaggcgtggcacggctggagagctgggaggtccgggatggtggcctgggagcagcgggtgacaggtcggcagggcctggccggcgaggggagcgacgggtcatccgcctggctgactgtgtgtccgtgctgccggctgacggcgagagctgcccccgggacaccggtgccttcctgctcaccaccaccgagcgaagccatctactggctgctcagcaccgccaggcctggatgggccccatctgccagctggccttcccggggacaggggaggcctcctcaggatccacagatgcccagtctcccaagaggggcctggtccccatggaggaaaactccatctactcctcctggcaggaagtgggcgagtttcccgtggtggtgcagaggactgaggccgccacccgctgccagctgaaggggccggccctgctggtgctgggcccagacgccatccagctgagggaggccaagggcacccaggccctctacagctggccctaccacttcctgcgcaagttcggctccgacaagggcgtgttctcctttgaggccggccgtcgctgccactcgggtgagggcctctttgccttcagcaccccctgtgcccctgacctgtgcagggctgtggccggggccatcgcccgccagcgggagcggctgccagagctgaccaggccccagccctgccccctgccacgggccacctctctgccctccctggacacccccggagagcttcgggagatgccaccaggacctgagccacccacgtccaggaaaatgcacctggccgagcccggaccccagagcctgccgctactgctaggcccggagcccaacgatctggcgtccgggctctacgcttcagtgtgcaagcgtgccagtgggcccccaggcaatgagcacctctatgagaacctgtgtgtgctggaggccagccccacgctgcacggtggggaacctgagccgcacgagggccccggcagccgcagccccacaaccagtcccatctaccacaacggccaggacttgagctggcccggcccggccaacgacagtaccctggaggcccagtaccggcggctgctggagctggatcaggtggagggcacaggccgccctgaccctcaggcaggtttcaaggccaagctggtgaccctgctgagtcgtgagcggaggaagggcccagccccttgtgaccggccctgaacgcccagcagagtggtggccagaggggagaggtgctccccctgggacaggagggtgggctggtgggcaaacattgggcccatgcagacacacgcctgtgtccaccctggcctgcaggaacaaggcaggccgcctgtggaggacctcagccctgccctgccctcctcatgaatagtgtgcagactcacagataataaagctcagagcagctcccggcaggggcactcacggca

SEQ ID NO: 217260 - DNA, 545 bp, Artificial Sequence
  derived and/or modified sequence
agacgcgcgtgcccagctgaaccaggtgcgtgagaaggctgccttcaggtggccgggggctccctccagtctccccaggtcttgaagcggcggccctgctcctggccgtgaccatggaccctctggagacccctatcaaggatggcatcctctaccagcagcatgtcaagtttggcaagaagtgctggcggaaggtgtgggctctgctgtatgcaggaggcccatcaggcgtggcacggctggagagctgggaggtccgggatggtggcctgggagcagcgggtgacaggtcggcagggcctggccggcgaggggagcgacgggtcatccgcctggctgactgtgtgtccgtgctgccggctgacggcgagagctgcccccgggacaccggtgccttcctgctcaccaccaccgagcgaagccatctactggctgctcagcaccgccaggcctggatgggccccatctgccagctggccttcccggggacaggggaggcctcctcaggatccacagatgcccagtctcccaagaggggcctggtc

SEQ ID NO: 217261 - DNA, 603 bp, Artificial Sequence
  derived and/or modified sequence
actcttcctgtcagggctgtgatgtttcagggacttctcctgaagccccttgggaggctgcttcttgcctcaggacccccacccactgcctgcctgtgccagccacctggagggagccctccattccgttgactgaggaggcagcagatgtcatagaactgccatttaggccacaagctctccctaagcctgctctgtgcccagctctgctgagctgtgaggacctagatgggccagggagatggctgcctgggaagccgtcaggcgaggggagagaaagacgcacacgcagaaacgtggacggcagtcacaagaccgctagcagatgaggcaggatctcagcatctggtgagagctgtctctagacggagggacgggaagtggccagaaggggaagtgtgaggagttcccgtccagcctgtcatcagtctccccaggtcttgaagcggcggccctgctcctggccgtgaccatggaccctctggagacccctatcaaggatggcatcctctaccagcagcatgtcaagtttggcaagaagtgctggcggaaggtgtgggctctgctgtatgcaggaggcccatcaggcgtggcacggctgga

SEQ ID NO: 217262 - DNA, 543 bp, Artificial Sequence
  derived and/or modified sequence
ctgtcagggctgtgatgtttcagggacttctcctgaagccccttgggaggctgcttcttgcctcaggacccccacccactgcctgcctgtgccagccacctggagggagccctccattccgttgactgaggaggcagcagatgtcatagaactgccatttaggccacaagctctccctaagcctgctctgtgcccagctctgctgagctgtgaggacctagatgggccagggagatggctgcctgggaagccgtcaggcgaggggagagaaagacgcacacgcagaaacgtggacggcagtcacaagaccgctagcagatgaggcaggatctcagcatctggtgagagaggtggtgctgaatgacctgaggctgttccagaataaagctgtctctagacggagggacgggaagtggccagaaggggaagtgtgaggagttcccgtccagcctgtcatcagtctccccaggtcttgaagcggcggccctgctcctggccgtgaccatggaccctctggagacccctatcaaggatggcatcctc

SEQ ID NO: 217263 - DNA, 467 bp, Artificial Sequence
  derived and/or modified sequence
atgactcggggagccagactgcgatcagacgcgcgtgcccagctgaaccaggtgcgtgagaaggctgccttcaggtggccgggggctccctccagctgtctctagacggagggacgggaagtggccagaaggggaagtgtgaggagttcccgtccagcctgtcatcagtctccccaggtcttgaagcggcggccctgctcctggccgtgaccatggaccctctggagacccctatcaaggatggcatcctctaccagcagcatgtcaagtttggcaagaagtgctggcggaaggtgtgggctctgctgtatgcaggaggcccatcaggcgtggcacggctggagagctgggaggtccgggatggtggcctgggagcagcgggtgacaggtcggcagggcctggccggcgaggggagcgacgggtcatccgcctggctgactgtgtgtccgtgctgccggctgacggc

SEQ ID NO: 217264 - protein, 325 aa, Artificial Sequence
  derived and/or modified sequence
MAHFVQGTSRMIAAESSTEHKECAEPSTRKNLMNSLEQKIRCLEKQRKELLEVNQQWDQQFRSMKELYERKVAELKTKLDAAERFLSTREKDPHQRQRKDDRQREDDRQRDLTRDRLQREEKEKERLNEELHELKEENKLLKGKNTLANKEKEHYECEIKRLNKALQDALNIKCSFSEDCLRKSRVEFCHEEMRTEMEVLKQQVQIYEEDFKKERSDRERLNQEKEELQQINETSQSQLNRLNSQIKACQMEKEKLEKQLKQMYCPPCNCGLVFHLQDPWVPTGPGAVQKQREHPPDYQWYALDQLPPDVQHKANGLSSVKKVHP

SEQ ID NO: 217265 - DNA, 978 bp, Artificial Sequence
  derived and/or modified sequence
atggcccacttcgtgcagggcaccagcagaatgatcgccgccgagagcagcaccgagcacaaggagtgcgccgagcccagcaccagaaagaacctgatgaacagcctggagcagaagatcagatgcctggagaagcagagaaaggagctgctggaggtgaaccagcagtgggaccagcagttcagaagcatgaaggagctgtacgagagaaaggtggccgagctgaagaccaagctggacgccgccgagagattcctgagcaccagagagaaggacccccaccagagacagagaaaggacgacagacagagagaggacgacagacagagagacctgaccagagacagactgcagagagaggagaaggagaaggagagactgaacgaggagctgcacgagctgaaggaggagaacaagctgctgaagggcaagaacaccctggccaacaaggagaaggagcactacgagtgcgagatcaagagactgaacaaggccctgcaggacgccctgaacatcaagtgcagcttcagcgaggactgcctgagaaagagcagagtggagttctgccacgaggagatgagaaccgagatggaggtgctgaagcagcaggtgcagatctacgaggaggacttcaagaaggagagaagcgacagagagagactgaaccaggagaaggaggagctgcagcagatcaacgagaccagccagagccagctgaacagactgaacagccagatcaaggcctgccagatggagaaggagaagctggagaagcagctgaagcagatgtactgccccccctgcaactgcggcctggtgttccacctgcaggacccctgggtgcccaccggccccggcgccgtgcagaagcagagagagcacccccccgactaccagtggtacgccctggaccagctgccccccgacgtgcagcacaaggccaacggcctgagcagcgtgaagaaggtgcacccctag

SEQ ID NO: 217266 - DNA, 978 bp, Artificial Sequence
  derived and/or modified sequence
atggcccatttcgtccagggaacctcccgcatgattgccgcggaaagctccactgaacacaaggagtgcgcggagcccagtacccgaaaaaacctcatgaactccctggagcagaaaatacggtgtcttgaaaagcagcgaaaagagctcctggaggtgaaccaacaatgggaccagcagttcaggtcaatgaaagagttgtatgagcgaaaggtggccgaactaaaaactaagctggatgccgccgaaagatttctgtcaactagggagaaggaccctcatcaacgacaacgcaaggacgacagacagcgagaggatgaccggcagcgcgatttaactcgtgaccgcctgcaaagagaggaaaaagagaaagaacggctgaacgaagagctgcatgaacttaaggaggaaaacaaactgctcaaaggaaagaatacattggccaacaaggagaaagagcactacgagtgcgaaattaaacggcttaacaaggcgctccaagatgctctgaacattaagtgtagtttctccgaagactgtctccgtaaaagcagagtcgagttctgtcatgaggagatgcgaaccgagatggaagtactcaaacagcaagtgcagatttacgaggaggattttaagaaggaaaggtccgaccgggagaggttgaatcaggaaaaagaggagctgcagcagatcaacgaaacatcacagagccagcttaaccggctcaattctcaaattaaggcctgccagatggaaaaagagaagctggaaaaacagctgaagcagatgtattgtcctccctgcaattgtggtctggtgtttcatttgcaagacccctgggtaccaacaggacctggggctgtccagaagcagcgtgagcaccccccggactatcagtggtacgcactggaccagctgcccccagatgtgcaacataaggccaacgggctgtcatcggtcaagaaagtacatccttag

SEQ ID NO: 217267 - DNA, 978 bp, Artificial Sequence
  derived and/or modified sequence
atggctcactttgtgcagggcacgagccgcatgatcgcggccgaatcatctacggagcacaaggagtgcgccgagcccagcacaagaaagaatttaatgaattccttagagcagaagattagatgcctcgagaagcagagaaaagaattactggaggtcaatcagcagtgggaccagcagtttcggtccatgaaagaattatatgaaagaaaggttgcggagctgaagacaaaattggacgctgcggaaaggtttctgagtacccgtgagaaggacccacatcaacggcagcgtaaggacgaccggcagcgggaggatgataggcaacgcgacttgactcgggaccgcctgcagagagaagagaaggagaaggaaaggcttaacgaggaactgcacgagttgaaggaggagaacaagttgctaaaaggtaagaacacactggcaaataaggaaaaagaacactacgagtgcgaaatcaagagactgaacaaagccctccaggacgccctcaatatcaaatgttccttctctgaagattgcttgaggaagagcagggttgagttctgccatgaggaaatgaggacggaaatggaggttcttaagcagcaggttcagatttatgaggaggatttcaagaaagagcggtctgaccgggagaggctgaaccaggaaaaagaggaactgcagcagataaacgagacatcccagtcccagttgaatcgtctgaactctcaaataaaggcctgccaaatggaaaaggaaaagctggagaagcagctcaaacagatgtactgcccaccatgcaactgtggattggtgttccatctgcaagatccatgggttcctaccggccctggcgctgttcaaaagcaaagagagcaccctcccgactatcagtggtacgcactggaccaactaccgccggatgtgcagcacaaggcaaacggcctctctagcgtgaagaaggttcatccatag

SEQ ID NO: 217268 - DNA, 978 bp, Artificial Sequence
  derived and/or modified sequence
atggcccactttgtgcagggcaccagcaggatgattgctgctgagagcagcacagagcacaaggaatgtgccgagcccagcaccaggaagaacctgatgaacagcctggagcagaagatccgctgcctggagaagcagaggaaggagctgctggaggtgaaccagcagtgggaccagcagttccgctccatgaaggagctgtatgaaaggaaggtggccgagctgaagaccaagctggatgctgctgagcgcttcctgagcacccgggagaaggacccccaccagaggcagaggaaggatgaccggcagagagaagatgaccggcagagggacctgacccgggaccggctgcagcgggaggagaaggagaaggagcggctgaatgaggagctgcacgagctgaaggaggagaacaagctgctgaagggcaagaacaccctggccaacaaggagaaggagcactatgaatgtgagatcaagaggctgaacaaggccctgcaggatgccctgaacatcaagtgcagcttcagcgaggactgcctgaggaagagccgggtggagttctgccacgaggagatgaggacagagatggaggtgctgaagcagcaggtgcagatctatgaggaggacttcaagaaggagaggagtgaccgggagcggctgaaccaggagaaggaggagctgcagcagatcaatgagaccagccagagccagctgaaccggctgaacagccagatcaaggcctgccagatggagaaggagaagctggagaagcagctgaagcagatgtactgccccccctgcaactgtggcctggtgttccacctgcaggacccctgggtgcccactggacctggagctgtgcagaagcagcgggagcaccccccagactaccagtggtacgccctggaccagctgcccccagatgtgcagcacaaggccaacggcctgagctctgtgaagaaggtgcacccctag

SEQ ID NO: 217269 - DNA, 978 bp, Artificial Sequence
  derived and/or modified sequence
atggcccacttcgtgcagggcaccagccggatgatcgccgccgagtcttctacagaacacaaggagtgcgccgaaccgtcaaccaggaagaatcttatgaattcactagaacagaaaattaggtgtctggaaaaacagagaaaagaactgctcgaggtcaaccagcagtgggaccagcaattccggagcatgaaggaactctacgagcgaaaggtagctgagctgaaaacaaaactcgatgcagctgaacggtttctgagcacacgtgagaaagaccctcaccagcggcagcgcaaagacgatcgacagcgggaggatgaccggcaaagagacctgacacgggaccggttgcaaagggaggagaaggaaaaggagagactcaacgaagaactgcatgaactgaaagaagaaaataaattgctcaaggggaaaaacaccctcgccaacaaggagaaagagcactatgaatgcgaaattaagaggctcaacaaggccttacaggacgccttaaacatcaaatgctcctttagtgaggactgtctgagaaagtcaagagttgagttctgccatgaggaaatgagaactgagatggaggtcttgaagcagcaggttcaaatctacgaagaggactttaagaaagagaggtctgaccgcgagcggctgaaccaggagaaggaagaattgcagcaaattaacgaaacctcgcagagccagctgaacaggctgaattcacagattaaagcatgccagatggagaaagagaagctggaaaagcaattaaagcagatgtactgccccccgtgcaactgtggactcgttttccacctgcaagacccatgggtgccaactggtcccggcgccgtacagaagcagagggagcatccacccgattaccagtggtacgccctggatcaactgccgccagacgtgcagcataaggccaatgggctgagtagtgtgaaaaaggtgcacccgtag

SEQ ID NO: 217270 - DNA, 978 bp, Artificial Sequence
  derived and/or modified sequence
atggcccacttcgtgcagggcaccagccggatgatcgccgccgagtcctccactgagcataaggagtgtgcagagcctagtactagaaagaacctcatgaactctctggagcagaaaatcagatgtctggaaaagcagcggaaggagctccttgaagtgaaccagcagtgggatcagcagttccgtagtatgaaggagttgtatgagaggaaagtcgccgagctcaagaccaagctggatgccgcggagcggtttttgtctacccgggagaaagaccctcaccagcggcaaagaaaggatgataggcagagagaggacgataggcagcgggatttgacaagagatagactgcaacgtgaagagaaagagaaggaacgcctcaatgaagagctgcatgagctcaaggaggagaataagctgttgaaagggaagaataccttggcaaacaaggaaaaggagcactatgagtgtgagatcaaacgcctgaataaagccttacaggatgcgctcaacattaaatgtagttttagcgaagactgcctgagaaagtcacgggtggaattttgtcacgaggagatgagaacagagatggaagttctgaagcaacaggtgcagatttacgaagaagacttcaaaaaagagcggtccgatcgtgaacggctaaaccaggaaaaagaagagctgcagcagatcaatgagaccagtcaatcacaactgaatcggctgaattcgcaaatcaaagcctgtcaaatggagaaggagaaactggaaaaacagctcaagcagatgtactgtccgccgtgtaactgtggcctggtctttcacctacaggacccgtgggtgcccactgggcccggcgcagtccagaagcagagggaacaccccccagactatcagtggtacgcacttgatcagctgccccctgatgtccagcacaaggccaatggattgtctagcgtcaagaaggtgcatccttag

SEQ ID NO: 217271 - DNA, 978 bp, Artificial Sequence
  derived and/or modified sequence
atggcccacttcgtccagggaacctccaggatgatcgcagccgagagctctacagaacataaagaatgtgctgagccttccacccgcaagaacttgatgaactctttggaacagaagattcgttgtctggagaaacagcgaaaagagttgctcgaagtaaatcagcagtgggatcagcagttccggtcgatgaaggagctgtacgagaggaaagttgctgaattaaagaccaagctcgatgccgcagagcgatttctaagtacacgagaaaaggaccctcatcaaaggcaacgcaaggatgaccgccagagagaagatgatcgccagagagatctaacccgagatcgattgcagcgggaggagaaagagaaagaaaggctcaacgaagaactgcatgagctgaaagaggaaaataaacttttgaaaggcaagaacacacttgcaaacaaggagaaagagcactatgaatgtgaaattaaacggctgaataaggccctccaagatgcccttaacattaaatgtagttttagtgaggattgcttgagaaaatcaagggtggaattctgccatgaggagatgagaacagaaatggaggtgctaaagcagcaggtgcagatctacgaagaagattttaagaaagagaggtctgacagggagaggttgaatcaggagaaggaggaactccagcagattaatgagactagtcagtctcagcttaatagactaaatagtcaaatcaaggcctgtcagatggagaaagaaaaactcgagaaacaactcaaacagatgtattgcccgccttgcaactgcggcttggtgttccatctgcaggacccctgggtgcccactgggccaggagctgtgcagaaacagagagagcatcctcctgactaccaatggtacgctctggaccagttgcctccagacgtgcagcacaaagccaacggactctctagcgtgaaaaaagtccatccttag

SEQ ID NO: 217272 - DNA, 978 bp, Artificial Sequence
  derived and/or modified sequence
atggctcactttgtgcaagggaccagtaggatgatcgctgcagagagctcaactgaacataaggaatgtgcagaaccttccacaagaaagaacctgatgaacagcttggagcaaaaaatcagatgtctcgaaaagcaaaggaaggagcttctggaggtgaatcagcaatgggaccagcagtttcggagcatgaaggaactgtacgagcgcaaggtggccgaactcaagactaagttagacgcggctgagcggttcctgtcaacacgagagaaagacccgcatcagaggcagcgcaaagacgacaggcagcgtgaggacgatcgacagagagacctcacaagggaccgactccagcgcgaagaaaaagaaaaggaacgattgaacgaggaactgcacgaactgaaggaagaaaacaagctcctaaagggaaagaacacgcttgctaataaagagaaggagcactatgaatgtgaaattaagcggctgaataaagccctccaggatgctctcaatatcaaatgtagcttttcagaggattgcttgcggaaaagtcgcgtcgaattctgccatgaggaaatgcggacagagatggaagtactgaagcagcaggtgcagatctacgaagaagacttcaagaaggagagatccgaccgtgaaaggcttaaccaggaaaaagaggaactccaacaaataaatgagaccagccagtcccagttgaacagactaaattctcaaatcaaagcgtgccagatggagaaagagaaactggagaagcagcttaaacagatgtactgtccaccgtgtaattgcggccttgttttccatctgcaggacccatgggtccctacgggaccaggtgccgtacagaagcagcgagaacatccgcctgactaccaatggtatgccctggatcagctgcccccagatgtgcagcataaagccaacgggctgtcaagcgtgaagaaggtccatccctag

SEQ ID NO: 217273 - DNA, 978 bp, Artificial Sequence
  derived and/or modified sequence
atggcccatttcgtgcaaggcacatcacgcatgattgcagcagaatcttctactgaacacaaagagtgtgcagaaccaagtaccagaaagaatcttatgaatagcttggagcaaaaaatcaggtgtctcgaaaagcagcggaaagaactgctggaggtgaaccagcagtgggaccaacaattccgatctatgaaagagctgtacgaacgtaaagtggccgagctgaagacaaaactcgatgccgcagaacgttttttgagcacacgagagaaagacccacatcagcgccagcggaaagatgacagacagagagaagatgacagacagcgggatctcacccgagaccgtctgcaaagagaagaaaaggagaaggaaaggttgaatgaagagctgcatgaactcaaagaggaaaacaaactgttgaaaggaaagaataccctggccaataaggaaaaagaacactatgaatgcgaaatcaagagacttaacaaagctctgcaggacgccctgaacataaaatgcagcttttccgaagattgcttgcggaagtctagagtggaattttgccacgaagaaatgcgcactgagatggaggtcctgaagcaacaggtccagatatacgaggaagactttaaaaaagagagatcagatcgcgagagacttaatcaggagaaagaggaattgcagcagatcaacgagacatctcaatcacaactgaaccgccttaattcccagatcaaggcctgccagatggaaaaagaaaaactcgagaagcaacttaaacaaatgtactgccccccctgtaactgtggcttagtgttccacctacaggatccctgggtgccgaccggtccaggtgccgttcagaagcaacgagaacacccaccagactatcagtggtacgccctcgatcaattacccccggatgttcaacataaagctaacggcctgtcctccgtaaagaaggtacacccatag

SEQ ID NO: 217274 - DNA, 978 bp, Artificial Sequence
  derived and/or modified sequence
atggcccattttgttcagggaacttcacgaatgatcgctgcagaaagcagtacagagcataaggaatgtgctgagccctccaccaggaaaaacctcatgaattctctcgagcagaaaattcggtgtctggagaagcaacggaaagagttgctggaagtaaaccaacaatgggaccagcagttccgtagcatgaaagagctttacgaacgaaaagttgctgaattgaagaccaaactcgacgctgctgaaagattcctctctacccgggagaaagacccccaccaaagacagcgcaaggacgatagacaacgagaggacgacaggcaacgggacttgaccagggatcgcttacagagagaagagaaagaaaaggaaaggttgaacgaagaactgcatgagctgaaggaggaaaacaagttattaaaaggtaagaacactctcgcaaataaagaaaaggaacattacgagtgcgaaattaagagattgaataaggcattgcaggacgctctgaatatcaaatgcagtttctcagaggactgtctaagaaagagtcgagtggagttctgccacgaggaaatgagaaccgagatggaagtccttaagcaacaggtccagatatacgaggaagactttaaaaaagagagatcagatcgcgagagacttaatcaggagaaagaggaattgcagcagatcaacgagacatctcaatcacaactgaaccgccttaattcccagatcaaggcctgccagatggaaaaagaaaaactcgagaagcaacttaaacaaatgtactgccccccctgtaactgtggcttagtgttccacctacaggatccctgggtgccgaccggtccaggtgccgttcagaagcaacgagaacacccaccagactatcagtggtacgccctcgatcaattacccccggatgttcaacataaagctaacggcctgtcctccgtaaagaaggtacacccatag

SEQ ID NO: 217275 - protein, 376 aa, Artificial Sequence
  derived and/or modified sequence
MSESQDEVPDEVENQFILRLPLEHACTVRNLARSQSVKMKDKLKIDLLPDGRHAVVEVEDVPLAAKLVDLPCVIESLRTLDKKTFYKTADISQMLVCTADGDIHLSPEEPAASTDPNIVRKKERGREEKCVWKHGITPPLKNVRKKRFRKTQKKVPDVKEMEKSSFTEYIESPDVENEVKRLLRSDAEAVSTRWEVIAEDGTKEIESQGSIPGFLISSGMSSHKQGHTSSEYDMLREMFSDSRSNNDDDEDEDDEDEDEDEDEDEDEDKEEEEEDCSEEYLERQLQAEFIESGQYRANEGTSSIVMEIQKQIEKKEKKLHKIQNKAQRQKDLIMKVENLTLKNHFQSVLEQLELQEKQKNEKLISLQEQLQRFLKK

SEQ ID NO: 217276 - protein, 462 aa, Artificial Sequence
  derived and/or modified sequence
MECPEGQLPISSENDSTPTVSTSEVTSQQEPQILVDRGSETTYESSADIAGDEGTQIPADEDTQTDADSSAQAAAQAPENFQEGKDMSESQDEVPDEVENQFILRLPLEHACTVRNLARSQSVKMKDKLKIDLLPDGRHAVVEVEDVPLAAKLVDLPCVIESLRTLDKKTFYKTADISQMLVCTADGDIHLSPEEPAASTDPNIVRKKERGREEKCVWKHGITPPLKNVRKKRFRKTQKKVPDVKEMEKSSFTEYIESPDVENEVKRLLRSDAEAVSTRWEVIAEDGTKEIESQGSIPGFLISSGMSSHKQGHTSSEYDMLREMFSDSRSNNDDDEDEDDEDEDEDEDEDEDEDKEEEEEDCSEEYLERQLQAEFIESGQYRANEGTSSIVMEIQKQIEKKEKKLHKIQNKAQRQKDLIMKVENLTLKNHFQSVLEQLELQEKQKNEKLISLQEQLQRFLKK

SEQ ID NO: 217277 - DNA, 1389 bp, Artificial Sequence
  derived and/or modified sequence
atggagtgccccgagggccagctgcccatcagcagcgagaacgacagcacccccaccgtgagcaccagcgaggtgaccagccagcaggagccccagatcctggtggacagaggcagcgagaccacctacgagagcagcgccgacatcgccggcgacgagggcacccagatccccgccgacgaggacacccagaccgacgccgacagcagcgcccaggccgccgcccaggcccccgagaacttccaggagggcaaggacatgagcgagagccaggacgaggtgcccgacgaggtggagaaccagttcatcctgagactgcccctggagcacgcctgcaccgtgagaaacctggccagaagccagagcgtgaagatgaaggacaagctgaagatcgacctgctgcccgacggcagacacgccgtggtggaggtggaggacgtgcccctggccgccaagctggtggacctgccctgcgtgatcgagagcctgagaaccctggacaagaagaccttctacaagaccgccgacatcagccagatgctggtgtgcaccgccgacggcgacatccacctgagccccgaggagcccgccgccagcaccgaccccaacatcgtgagaaagaaggagagaggcagagaggagaagtgcgtgtggaagcacggcatcaccccccccctgaagaacgtgagaaagaagagattcagaaagacccagaagaaggtgcccgacgtgaaggagatggagaagagcagcttcaccgagtacatcgagagccccgacgtggagaacgaggtgaagagactgctgagaagcgacgccgaggccgtgagcaccagatgggaggtgatcgccgaggacggcaccaaggagatcgagagccagggcagcatccccggcttcctgatcagcagcggcatgagcagccacaagcagggccacaccagcagcgagtacgacatgctgagagagatgttcagcgacagcagaagcaacaacgacgacgacgaggacgaggacgacgaggacgaggacgaggacgaggacgaggacgaggacgaggacaaggaggaggaggaggaggactgcagcgaggagtacctggagagacagctgcaggccgagttcatcgagagcggccagtacagagccaacgagggcaccagcagcatcgtgatggagatccagaagcagatcgagaagaaggagaagaagctgcacaagatccagaacaaggcccagagacagaaggacctgatcatgaaggtggagaacctgaccctgaagaaccacttccagagcgtgctggagcagctggagctgcaggagaagcagaagaacgagaagctgatcagcctgcaggagcagctgcagagattcctgaagaagtag

SEQ ID NO: 217278 - DNA, 1389 bp, Artificial Sequence
  derived and/or modified sequence
atggaatgtcccgagggacagctgcccatcagcagtgagaacgactcaactcctacagttagcaccagtgaggtgacatcccagcaggaacctcaaattctggttgatcgtggctctgagaccacgtacgagagctcagccgacattgccggcgacgaaggtacacaaattccagcggatgaggacactcagaccgatgccgatagcagtgcacaggccgccgcccaggcccccgagaactttcaggagggaaaggacatgagtgagagccaggatgaggttcccgatgaagtcgaaaatcagtttattcttcggctacctcttgagcatgcatgcaccgtaagaaatctcgcacgatcccagtcagttaaaatgaaagataagcttaagatcgatctcctgcctgatggacgacacgcagtggtagaagtggaggatgtgccgctagctgccaagcttgtggacttgccttgcgtgatcgaatctctccggactcttgataagaaaactttctacaaaacagccgacatttcgcagatgctggtatgcactgccgacggtgacatacatctctctcctgaagaacccgccgcgtccactgatccaaacatcgtacggaagaaagaacgcggtagagaagagaaatgtgtgtggaagcacggaatcactcctcccttaaagaacgtccgcaagaaacgcttccggaaaacacaaaagaaggtccccgatgtgaaagaaatggagaaaagttcctttaccgaatacattgaatctccggatgttgaaaatgaagtgaagcgcttattgcgttcggatgccgaggcagtctccactagatgggaggtaattgctgaagacgggacaaaggagattgagagccaaggatccataccaggattccttatctccagtggaatgtcatcccacaagcagggtcatacctccagcgaatacgacatgcttagggaaatgttctccgacagtaggagcaataacgatgatgatgaggatgaagatgatgaagatgaggacgaggacgaggatgaggatgaggacgaggataaagaagaagaagaagaggattgtagcgaggaatacctcgagaggcaactccaggcagaatttatcgagtctggacagtatcgcgctaacgaaggcacttcatccatcgtcatggagatacagaaacagattgaaaaaaaggagaagaaactgcacaagatacagaataaagcccagcgtcaaaaggatctgatcatgaaggtggaaaatctgactcttaagaatcattttcaatccgtcctggagcaactggagctgcaagagaaacaaaaaaacgagaagctcatcagtcttcaagagcagttgcagagatttcttaagaagtag

SEQ ID NO: 217279 - DNA, 1389 bp, Artificial Sequence
  derived and/or modified sequence
atggagtgcccagagggccagctgcccatcagcagtgaaaatgacagcacccccaccgtgtccaccagcgaggtgaccagccagcaggagccccagatcctggtggaccggggcagcgagaccacctatgagagcagcgctgacattgctggagatgagggcacccagatcccagcagatgaggacacccagacagatgctgacagcagcgcccaggccgccgcccaggcccctgagaacttccaggagggcaaggacatgtctgagagccaggatgaggtgcctgatgaggtggagaaccagttcatcctgcggctgcccctggagcacgcctgcaccgtgaggaacctggcccggagccagagcgtgaagatgaaggacaagctgaagattgacctgctgcctgatggaagacatgctgtggtggaggtggaggatgtgcccctggccgccaagctggtggacctgccctgcgtcatcgagagcctgcggaccctggacaagaagaccttctacaagacagctgacatcagccagatgctggtgtgcacagcagatggagacatccacctgagccctgaggagcctgctgccagcacagaccccaacatcgtgaggaagaaggagcggggccgggaggagaagtgtgtgtggaagcacggcatcaccccacccctgaagaatgtgaggaagaagcgcttcaggaagacccagaagaaggtgcctgatgtgaaggagatggagaagagcagcttcacagagtacatcgagagcccagatgtggagaatgaggtgaagaggctgctgcggagtgatgctgaggccgtgtccacccgctgggaggtgattgctgaagatggcaccaaggagattgagagccagggcagcatccctggcttcctgatcagcagcggcatgagcagccacaagcagggccacaccagcagtgaatatgacatgctgcgggagatgttcagtgacagccgcagcaacaatgatgatgatgaagatgaagatgatgaagatgaagatgaagatgaagatgaagatgaagatgaggacaaggaggaggaggaggaggactgcagcgaggagtacctggagcggcagctgcaggccgagttcatcgagagcggccagtaccgggccaatgaaggcaccagcagcatcgtgatggagatccagaagcagatcgagaagaaggagaagaagctgcacaagatccagaacaaggcccagaggcagaaggacctgatcatgaaggtggagaacctgaccctgaagaaccacttccagagcgtgctggagcagctggagctgcaggagaagcagaagaatgagaagctgatcagcctgcaggagcagctgcagcgcttcctgaagaagtag

SEQ ID NO: 217280 - DNA, 1389 bp, Artificial Sequence
  derived and/or modified sequence
atggagtgccccgagggccagctgcccatcagcagcgagaacgactctactccgacggtgtcaacgtcagaggtgacgtcccagcaggaaccacagatccttgtggataggggttctgagacaacctatgaatcgtcggctgacatagctggggacgaaggaactcagatcccagccgatgaagatactcaaaccgacgccgatagctccgctcaagcagctgctcaagcgccggagaattttcaggagggcaaggatatgtcggagtcccaggacgaggtgccagacgaggtggaaaaccagttcatacttcggctacctctggaacatgcttgtacggtgcgcaacctcgcccgctcccagagcgtcaagatgaaagataaactcaagatcgaccttttgcctgacggccggcacgccgtcgttgaggtcgaggatgtccctctcgctgctaaactagtcgacctgccttgtgtgatcgagtcgttacgcacactggataaaaagaccttctataaaactgccgatatctcacagatgctggtatgtacagctgacggagatattcatctgagcccagaggaacctgcagctagcacagaccctaacatagtgcgtaaaaaggaacgcgggagggaggagaaatgtgtctggaaacacgggatcacaccccccctgaagaacgtgcgcaaaaagcgatttagaaaaacccaaaagaaggtgcccgacgttaaagaaatggaaaaatcttctttcactgaatacatcgagtctcccgacgtggagaacgaagtgaaaagactgcttcggagtgatgccgaagcagtgtcgactcggtgggaggtaatcgcagaggacggtacaaaggaaatagaatcacaaggcagtatacccggctttctcatatccagtggcatgtcctcgcacaaacagggccacacgtcaagcgagtacgacatgctgagggagatgttttcagactctagatctaataatgacgacgatgaggacgaagacgacgaggatgaagacgaggatgaagatgaagatgaggatgaggacaaggaggaggaggaagaggactgttcagaggagtaccttgaacggcagctgcaggctgaatttatcgaatccggtcagtacagagccaatgagggtaccagcagcatcgttatggaaattcaaaagcagatcgaaaaaaaggaaaagaagctgcataagatccaaaacaaggcccaacgacaaaaggacctgatcatgaaagttgagaatttgactctgaagaatcacttccagagtgtgttggagcagctggagctgcaagagaagcaaaaaaacgaaaaattgatcagcctccaggaacagttacagagatttctcaaaaaatag

SEQ ID NO: 217281 - DNA, 1389 bp, Artificial Sequence
  derived and/or modified sequence
atggaatgtcccgagggacagctgcccatttcaagcgaaaatgattctacacccactgtaagtacttccgaggtgacaagtcaacaggagcctcagattcttgtggaccgtggcagcgaaaccacatatgagtccagtgcagacatcgctggagatgagggtacccagatccccgctgatgaggacactcagacagacgctgacagctcagcccaagcagccgctcaggccccagagaactttcaggagggcaaggacatgtcagaaagccaggatgaagtcccagacgaagtcgagaatcaatttatcctcagactgcccctcgagcatgcctgcactgtgagaaacctcgcacgctctcagagcgtgaaaatgaaagataagctgaagattgatctcttgcctgacggcaggcacgccgtagtagaagtggaggacgtcccgttggcagctaagttagtcgacctgccttgcgtaatcgagtccttaagaacactggacaagaagactttttataagacagctgatattagccaaatgttagtgtgtacagcggacggcgatattcatctgagtccagaggaacccgctgcctccaccgatccgaatatcgtgcgtaagaaagagagggggcgagaagagaagtgcgtctggaaacacggcattaccccacctctgaagaacgtgaggaaaaagcgctttagaaagactcagaagaaggtccccgatgtaaaagagatggagaagagtagtttcactgagtacattgagagtcctgatgttgagaatgaagtgaagcggctactcaggagcgacgctgaggccgtaagtacacgctgggaggtgatcgccgaggacggcaccaaagagatcgagagccaggggtccataccaggttttctaattagctcaggcatgagctcccacaaacaggggcacacctcatctgagtacgatatgctgcgtgaaatgttctcagattctcgtagtaataacgatgacgacgaagacgaggatgacgaggatgaagacgaggacgaagatgaggacgaggatgaagataaagaagaggaagaagaagattgttctgaagagtacttggagcgccagctgcaggccgaattcatcgaatcggggcagtaccgtgccaacgagggaacatcgtcaattgttatggaaatacagaagcagatcgaaaagaaagaaaaaaaactgcataagatccagaacaaagcccagagacaaaaagacctgattatgaaggtcgagaacctcacattgaagaaccatttccagtcagtgctcgagcagctggagttgcaggagaaacagaagaatgagaagttgatatctctccaggaacagctccagagatttttaaaaaagtag

SEQ ID NO: 217282 - DNA, 1579 bp, Artificial Sequence
  derived and/or modified sequence
gcgttcgcctctacgttccgcgcgggagcccacgcgcggttcgtccggaacccacagaccagagacgcaggtcccagccttttcggtgtcggcgccagttcccggaggagcggacatgagtgaaagccaggatgaagttcctgatgaagttgagaaccagtttatattgcgtctgcctctggaacatgcttgtactgtcaggaacctagcacgttctcaaagtgtcaagatgaaggataaactaaaaattgacttattgcctgatgggcgccatgcagttgttgaagtagaagatgtcccactagctgctaagctggttgacttgccttgtgttattgaaagcctgagaacgcttgataaaaaaaccttttataaaacagcagacatttctcagatgcttgtgtgcactgctgatggtgatatccacctttctccagaagaaccagctgcctctactgatcctaatatagtcaggaaaaaagaaagggggagagaagaaaaatgtgtctggaagcatggcattacgccaccacttaagaatgtcagaaagaaaaggttccggaaaacacaaaaaaaggtccctgatgtcaaagaaatggaaaaaagcagctttactgagtacattgaatctccagacgtggaaaatgaagtaaagagactgctgcgttcggatgctgaagccgtaagtacccgttgggaagtcattgctgaagatggaaccaaggaaatagaaagtcaaggctccatcccaggatttttgatatcctcgggaatgagcagccacaagcagggtcatacctcgtcagaatatgatatgcttcgggagatgttcagtgattctagaagtaacaatgatgatgatgaggatgaggatgatgaagatgaggatgaggatgaggatgaggatgaagatgaagacaaagaagaggaggaggaagattgttctgaagagtatctggaaaggcagctgcaggccgagtttattgaatctggccagtatagggcaaatgaaggtaccagttcaatagtcatggaaattcagaagcagattgagaaaaaggagaaaaagctccataagattcagaataaagcacaaagacagaaggatctcatcatgaaagtggaaaacctgacactcaagaatcattttcagtctgtgctggagcagcttgagttacaggaaaaacaaaaaaatgagaagctcatttccctacaggaacagttgcagcgttttctgaagaagtgaggagagccattggcgtggcccacaaaccttggattcaccatccagactgcagattggatgaaactgtgcacgtttttgtcccttcagttgccttatgttgaatcagttatatttatctgtaccttctttgctacttaaaatatgctcacagtttgtagtcatgtagaaaaggccagtataaaaatgtagtagacttaaagaccccactcgaccatgagactttctctttgtcaatttgggaattattattattaatttagaaatggggtcttgttatgttgcccaggctgaattcagactcctgggcttaagggatccttccgcctcagcctc

SEQ ID NO: 217283 - DNA, 2341 bp, Artificial Sequence
  derived and/or modified sequence
acgaggtgggccatggagtgccccgagggacagctccccatttcttcagaaaatgattcaacaccaacagtttcaacatcggaagtaactagccaacaagaaccccaaattcttgtcgaccgtgggtctgaaaccacctatgaaagcagcgccgacattgctggcgacgaaggcacccagattcctgccgacgaggacactcaaacggatgcggacagcagcgcccaggctgctgcccaggccccagaaaacttccaggaagggaaagacatgagtgaaagccaggatgaagttcctgatgaagttgagaaccagtttatattgcgtctgcctctggaacatgcttgtactgtcaggaacctagcacgttctcaaagtgtcaagatgaaggataaactaaaaattgacttattgcctgatgggcgccatgcagttgttgaagtagaagatgtcccactagctgctaagctggttgacttgccttgtgttattgaaagcctgagaacgcttgataaaaaaaccttttataaaacagcagacatttctcagatgcttgtgtgcactgctgatggtgatatccacctttctccagaagaaccagctgcctctactgatcctaatatagtcaggaaaaaagaaagggggagagaagaaaaatgtgtctggaagcatggcattacgccaccacttaagaatgtcagaaagaaaaggttccggaaaacacaaaaaaaggtccctgatgtcaaagaaatggaaaaaagcagctttactgagtacattgaatctccagacgtggaaaatgaagtaaagagactgctgcgttcggatgctgaagccgtaagtacccgttgggaagtcattgctgaagatggaaccaaggaaatagaaagtcaaggctccatcccaggatttttgatatcctcgggaatgagcagccacaagcagggtcatacctcgtcagaatatgatatgcttcgggagatgttcagtgattctagaagtaacaatgatgatgatgaggatgaggatgatgaagatgaggatgaggatgaggatgaggatgaagatgaagacaaagaagaggaggaggaagattgttctgaagagtatctggaaaggcagctgcaggccgagtttattgaatctggccagtatagggcaaatgaaggtaccagttcaatagtcatggaaattcagaagcagattgagaaaaaggagaaaaagctccataagattcagaataaagcacaaagacagaaggatctcatcatgaaagtggaaaacctgacactcaagaatcattttcagtctgtgctggagcagcttgagttacaggaaaaacaaaaaaatgagaagctcatttccctacaggaacagttgcagcgttttctgaagaagtgaggagagccattggcgtggcccacaaaccttggattcaccatccagactgcagattggatgaaactgtgcacgtttttgtcccttcagttgccttatgttgaatcagttatatttatctgtaccttctttgctacttaaaatatgctcacagtttgtagtcatgtagaaaaggccagtataaaaatgtagtagacttaaagaccccactcgaccatgagactttctctttgtcaatttgggaattattattattaatttagaaatggggtcttgttatgttgcccaggctgaattcagactcctgggcttaagggatccttccgcctcagcctcctgagtagctgggactacagttgtgcaccaccacaccaaacaagaattgattatattgcttctgtgctatggtaccagcagattattcagccatgcttctaaaggcagtctagcctagaggccgtacagctgtttggtttgcatatgttttagcttttcttttggtttttagtatttcctaaaacataggggaaaaaacgaggtcatttctactaagcactaggacctgccatagtgagtttaagtgcctaccttgcagcagttaatactagattgtgttctgtctctgttcaggtaacaggactgcattcctgctcaaggatgattccttgctgctgcttatgttctgttgtttttaggatggagctggttgttattcaccaactaagggaacagttagagcagagatgaagaaattatgaactgttatccttattctgagccttctcctcctaaccctcatcagttaaggttaggaagaacaagatgccataatgcctatgaagacttctttaacaatcttgtttgggtttttttctaggtatattattagtgttttatggtctatgttctttaagcaataaataaattgttcattttaaatgga

SEQ ID NO: 217284 - protein, 258 aa, Artificial Sequence
  derived and/or modified sequence
MDGIIEQKSMLVHSKISDAGKRNGLINTRNLMAESRDGLVSVYPAPQYQSHRVGASTVPASLDSSRSEPMQQLLDPNTLQQSVESRYRPNIILYSEGVLRSWGDGVAADCCETTFIEDRSPTKDSLEYPDGKFIDLSADDIKIHTLSYDVEEEEEFQELESDYSSDTESEDNFLMMPPRDHLGLSVFSMLCCFWPLGIAAFYLSHETNKAVAKGDLHQASTSSRRALFLAVLSITIGTGVYVGVAVALIAYLSKNNHL

SEQ ID NO: 217285 - DNA, 777 bp, Artificial Sequence
  derived and/or modified sequence
atggacggcatcatcgagcagaagagcatgctggtgcacagcaagatcagcgacgccggcaagagaaacggcctgatcaacaccagaaacctgatggccgagagcagagacggcctggtgagcgtgtaccccgccccccagtaccagagccacagagtgggcgccagcaccgtgcccgccagcctggacagcagcagaagcgagcccatgcagcagctgctggaccccaacaccctgcagcagagcgtggagagcagatacagacccaacatcatcctgtacagcgagggcgtgctgagaagctggggcgacggcgtggccgccgactgctgcgagaccaccttcatcgaggacagaagccccaccaaggacagcctggagtaccccgacggcaagttcatcgacctgagcgccgacgacatcaagatccacaccctgagctacgacgtggaggaggaggaggagttccaggagctggagagcgactacagcagcgacaccgagagcgaggacaacttcctgatgatgccccccagagaccacctgggcctgagcgtgttcagcatgctgtgctgcttctggcccctgggcatcgccgccttctacctgagccacgagaccaacaaggccgtggccaagggcgacctgcaccaggccagcaccagcagcagaagagccctgttcctggccgtgctgagcatcaccatcggcaccggcgtgtacgtgggcgtggccgtggccctgatcgcctacctgagcaagaacaaccacctgtag

SEQ ID NO: 217286 - DNA, 777 bp, Artificial Sequence
  derived and/or modified sequence
atggatggcattatagaacaaaagtcaatgctggtgcatagcaaaatcagtgatgcaggtaagcgaaatggccttataaatacacgcaatctgatggccgaatctagggatggccttgtcagtgtgtatcccgcgcctcagtaccaatcgcacagagtcggcgcatccactgtaccagcctctctggacagctcacgttctgaacccatgcagcagcttctggatcccaacactttgcaacagagcgtagaatctaggtatcggccaaatattatcctatactcggagggcgtcttaagaagttggggggatggagttgccgcagactgttgcgaaaccactttcatcgaggaccgctctccaactaaagactctctagaatatcctgatgggaagttcattgacctgagtgcggatgacattaagatacataccctgagctatgacgtcgaggaagaggaggagttccaggaacttgaatcagactattcctctgatacagaaagtgaagataacttccttatgatgccccctcgggaccatcttgggcttagtgtgttttccatgctatgctgcttctggccactgggtattgcagctttctacttatctcatgagaccaacaaggccgttgctaagggtgaccttcaccaggccagcacatcatcccgtcgggctttgttcttagctgtgctctcgatcactatcggcaccggcgtgtacgtgggtgtcgccgttgccctgatagcttatcttagtaagaataatcatctttag

SEQ ID NO: 217287 - DNA, 777 bp, Artificial Sequence
  derived and/or modified sequence
atggatggcatcatcgagcagaagtccatgctggtgcacagcaagatcagtgatgctgggaagagaaatggcctcatcaacaccaggaacctgatggccgagagcagagatggcctggtgtctgtgtacccagccccccagtaccagagccaccgggtgggcgccagcacagtgcctgccagcctggacagcagccgctctgagcccatgcagcagctgctggaccccaacaccctgcagcagagcgtggagagccgctaccggcccaacatcatcctgtacagcgagggcgtgctgcgctcctggggagatggagtggccgctgactgctgtgagaccaccttcattgaagatagaagccccaccaaggacagcctggagtacccagatggcaagttcatcgacctgtctgcagatgacatcaagatccacaccctgtcctatgatgtggaggaggaggaggagttccaggagctggagagtgactacagcagtgacacagaaagtgaggacaacttcctgatgatgccaccccgggaccacctgggcctgtctgtgttctccatgctgtgctgcttctggcccctgggcattgctgccttctacctgagccatgagaccaacaaggctgtggccaagggggacctgcaccaggccagcaccagcagccggcgggccctcttcctggccgtgctgagcatcaccatcggcaccggggtgtatgtgggcgtggccgtggccctgattgcctacctgagcaagaacaaccacctgtag

SEQ ID NO: 217288 - DNA, 777 bp, Artificial Sequence
  derived and/or modified sequence
atggacggcatcatcgagcagaagagcatgctggtgcacagcaagatcagcgatgccgggaagaggaatggcctcatcaatacccgaaacctgatggccgaatctcgtgatggcttagtctcggtgtatcctgcaccccagtaccagtcgcatagggtgggcgccagcacagtgccagcaagcctggactccagccgatctgagccgatgcaacagctgttagaccctaatacacttcagcagtctgtggagagccggtaccggcccaacattattctctactctgaaggggttcttagatcgtggggcgacggtgtggccgcagactgctgcgaaactacttttatagaagatcgcagccccactaaggacagtctggagtaccctgatggaaaatttatcgacctgagtgccgacgatattaagattcatacactttcatatgacgtggaagaggaggaggagtttcaagaactagaatccgattatagttctgatactgaatcagaggataacttcttgatgatgccaccccgcgatcaccttggactgtccgtcttctccatgctgtgctgtttttggcccctgggtatcgctgcattttatctgtctcacgagaccaataaggccgtggcaaagggcgacctccaccaagccagtacgtctagtagacgggctctgtttcttgccgttctttcaatcactattggcaccggcgtatacgtcggggtcgccgtggccctcatcgcctatttgagcaagaataatcacctatag

SEQ ID NO: 217289 - DNA, 777 bp, Artificial Sequence
  derived and/or modified sequence
atggacggaatcatcgaacaaaaatccatgttggtccacagtaagatttccgacgcagggaaaagaaatggcctaatcaataccagaaatctgatggcagaaagccgtgacggcctcgtatcagtctacccagccccacagtaccaatcgcatcgtgtcggggcttcgaccgtcccagcctctctggactcctcacgttccgaacccatgcagcagttacttgatcctaacaccctccagcagagcgttgagagccgataccggcctaacatcattttatattcagaaggcgtgctgcgctcgtggggagatggggtggctgctgattgctgcgagacgacctttatagaggatcgtagcccgactaaagatagtctggaatatccagacggcaaatttatcgacctcagcgccgatgacattaagatccacacactgagctacgatgttgaggaggaggaagagttccaggagttagaatctgactattcttcagataccgagagcgaggacaacttcctcatgatgccgccacgcgatcatctcgggctgtcggtcttctccatgctgtgctgtttttggcctctggggattgcagctttttaccttagtcacgagaccaataaagcggtggccaagggtgatctgcatcaggcctcaacttcttccagacgcgctttattcctggctgtcctcagtattacaatcgggacaggggtttacgtgggtgtggccgtcgctttaatcgcgtatctttctaagaataaccatctgtag

SEQ ID NO: 217290 - DNA, 2522 bp, Artificial Sequence
  derived and/or modified sequence
agacactggccgcgggccaccatctggacgcgatcccccgctagggcctccctggtctgggccaaagttggtggccaccttcgcgcgggctgcgccctccttctcttccctgccctcctcccccggggcccgcgcccgctgcctccagcacgcgcgtcggcaggctcggcaagcgaagaggagcggctcgccccagggcgcccctcgcccagcctgccggccaggcgagcgcgacgagagtctccccgcaccccttcctctcccgggggccgagagggttgggctccgccccggcgccgcagctcccgactccccgccgctcgggctgccgccgctgccccgcgcccggcgctcggggcagccgggggcgcaggcggagagcgcagggcggggagaggcgtggggagcagagcggcgctgaggggagggcagaggaggagagagcctggcagcggaggagcagaggcgggcgccgcaccgccccgcacgctcgctcgctcgggagagtcgcgggcggccgcttgggcgcacttgccgggtcaccttgtcccggaggagaaatggcttccctgaggcaagtgtaacctacattcccagcccaccagcctgacgcccagccagggagagagtaccatggatggcatcattgaacagaagagcatgctggtgcacagtaaaatcagtgatgctggcaagaggaatggtttaattaacaccagaaacttgatggccgagagcagagatggtctggtgtctgtttacccagcgccccagtaccagagccaccgggtgggggccagcacagtgccggccagcctggacagcagcaggagtgagccgatgcagcagctgctggaccccaacaccctgcagcagtcagtggagtcccgctaccggcccaacatcatcctctattcagagggcgtgctgcgctcctggggggacggtgtggccgccgactgctgcgagaccaccttcatcgaggaccggtcgcccaccaaagacagcctcgagtacccggatgggaagttcattgacctctcagctgatgacataaaaatccacaccctgtcctacgatgtggaggaggaggaggagttccaggagctggagagcgactactcaagcgacacagagagtgaggacaatttcctcatgatgcccccgcgggaccacctgggcctcagtgtcttctccatgctctgctgcttctggcctctgggcatcgcagccttctacttgtcccatgagaccaacaaagccgtggccaagggggacttgcaccaggccagcaccagctcccggcgggccctattcctggcagtgctgtccatcaccattgggactggcgtctatgtgggcgtggccgtggccctcatcgcctacctctccaagaacaaccacctgtgagcttcctgcgaatggagggggagcacccggggccaggtctgtgtggacgtggaggaagcaggcataccgcatgatgctgtacagtacaaatgattgccaaatgatgccacgaagccctgggatttcctacccatggatttattttgtttttatcctttaatttcatgttcacagcactgtgtagagcaccagacagacgggcactgctaatccttccaaaggaaagctccaaagatcccagcccgcaaggctgtctctggatggattctggtggatgaatggcaacgcggctctctgcagcctgccagtgcccagagtgccaccgcattagcaatatacaaacagtccaaaaaagtgtttattttttatggaatacggtgcaataggcagaggacaagggacacatcactcttctgtctgtggccctgctggagtcctttgtgccccccggagtccacacgccttccctgcaagacgagaatggggctgggaagaaagaggcaacaccacggctggcaggagccccgctgcactgctctgcagacccattggcctgaccctgagaagcagagccagcaaagcccgggacctgcccctctttctttcccttcacaccaccccagcctcaggatgtcaagccacctccggaacgtgtctacactccacagctaccccgcagcaatacgcactcttgggacctcgctgatctaggatggggaggcaggccaccgcccctcccaagactcctcaagaaagagccccgcggttgctccggaaactcgaggcactgcagctatgggcactgcctcagcctaaagacacaggggcgcctcccaatcaccgcgctggcggatgctcaccccgtcataagcagaaactagtgatcctggaaatgagatgggccttactctgtcgactaaatgaatagctattttcttgtcattttttaaagtgcaactcttgcttcatgctgcttaagttaccagatgaatgctgagaaataagtaatcacagacattttaataccatttcattgctgttttacgagtgttcattacttaacaaaaaattatcttttagctttttcgcttaagacttttctttctgatgaa

SEQ ID NO: 217291 - protein, 517 aa, Artificial Sequence
  derived and/or modified sequence
MAQGFAVGFDPLGLGDLSSGSLSSLSSRGHLGSDSGSTATRYLLRKQQRLLNGPPRGIRASSPMGRVILINSPIEANSDESDIIHSVRVEKSPAGRLGFSVRGGSEHGLGIFVSKVEEGSSAERAGLCVGDKITEVNGLSLESTTMGSAVKVLTSSSRLHMMVRRMGRVPGIKFSKEKTTWVDVVNRRLVVEKCGSTPSDTSSEDGVRRIVHLYTTSDDFCLGFNIRGGKEFGLGIYVSKVDHGGLAEENGIKVGDQVLAANGVRFDDISHSQAVEVLKGQTHIMLTIKETGRYPAYKEMVSEYCWLDRLSNGVLQQLSPASESSSSVSSCASSAPYSSGSLPSDRMDICLGQEEPGSRGPGWGRADTAMQTEPDAGGRVETWCSVRPTVILRDTAIRSDGPHPGRRLDSALSESPKTALLLALSRPRPPITRSQSYLTLWEEKQQRKKEKSGSPGEKGALQRSKTLMNLFFKGGRQGRLARDGRREAWTLDSGSLAKTYPRLDIEKEMGVSPCCPG

SEQ ID NO: 217292 - DNA, 1554 bp, Artificial Sequence
  derived and/or modified sequence
atggcccagggattcgccgtaggctttgatccactaggacttggagatctcagctccgggtccctgtccagcctgagttcgcgtggccatcttggatccgactcagggtcaaccgcgacgaggtatctgcttagaaagcagcagcgcctgcttaatgggccccccaggggtattagggcctcaagccctatgggccgcgtgatcctcattaacagccctatcgaggccaacagcgacgagagcgacatcatacattccgtccgcgtggagaaaagccctgccggcaggttgggattttctgtaaggggcggcagcgagcacggcctcggtattttcgttagcaaagtggaggagggatcttcagcagaacgagctggcctttgcgtgggagataaaataactgaggtgaatggactcagccttgagagcactactatgggaagtgcggtgaaagtgctgacctcctcatctaggctgcatatgatggtgcgcagaatgggtagagtgcctggtattaaattctcaaaggaaaagaccacctgggtagatgtagtaaatagacggctcgtcgttgagaagtgcggatctacacctagtgataccagcagcgaggacggtgtgaggcggattgtacacttgtatactactagcgatgatttctgcctgggcttcaacatcaggggaggaaaagagtttgggctgggcatctacgtaagtaaggtggatcacggcgggctggcagaagagaatggcatcaaggtgggtgaccaggtgttggccgctaatggcgtgcgctttgatgatatcagccacagccaagcagtcgaagtgctgaaaggacaaacgcacattatgttgacaattaaggaaactgggcgataccccgcttacaaagagatggtgagcgagtactgctggcttgaccggctctctaacggggtgctgcagcaactatcacccgccagcgaatcttcttcctcagtgtccagctgcgcatcatccgcgccgtacagcagcgggtccttgccaagtgacagaatggacatttgcctgggccaggaagagcctggtagtaggggccccgggtggggacgggctgacaccgcaatgcagaccgagcccgatgctggggggagggtggagacgtggtgcagcgtccgaccaactgtgatcctgagggataccgccatccgatccgatggtccccatccaggacggcggctggacagcgccctgtcagaatcacctaagacggcgctccttctcgccctgtctcggccacgtccccctattacgcggtctcagtcataccttacactatgggaggagaaacagcagaggaagaaggaaaagtccggttccccaggcgagaagggcgcactgcagcgcagtaagactctgatgaatctctttttcaaaggtggacggcaaggacggctggcccgcgacggaaggagagaggcgtggaccctagattccggttctctcgctaaaacataccctagactggacatagagaaggaaatgggcgtgtccccctgttgtccaggctag

SEQ ID NO: 217293 - DNA, 1554 bp, Artificial Sequence
  derived and/or modified sequence
atggcccagggctttgctgtgggctttgaccccctgggcctgggggacctgagcagcggcagcctgagcagcctgagcagccggggccacctgggcagtgacagcggcagcacagccacccgctacctgctgaggaagcagcagaggctgctgaatggccccccccggggcatccgggccagcagccccatgggccgggtcatcctgatcaacagccccatcgaggccaacagtgatgaaagtgacatcatccacagcgtgcgggtggagaagagccctgctggccgcctgggcttctctgtgcggggcggcagcgagcacggcctgggcatctttgtgtccaaggtggaggagggcagcagcgctgagagagctggcctgtgtgtgggggacaagatcacagaggtgaatggcctgagcctggagagcaccaccatgggcagcgctgtgaaggtgctgaccagcagcagccggctgcacatgatggtgcggaggatgggccgggtgcccggcatcaagttcagcaaggagaagaccacctgggtggatgtggtgaacagaaggctggtggtggagaagtgtggcagcacccccagcgacaccagcagtgaagatggagtgcggcgcatcgtgcacctgtacaccaccagtgatgacttctgcctgggcttcaacatccggggcggcaaggagtttggcctgggcatctacgtgtccaaggtggaccatggaggcctggccgaggagaatggcatcaaggtgggggaccaggtgctggccgccaacggggtgcgctttgatgacatcagccacagccaggccgtggaggtgctgaagggccagacccacatcatgctgaccatcaaggagaccggccgctacccagcctacaaggagatggtgtctgagtactgctggctggaccggctgagcaatggagtgctgcagcagctgagccctgccagcgagagcagcagctctgtgagcagctgtgccagcagcgccccctacagcagcggcagcctgcccagcgacaggatggacatctgcctgggccaggaggagcccggcagccggggccctggctggggccgggctgacacagccatgcagacagagccagatgctgggggccgggtggagacctggtgcagcgtgcggcccaccgtcatcctgcgggacacagccatccgcagtgatggcccccaccctggccggcggctggacagcgccctgtctgagagccccaagacagccctgctgctggccctgagccggcccaggcctcccatcaccaggagccagagctacctgaccctgtgggaggagaagcagcagaggaagaaggagaagagcggcagccctggagagaagggggccctgcagaggagcaagaccctgatgaacctcttcttcaagggcggccggcagggccgcctggccagagatggaagaagagaggcctggaccctggacagcggcagcctggccaagacctacccccggctggacatcgagaaggagatgggcgtgagcccctgctgccccggctag

SEQ ID NO: 217294 - DNA, 1554 bp, Artificial Sequence
  derived and/or modified sequence
atggcccagggcttcgccgtgggcttcgaccccctgggcctgggcgacctctccagcggctcactgagctctctctccagtcgcggacacctcggttccgacagtgggagcaccgccaccaggtatcttctgagaaagcagcagcggctgctcaacgggcctccccgggggattcgggccagcagcccaatgggtcgggtcattctcattaattcacctatcgaagcaaactctgatgagagtgatataatccacagtgtccgcgttgaaaagagtcctgctggcaggctagggtttagtgtgcggggaggaagcgaacacggactcgggatcttcgtgtcaaaggtcgaggaaggaagcagcgctgagcgggccggcctgtgtgttggagacaagataacagaggttaacggtctctctctcgaatctaccaccatggggagcgccgtcaaggtgctcacatcttcatcacgattgcacatgatggtgcggagaatggggcgggtccccggtatcaagttttctaaggaaaagactacttgggtggacgtagttaatagacggctggtcgtggagaagtgcggatccaccccttctgatacatcatcggaagacggtgttcggcgcatcgttcacctctacaccacatctgacgacttttgcctgggcttcaatatacgtggcggaaaggagttcggcttgggaatctacgtatcaaaagtggaccacggtggcttagcggaggaaaacggcatcaaggtcggcgatcaagtcctggcggccaatggcgtacgattcgatgacattagccactcacaggcagttgaggtcctcaagggacagacacatatcatgctgacaataaaagagacgggacgctatcctgcttacaaagaaatggtatccgagtactgttggctggaccgcctatctaatggggttctgcagcagcttagtcccgcttcagaatcttcctcaagcgtttctagttgtgcctccagcgcaccttatagctccggcagccttccctctgataggatggatatttgcctcgggcaggaggagcccggtagccggggtcctggctggggccgcgccgataccgctatgcagacagagcctgatgcgggcggtagagtggagacttggtgctccgtcaggcctacagtaatcctgcgtgacacggccatacgttcagacggtccgcaccccggtaggagattggactccgcattatctgagagccccaagactgctctgctgctcgccctgtcccgccctcgtccacccattacacgctcccagagctatttgactctgtgggaggaaaagcagcaacgaaagaaggaaaaatccgggtcccctggcgagaaaggagccctacagcggtccaaaactctgatgaatctgtttttcaagggggggcggcagggcagactcgcacgcgacggaaggagggaggcatggacccttgacagcggatctttggctaagacgtacccccgcctggacattgagaaagagatgggtgtctcaccctgctgccccggttag

SEQ ID NO: 217295 - DNA, 2032 bp, Artificial Sequence
  derived and/or modified sequence
cggcagtagctctcgcctgcgggtggtttgacaaggctggcggcgccacaccagcgaccaggcctggagctcacacttctgagaggcatcgcaagcgagggccttcacgttactgagaccccagccccgcacagaggctcatggagctcgaagcacgcagggctggcctctccagagctagcagattccttctggacctgtagggtgccgccctagcccagccgccatggcgcagggtttcgcagtgggcttcgacccactgggcctaggagacctgagctccggctctctgagctccctctcctcccgaggccacctaggcagcgactcaggctccaccgcaacgcgatacctgctaaggaagcaacaacggctgctgaacgggcccccccgcggaatccgagcctcatcgcccatgggacgcgtcatcctcatcaactcccccatcgaagccaacagtgatgaaagtgacatcatccattcagtccgggtggagaagagtccagcagggaggctgggcttcagcgtgcgcgggggctcagagcatggcctgggcatcttcgtcagcaaagtggaggaaggcagcagtgcagagcgggctggcctgtgcgtgggggacaagatcacggaggtgaatgggctgagcctggagagcaccaccatgggtagcgccgtaaaggtgctgaccagcagcagccgcctgcacatgatggttcggcgcatgggccgtgtgccgggcatcaagttctccaaggagaagaccacgtgggtggatgtggtgaatcggcgcctggtagtggagaagtgcggttcaacaccctccgacaccagctcagaagatggtgtccggcgcatcgtccacctatacacaacctccgacgacttctgcctgggcttcaacatccgtgggggcaaggagtttggcctgggcatctatgtgtccaaagtggaccatggtgggctggccgaggagaatggcatcaaggtgggggaccaggtcctggcagccaacggtgtcaggtttgacgacatcagccacagccaggccgtggaggtgctgaagggccaaacgcacatcatgctgaccatcaaggagaccggccggtatcctgcctacaaggagatggtttctgagtactgctggctggaccgactgagcaacggggtgctgcagcagctgtccccggcctctgagagcagctccagcgtctcttcgtgcgcctccagcgccccctacagctcgggctccctgccgtcggaccgcatggacatctgcctcgggcaggaggagcccggcagccgcggcccaggctgggggcgggcggacacagccatgcagacggagcccgatgcgggaggccgggtggagacctggtgcagcgtgcggcccacagtcatcctcagggacaccgccatccgctcggacggcccccatcccggccgccgccttgactctgcgctctctgagtctcccaagacggctttgctgctggccctcagccgaccccggccccccatcacgcgctcccagagctatctgaccttgtgggaggagaagcagcagcggaagaaggagaagtcggggtcccctggggagaagggtgccctgcagcgctccaagacgctgatgaacctcttcttcaagggagggcggcaggggaggctagcgcgggacgggcgcagagaggcctggacactggacagcgggagcctggccaaaacttaccctcgcctggacatagagaaagagatgggggtttcaccctgttgcccaggctagtctcaaattcctggactgaagctatctacccgccttagtctcccaaagtgctaggattacagcgtgatctaccacacctggccaatcccaactactctggaagctgaagcagcaagatcacttgagcccaggagtttaagaccagcctgggcaacatagcaagaccctgtctctaaagaaaaaaaaaaagtaaaagaaaaataaagcacgtcttggctcagctgctgatttaagctgggtctaaacatctga

SEQ ID NO: 217296 - DNA, 1554 bp, Artificial Sequence
  derived and/or modified sequence
atggcccagggcttcgccgtcggctttgatcctctgggactaggagacctctccagtggctctctgtccagcctgagtagtcgagggcatcttgggtctgactcaggaagcactgccacacgctatttgttacggaaacagcagaggctgctcaatggacctcctcgaggcatccgggcatcgagccccatgggtcgtgttatactgataaattcccctatcgaagccaactcagatgaatcagatatcattcattctgtgcgtgtggagaaatccccagccggtcgtctgggcttctccgttcgcggagggtctgagcacggcctaggtattttcgtgagtaaggtcgaggagggctccagcgcagaacgggctggcttgtgcgttggagataagataacagaagtgaatgggctcagtctggagtcaactacgatgggtagcgccgtcaaagtcctgacctcttcaagtcgcttgcatatgatggttaggaggatgggaagggttcccggaattaaattctccaaggagaagaccacctgggttgatgtggtcaatcgcagacttgtggtggagaagtgtgggtcaactccctctgatacgagctctgaagacggcgttcgtcgcatcgtgcacctgtacaccacgagcgacgatttttgtctgggattcaacattcggggtggcaaagaatttgggctcgggatctacgtgagtaaagtggatcacgggggactcgcagaggagaacggcattaaggtgggcgatcaggtgctggctgctaatggcgtgcggttcgacgacatatcccacagtcaagcagtggaggtcttgaaaggccaaactcacatcatgctgacaattaaggagaccggccgatacccagcttacaaagaaatggtgtctgagtattgctggctggatcgactgtctaatggcgtgcttcagcagctgtcgccagcttccgagagttctagctctgtcagctcttgtgccagcagcgccccatactcttctggctcgctaccatcagatcggatggacatttgcttgggtcaggaagagcccggaagtagaggacctggttgggggagggcagatacggcaatgcaaacggaaccagatgccggtggcagggtagaaacttggtgttctgtccgcccaaccgtaattctgagggacactgctatcaggtctgacggtcctcaccccggtcggagactggatagcgcgctgagcgagtccccgaaaacagcactgctgctagccctgtcccgtcctcgccctcccattacaagaagccaatcttatttgacactttgggaggagaagcaacagagaaagaaagaaaagtccggctctcctggcgagaaaggcgcattacagagaagcaagaccctgatgaacctcttcttcaagggtgggaggcagggcagactggcccgtgatggacggcgagaagcctggactcttgattctggatcacttgccaaaacctacccacgcctggatattgagaaggagatgggagttagcccctgctgtccaggctag

SEQ ID NO: 217297 - DNA, 1554 bp, Artificial Sequence
  derived and/or modified sequence
atggcccagggcttcgccgtgggcttcgaccccctgggcctgggcgacctgagcagcggcagcctgagcagcctgagcagcagaggccacctgggcagcgacagcggcagcaccgccaccagatacctgctgagaaagcagcagagactgctgaacggcccccccagaggcatcagagccagcagccccatgggcagagtgatcctgatcaacagccccatcgaggccaacagcgacgagagcgacatcatccacagcgtgagagtggagaagagccccgccggcagactgggcttcagcgtgagaggcggcagcgagcacggcctgggcatcttcgtgagcaaggtggaggagggcagcagcgccgagagagccggcctgtgcgtgggcgacaagatcaccgaggtgaacggcctgagcctggagagcaccaccatgggcagcgccgtgaaggtgctgaccagcagcagcagactgcacatgatggtgagaagaatgggcagagtgcccggcatcaagttcagcaaggagaagaccacctgggtggacgtggtgaacagaagactggtggtggagaagtgcggcagcacccccagcgacaccagcagcgaggacggcgtgagaagaatcgtgcacctgtacaccaccagcgacgacttctgcctgggcttcaacatcagaggcggcaaggagttcggcctgggcatctacgtgagcaaggtggaccacggcggcctggccgaggagaacggcatcaaggtgggcgaccaggtgctggccgccaacggcgtgagattcgacgacatcagccacagccaggccgtggaggtgctgaagggccagacccacatcatgctgaccatcaaggagaccggcagataccccgcctacaaggagatggtgagcgagtactgctggctggacagactgagcaacggcgtgctgcagcagctgagccccgccagcgagagcagcagcagcgtgagcagctgcgccagcagcgccccctacagcagcggcagcctgcccagcgacagaatggacatctgcctgggccaggaggagcccggcagcagaggccccggctggggcagagccgacaccgccatgcagaccgagcccgacgccggcggcagagtggagacctggtgcagcgtgagacccaccgtgatcctgagagacaccgccatcagaagcgacggcccccaccccggcagaagactggacagcgccctgagcgagagccccaagaccgccctgctgctggccctgagcagacccagaccccccatcaccagaagccagagctacctgaccctgtgggaggagaagcagcagagaaagaaggagaagagcggcagccccggcgagaagggcgccctgcagagaagcaagaccctgatgaacctgttcttcaagggcggcagacagggcagactggccagagacggcagaagagaggcctggaccctggacagcggcagcctggccaagacctaccccagactggacatcgagaaggagatgggcgtgagcccctgctgccccggctag

SEQ ID NO: 217298 - protein, 904 aa, Artificial Sequence
  derived and/or modified sequence
MEWGSESAAVRRHRVGVERREGAAAAPPPEREARAQEPLVDGCSGGGRTRKRSPGGSGGASRGAGTGLSEVRAALGLALYLIALRTLVQLSLQQLVLRGAAGHRGEFDALQARDYLEHITSIGPRTTGSPENEILTVHYLLEQIKLIEVQSNSLHKISVDVQRPTGSFSIDFLGGFTSYYDNITNVVVKLEPRDGAQHAVLANCHFDSVANSPGASDDAVSCSVMLEVLRVLSTSSEALHHAVIFLFNGAEENVLQASHGFITQHPWASLIRAFINLEAAGVGGKELVFQTGPENPWLVQAYVSAAKHPFASVVAQEVFQSGIIPSDTDFRIYRDFGNIPGIDLAFIENGYIYHTKYDTADRILTDSIQRAGDNILAVLKHLATSDMLAAASKYRHGNMVFFDVLGLFVIAYPSRIGSIINYMVVMGVVLYLGKKFLQPKHKTGNYKKDFLCGLGITLISWFTSLVTVLIIAVFISLIGQSLSWYNHFYVSVCLYGTATVAKIILIHTLAKRFYYMNASAQYLGEVFFDISLFVHCCFLVTLTYQGLCSAFISAVWVAFPLLTKLCVHKDFKQHGAQGKFIAFYLLGMFIPYLYALYLIWAVFEMFTPILGRSGSEIPPDVVLASILAGCTMILSSYFINFIYLAKSTKKTMLTLTLVCAITFLLVCSGTFFPYSSNPANPKPKRVFLQHMTRTFHDLEGNAVKRDSGIWINGFDYTGISHITPHIPEINDSIRAHCEENAPLCGFPWYLPVHFLIRKNWYLPAPEVSPRNPPHFRLISKEQTPWDSIKLTFEATGPSHMSFYVRAHKGSTLSQWSLGNGTPVTSKGGDYFVFYSHGLQASAWQFWIEVQVSEEHPEGMVTVAIAAHYLSGEDKRSPQLDALKEKFPDWTFPSAWVCTYDLFVF

SEQ ID NO: 217299 - protein, 351 aa, Artificial Sequence
  derived and/or modified sequence
MLEVLRVLSTSSEALHHAVIFLFNGAEENVLQASHGFITQHPWASLIRAFINLEAAGVGGKELVFQTGPENPWLVQAYVSAAKHPFASVVAQEVFQSGIIPSDTDFRIYRDFGNIPGIDLAFIENGYIYHTKYDTADRILTDSIQRAGDNILAVLKHLATSDMLAAASKYRHGNMVFFDVLGLFVIAYPSRIGSIINYMVVMGVVLYLGKKFLQPKHKTGNYKKDFLCGLGITLISWFTSLVTVLIIAVFISLIGQSLSWYNHFYVSVCLYGTATVAKIILIHTLAKRFYYMNASAQYLGEVFFDISLFVHCCFLVTLTYQGLCSAFISAVWVAFPLLTKLCVHKDFKQHD

SEQ ID NO: 217300 - protein, 419 aa, Artificial Sequence
  derived and/or modified sequence
MVVMGVVLYLGKKFLQPKHKTGNYKKDFLCGLGITLISWFTSLVTVLIIAVFISLIGQSLSWYNHFYVSVCLYGTATVAKIILIHTLAKRFYYMNASAQYLGEVFFDISLFVHCCFLVTLTYQGLCSAFISAVWVAFPLLTKLCVHKDFKQHGAQGKFIAFYLLGMFIPYLYALYLIWAVFEMFTPILGRSGSEIPPDVVLASILAGCTMILSSYFINFIYLAKSTKKTMLTLTLVCAITFLLVCSGTFFPYSSNPANPKPKRVFLQHMTRTFHDLEGNAVKRDSGIWINGFDYTGISHITPHIPEINDSIRAHCEENAPLCGFPWYLPVHFLIRKNWYLPAPEVSPRNPPHFRLISKEQTPWDSIKLTFEATACLPILQILDLPASTIMTKPYVLLCSSPQRVNTFSVVSWQWHPSHK

SEQ ID NO: 217301 - DNA, 2715 bp, Artificial Sequence
  derived and/or modified sequence
atggagtggggttccgagtccgccgcagtaaggcgccatcgcgtgggagtagaacgcagggaaggcgctgcggcagccccaccaccggaacgcgaggcgcgcgcccaggaacccctggtagacggttgctccggcggagggcgaactaggaaaagatctcctggaggaagtgggggcgccagtagaggcgctggcaccggattaagtgaagtgagggccgctctcgggttggctctgtatctaattgcccttcgaaccttggttcagctgagcctgcagcagcttgtgttgagaggcgccgctggccaccgaggggaattcgacgcattacaggctcgcgactatctggagcatatcaccagcatcggcccccgtaccaccggcagtcccgagaacgagattctgacagtacattacctgctggagcagattaaacttatcgaagttcagtctaattccctccataagatcagtgtcgatgtccagcgtcccaccgggtccttttcgatagattttctgggtggattcactagttactatgataacattacgaacgtcgtggtgaagctggagccacgagacggcgcccagcacgctgtcctggctaattgccactttgactctgtggccaattcgcctggcgcatctgacgatgccgtatcttgctccgttatgctcgaggtcttgagggtcctatccacctccagcgaagcattacaccacgccgtcatattccttttcaacggcgccgaagagaacgtgctgcaggcgtctcatggatttatcacccagcatccctgggcgtctctaataagggcttttatcaatttggaggcagccggtgtcggaggaaaggaattagtgtttcagactggtcctgagaatccctggttagttcaggcatatgtgtccgccgcgaagcacccttttgctagcgtggtggcacaggaggtattccagtccgggattataccttctgatactgatttcaggatctaccgagacttcgggaatattccaggaattgacttagcatttattgagaatggttacatatatcatacaaaatatgacaccgctgatcgcatcttgactgatagcatacagagggcgggtgacaatattctagccgtactgaaacacttggcaacttctgacatgcttgcagccgcttccaaatacaggcatggcaacatggtgttctttgatgttctgggtctgttcgtaatcgcctacccctcccgtatagggtctatcataaactatatggtggtaatgggcgtggttctatacctggggaaaaagtttctgcagcccaagcacaagactggtaattataagaaagacttcctatgcggcctcggaattacgctgatttcatggtttactagcctcgtgactgtactgattatagctgtcttcattagcctaattggtcaatctctgtcttggtacaatcatttctacgtgtctgtgtgtctctacggcaccgctactgtggctaaaatcattctcattcatacactggccaagcggttttattatatgaatgctagcgcccagtatctgggagaggtttttttcgacatatctctctttgtccattgctgctttctcgtgacattaacataccaagggttgtgctccgccttcatctctgctgtctgggtggcatttccacttctaacaaaactctgcgttcacaaggactttaagcagcacggggcccaaggtaaattcatcgcattttacctcttggggatgttcatcccctacttgtatgctctttacctgatatgggctgtctttgaaatgttcacacccatcctcggaaggagcggcagcgaaattcctcccgatgtggttcttgcatcaatacttgctggatgcactatgatcctctcatcatacttcatcaacttcatttatctggccaagagtacaaagaagacaatgcttactctgacactcgtttgtgctattacatttctcttggtgtgcagcggcactttcttcccgtactcctccaatccagcgaacccaaaaccaaagcgggtgttccttcaacacatgacccggaccttccatgacctagagggaaatgccgtgaaaagagattctggcatttggatcaacgggtttgactacacaggtatctcccatattactccgcacattccagaaattaatgactcgatacgggcccattgtgaagagaacgcccccttgtgtgggttcccctggtacttgcccgtgcatttcctgatccgcaaaaattggtacctgccagcccccgaggtttccccccgcaatcctcctcacttcaggctcatatcgaaagagcagaccccgtgggacagtattaagcttacctttgaagccactggcccatctcacatgtctttttacgtgcgcgcccataaaggaagcaccttaagccagtggagcctcggcaacggaacccccgtgaccagtaagggaggggactattttgtattctacagccatggcttacaagcgtctgcctggcaattttggatcgaggtgcaggtaagcgaggaacaccctgaggggatggtgaccgtcgcaattgccgcacactacctgtctggcgaggacaagagatccccccagctggacgcattgaaagagaaattccccgattggacgtttccttccgcatgggtttgtacgtacgacttatttgtgttctag

SEQ ID NO: 217302 - DNA, 2715 bp, Artificial Sequence
  derived and/or modified sequence
atggagtgggggtctgaatccgccgccgttcggagacacagagtcggcgtagagaggagagagggcgctgcggccgcgcctcctccagagcgcgaggccagggctcaggagccactggtcgacggatgttctggcggcgggcgaacgaggaagcgatctcctggcggctcaggaggtgccagtcgcggcgcagggacaggcctgagtgaggtcagagccgctttagggcttgccctgtatttgattgctctgcgaactttagtgcagttgtctctgcagcaattagtcctgcggggagcggccggccacagaggagagtttgatgcactccaggcgcgggactacttagagcatatcactagcatcgggccgcggactacaggctcacctgagaacgaaattctaacagtgcattatctgctggagcagatcaagcttattgaggttcagagtaattctttacataaaattagcgtcgacgtgcagcgccccacgggtagcttctctatagatttcctgggcggcttcacatcctattacgataacataaccaacgtagtcgtgaagctcgagccccgagatggcgcccagcatgccgtgctggccaattgccatttcgatagtgtcgccaacagcccaggcgcttctgacgatgccgtgtcctgcagcgttatgcttgaggtgctgagggtattaagtacgtccagtgaggctctgcatcatgcagtcatcttcctgttcaatggcgccgaggaaaatgtcttacaggcgtcccatggcttcatcacccagcacccctgggcaagtttgatacgggccttcatcaacctcgaagccgccggcgtcggaggtaaggaattggtttttcagactggacccgaaaatccatggctggttcaggcatatgttagtgccgcaaaacatccgtttgcctctgtggtggcacaggaggtgttccagagcggcatcattccatcggataccgattttcggatctatagagactttggtaacatcccaggcattgacctcgcttttatcgaaaatggatacatctaccatacaaagtacgacacagcggacaggatcttaacggatagcatccaacgggctggggataacatcctggccgtgcttaaacacctggcgacaagcgatatgctggcggctgcgagcaagtaccggcacggtaacatggtattttttgatgtactcggactattcgtgatagcctaccccagtagaattggcagcattattaactatatggtggtgatgggcgtcgtactttacctggggaaaaagtttctgcagccaaaacataaaacagggaattataaaaaagattttctctgcggcctgggtattacccttatctcttggttcaccagcctcgttacagtcctcatcattgccgtgtttatctcactgataggacagtccctttcatggtacaatcatttctatgtttccgtgtgcctctacggcaccgccacagttgccaaaataattctgatccacaccctcgcgaaacggttttattacatgaatgctagtgcccagtatcttggcgaagtcttctttgatatcagcctcttcgtgcattgttgtttcctcgtgaccttgacgtaccaagggttatgctccgccttcattagcgcagtctgggtggctttccccttactgaccaaactctgcgtgcacaaggacttcaagcagcacggggcccagggaaaatttattgcattttatctcttgggaatgtttataccttatttgtatgctctatatctcatatgggccgtgtttgagatgttcacacccatcctgggcagatctggcagcgaaatcccgccggacgtcgtcctagcttctatcctggctggatgcactatgattttgtcttcctactttatcaacttcatttacctcgccaagtctacgaaaaaaactatgttaaccctgaccctggtctgcgccatcactttcctcctcgtctgttccgggacattctttccatattcctctaaccccgcaaacccaaaacctaagcgcgtgttcctacagcacatgactcggacctttcacgacctcgagggaaatgccgtcaagagggattcaggtatatggataaacgggtttgattacactgggatttcccatatcacgccacacattcctgagattaacgattcaattcgtgcccactgtgaggaaaacgccccactgtgtggattcccctggtaccttccagttcattttctcatcaggaagaactggtacttacctgcccccgaagtttcaccaaggaacccccctcacttccgcctgatctccaaagagcaaacaccatgggactccatcaaacttacattcgaagcaactgggccatcacacatgagcttttacgtaagagcacataagggctcgacgctgtcccagtggagcctaggcaatggaacacccgtgacttccaagggaggggactattttgttttttattcccatggccttcaggcatcggcttggcagttctggattgaagtgcaggtgtcggaggaacatccggaaggcatggtcacagttgcaatcgctgcacactacctgtccggcgaggacaaaaggtctccacagctcgacgccctgaaggaaaaattccccgactggacctttccatccgcatgggtatgtacatacgacctcttcgttttttag

SEQ ID NO: 217303 - DNA, 2715 bp, Artificial Sequence
  derived and/or modified sequence
atggagtggggcagcgagagcgctgctgtgagaagacaccgggtgggcgtggagcggcgggagggcgctgctgctgcccctcctcctgagcgggaggcccgggcccaggagcccctggtggatggctgcagcggcggcggccgcaccaggaagaggagccctgggggcagcggcggggccagcagaggagctggcaccggcctgtctgaggtgcgggccgccctgggcctggccctgtacctgattgccctgcggaccctggtgcagctgagcctgcagcagctggtgctgcggggagctgctggccacagaggagaatttgatgccctgcaggcccgggactacctggagcacatcaccagcatcggccccaggaccaccggcagcccagaaaatgagatcctgactgtgcactacctgctggagcagatcaagctgattgaggtgcagagcaacagcctgcacaagatctctgtggatgtgcagaggcccaccggcagcttcagcattgacttcctgggcggcttcaccagctactatgacaacatcaccaacgtggtggtgaagctggagcccagagatggagcccagcacgctgtgctggccaactgccactttgacagcgtggccaacagccctggggccagtgatgatgctgtgtcctgcagcgtgatgctggaggtgctgcgggtgctgagcaccagcagcgaggccctgcaccacgccgtcatcttcctgttcaacggggctgaggagaatgtgctgcaggccagccacggcttcatcacccagcacccctgggccagcctcatccgggccttcatcaacctggaggccgccggcgtgggcggcaaggagctggtgttccagacaggccctgagaacccctggctggtgcaggcctacgtgtctgctgccaagcacccctttgcctctgtggtggcccaggaggtgttccagagcggcatcatccccagcgacacagacttccgcatctacagagactttggaaacatccctggcatcgacctggccttcattgaaaatggctacatctaccacaccaagtatgacacagctgaccgcatcctgacagacagcatccagagagctggggacaacatcctggccgtgctgaagcacctggccaccagtgacatgctggccgccgccagcaagtaccgccacggcaacatggtgttctttgatgtgctgggcctcttcgtcatcgcctaccccagccgcatcggcagcatcatcaactacatggtggtgatgggcgtggtgctgtacctgggcaagaagttcctgcagcccaagcacaagacaggcaactacaagaaggacttcctgtgtggcctgggcatcaccctcatctcctggttcaccagcctggtgacagtgctgatcatcgctgtgttcatcagcctcatcggccagagcctgtcctggtacaaccacttctacgtgtctgtgtgcctgtatggaacagccaccgtggccaagatcatcctgatccacaccctggccaagcgcttctactacatgaatgccagcgcccagtacctgggggaggtgttctttgacatcagcctgtttgtgcactgctgcttcctggtgaccctgacctaccagggcctgtgcagcgccttcatctctgctgtgtgggtggccttccccctgctgaccaagctgtgtgtgcacaaggacttcaagcagcacggggcccagggcaagttcatcgccttctacctgctgggcatgttcatcccctacctgtatgccctgtacctgatctgggccgtgtttgagatgttcacccccatcctgggccgcagcggcagcgagatccccccagatgtggtgctggccagcatcctggccggctgcaccatgatcctgagcagctacttcatcaacttcatctacctggccaagagcaccaagaagaccatgctgaccctgaccctggtgtgtgccatcaccttcctgctggtgtgcagcggcaccttcttcccctacagcagcaacccagccaaccccaagcccaagagggtcttcctgcagcacatgaccaggaccttccatgacctggagggcaatgctgtgaagagggacagcggcatctggatcaatggatttgactacacaggcatcagccacatcaccccccacatccctgagatcaatgacagcatccgggcccactgtgaagaaaatgcccccctgtgtggcttcccctggtacctgcctgtgcacttcctgatcaggaagaactggtacctgcctgcccctgaggtgagccccaggaaccccccccacttccgcctcatcagcaaggagcagaccccctgggacagcatcaagctgacctttgaggccaccggccccagccacatgtccttctacgtgcgggcccacaagggcagcaccctgagccagtggagcctgggcaatggcacccctgtgaccagcaagggcggggactactttgtgttctacagccacggcctgcaggccagcgcctggcagttctggattgaggtgcaggtgtctgaggagcaccctgagggcatggtgacagtggccatcgccgcccactacctgagcggggaggacaagaggagcccccagctggatgccctgaaggagaagttcccagactggaccttccccagcgcctgggtgtgcacctatgacctgtttgtgttctag

SEQ ID NO: 217304 - DNA, 2715 bp, Artificial Sequence
  derived and/or modified sequence
atggagtggggcagcgagagcgccgccgtgcggcggcaccgggtgggggtcgaacggcgggagggggccgctgcagcccccccaccggaaagagaggccagagcccaagagcccctcgtggacggctgctctggtggaggacggacccggaagagaagccctggtggctcagggggggcctcccgaggcgcgggcacagggctatctgaagtgcgcgcagccctggggctggccttatacctgatcgcccttcgcacacttgtacaactgtcactgcagcagctggtgcttagaggcgctgcgggacatcggggtgagtttgacgcactgcaggcaagagattatctggaacacatcacctcaattgggccaaggaccaccggatcacccgaaaacgagattctcaccgtgcactacttgttagaacagatcaagctgattgaggtacagagtaacagcctgcacaagatcagtgtagacgttcagaggcccacaggaagcttctctattgacttcctcgggggatttaccagctattacgacaacattacaaacgtggttgtgaagcttgaaccaagggacggcgcccagcacgcagtcctcgcgaactgtcactttgactcagtggcaaacagtccaggagcgtccgacgatgcggtttcttgttctgtgatgttggaagtgctacgagtgctgagcacttcatctgaggcgctgcaccacgctgttatcttcctcttcaacggtgcagaagagaacgtactgcaagcctcccacggatttatcactcagcacccatgggcctccttgattcgggcattcatcaatttggaagctgcaggggtcggggggaaagagctggtgtttcagaccggccccgaaaacccatggctagtgcaagcctacgtgagcgcggcaaaacatcccttcgcgtcggtcgtggcccaggaagtttttcagagtggcatcattccatccgacacagatttcagaatatacagggatttcggcaatatccccggcattgacctcgccttcatcgaaaacggctatatttatcacacaaagtacgacaccgctgacaggatcctgacagacagtatccagcgtgcgggtgataatatcctcgcagttctgaagcatctagcgacatccgatatgcttgctgccgctagtaaatatcggcacggaaatatggttttctttgatgtcctaggcctattcgtgatagcttacccttctcgcattgggtcaatcatcaactatatggtggttatgggcgtggtcctttacctgggcaagaagttccttcaaccgaaacacaagaccggtaactacaaaaaagactttctttgtggcctgggaatcacattaatttcttggtttacgtcgctggtcactgtgctaatcatcgcagttttcatatcattgatcggacagagcctgtcctggtacaatcatttctatgtatctgtctgtctctacggaacagcaaccgttgcaaaaatcattcttatccacaccttggctaagaggttttactatatgaatgcctcagcccaatacctgggagaagtttttttcgacatttctctttttgtgcactgctgtttcctagtaaccttgacgtaccagggtctgtgtagtgcattcatctcagctgtgtgggttgccttcccccttcttaccaagttgtgcgttcacaaggactttaagcagcatggcgcacaaggcaagttcattgccttctacctgctgggtatgtttataccatatctctatgctttataccttatctgggcagttttcgagatgttcactcctattttaggccggtccggctcggaaatcccacctgatgttgttctggcctctatcctcgctggctgcactatgatcctttctagttacttcattaatttcatctaccttgctaaatcgacgaaaaaaaccatgctcaccctgacattggtgtgtgccatcacttttctcctggtctgctctggtacttttttcccttatagttccaatccggcaaaccctaaaccaaaaagagttttcctacagcacatgacacggaccttccacgatcttgagggaaatgccgttaaaagagacagtggaatctggattaacggattcgactacactggcattagtcatataacgcctcacatcccagaaatcaatgattctatccgcgcccactgcgaggaaaacgcccccctgtgtgggttcccctggtacctgcccgtccacttcctcattagaaagaactggtatttacctgccccagaggtgagccctcgcaacccaccccatttcaggctgatcagtaaggagcagacgccttgggattccattaaactaacatttgaagctaccggtccttctcatatgtccttttatgtgcgggcacataaaggatcaacattgtcacaatggagcctcgggaacggaacccccgtcacctcaaagggaggagattatttcgtgttttactcccacggcttacaggcctctgcatggcaattctggatcgaggtccaggtatctgaggagcaccctgagggcatggtgaccgttgccattgcagcccactatttatcgggggaagacaaacgcagccctcaactcgatgccctgaaagaaaagttcccagactggaccttcccttctgcttgggtctgtacctacgacctgtttgtcttctag

SEQ ID NO: 217305 - DNA, 2715 bp, Artificial Sequence
  derived and/or modified sequence
atggagtggggcagcgagagcgccgccgtgcggcggcaccgggtgggagtggagagaagagagggcgcggctgccgcacctccaccagaaagggaggctcgcgcccaggaacctctggtggatgggtgctcgggcggtggcagaacacgcaaacgatcacccggcggcagcggcggcgccagtcggggggctggaactggactgagcgaggtgcgagccgccttaggtctggccctctacctcattgccttacgtacgctggttcaattatcattgcagcaactcgttctacgcggagctgctggacatcgaggggagtttgatgccctacaagcaagggattatctggagcatatcacaagcatagggccgagaactaccggtagccccgagaatgaaatcctcacagttcattatctgctggagcagattaaacttatcgaagttcagtccaacagccttcataagatttcagtagatgtgcaacgacccactggctccttctcaatcgactttttgggcggctttaccagctactatgataacattaccaatgtggtcgttaaactagagccacgggatggagcgcagcatgccgtgctcgcaaattgtcattttgactctgtagcaaattcccccggcgccagcgacgacgctgtaagttgctctgtcatgctggaagttctgcgagtgctgtcgaccagctcggaggccctgcatcatgcggtgatatttttgttcaatggcgcggaggagaacgttctgcaagcaagccacggattcataactcagcacccatgggcatcgctcatcagagcatttattaacttagaagccgcaggggtcggaggcaaggagctggtttttcaaactggccccgagaacccatggctcgttcaggcttatgtgagcgctgctaaacacccatttgcgtctgttgtggcgcaggaagtgttccaaagcggcatcattccatccgacactgactttcgtatataccgggattttggtaatatccctgggattgatctggcatttattgagaatggttacatctaccacaccaaatatgacactgctgacaggatccttaccgatagcatccaaagagcaggggacaatatcctagcagtcctgaagcatttggccacttcagatatgcttgccgccgcaagcaagtaccgacatggtaacatggtgttcttcgacgtacttggtctctttgtcatagcatacccttctaggataggctctatcataaattatatggtcgtcatgggagttgttctctatctgggaaaaaaatttcttcagccaaaacacaaaacgggtaattacaagaaggatttcctgtgcggccttggaattactctcatttcttggttcacttccttagttaccgtcctgatcatagctgtgttcatcagccttatcggccagtctttatcttggtacaaccacttttacgtgtctgtctgcctctacggcacagctactgttgctaagataattttgattcataccctggccaagaggttctactacatgaatgcatccgctcagtacctcggggaggtgtttttcgacatatctctcttcgttcactgctgcttcctcgttacgctgacgtaccaggggctctgctccgcttttattagcgccgtctgggttgccttccccttgctgacgaaactctgcgtacataaggatttcaagcagcacggggcccagggcaagtttatcgctttctaccttctcggaatgtttattccctacctctatgccttatacctgatctgggcagtatttgagatgttcaccccgatcctggggagatcagggtctgagattccacccgatgttgttctcgcgagcatattggccggatgtaccatgatcctttccagctacttcataaacttcatctatcttgccaagagcaccaaaaaaactatgttaaccctcactctagtgtgtgcgatcacattcctgctggtctgttcgggcactttcttcccttactcatctaatccagctaatcctaaacccaagcgcgtgtttctccagcacatgacacgtactttccatgatctagaaggcaatgccgttaaaagggactctgggatctggatcaatggcttcgattatacaggaatttcccacatcaccccgcacatccccgaaataaacgatagcattcgggctcactgtgaagaaaatgcgcccctgtgcggtttcccttggtaccttcccgtccactttctgattagaaagaactggtatttgccagccccggaagtctcccctaggaatcccccacactttaggctcatcagcaaagaacagactccttgggactctatcaagctaaccttcgaagcgacaggtccaagtcatatgtccttctacgttagggctcataagggaagcacattatctcagtggtcactcggaaacggcacgcctgtgacatccaaggggggggactatttcgtcttctatagtcatggtctgcaagctagtgcctggcaattctggattgaagtacaggtgtctgaagagcatcctgaaggcatggtaactgtcgccatcgccgcccactatctgtcaggggaggataaaaggtctccccagctcgatgccctgaaagaaaagttccctgactggaccttcccctccgcttgggtgtgtacctatgacttgttcgtcttctag

SEQ ID NO: 217306 - DNA, 2715 bp, Artificial Sequence
  derived and/or modified sequence
atggagtggggctctgagtccgctgcggtgaggagacatcgggttggcgtggaacgtagagaaggcgcagctgcggcacctcctcccgagcgggaagcgcgtgctcaagaaccgctcgtggatgggtgttctggcggaggcaggacacgaaagcgctcgcccggaggtagtggaggtgcatcaagaggggcaggtaccggactgagcgaggtgagggctgctttaggcctggccctctatctgatagcactacggaccctcgtgcaactcagcttgcagcagctggtgttgaggggggcagccggtcatcggggtgagttcgacgctctgcaggctcgggattaccttgaacacattacctccattggcccacgtacaacgggttcccccgagaatgaaatccttaccgtgcattacctgctggaacagattaaactgatcgaagtacagagtaactccttgcataagatctctgtcgacgtgcagcgccctacaggcagcttctccattgactttctgggcggatttacttcatattatgataatattaccaacgtagttgtgaagcttgagccacgcgacggcgcacagcacgcagtgctggctaattgtcactttgatagtgtagctaacagtcccggagccagcgatgacgccgtctcatgctctgtgatgcttgaagtactccgcgtactgtccactagttcagaggcgttgcatcacgccgtgatctttctatttaacggagctgaggagaacgttctgcaggcctcccacggatttatcacccaacatccatgggccagcctcatccgcgcttttattaacctagaggcagctggagttggcggaaaggagcttgtttttcagactgggcctgaaaacccctggctcgtgcaggcttatgtgtctgcagctaaacatccatttgcatcagttgtggctcaagaagtgttccagtctggcattatccccagtgacactgactttcgcatctaccgggacttcgggaacatacctggcattgacctggcctttattgagaatggctacatctatcacacaaaatacgacactgccgaccggatcttaaccgactcaatccaaagggcaggcgataacatcttggcagtgcttaagcacctcgctacttcagacatgcttgcagcggcttctaaatatcgacacgggaatatggtgtttttcgatgtactgggtctgttcgtgatcgcatatccttccagaattggctcaatcatcaactatatggtggtgatgggcgtggtactgtacttgggaaagaagttcctgcagcccaagcacaaaaccggaaactataagaaggacttcctgtgcggactgggcatcactcttatctcttggtttacctccttggtcaccgtgctgatcattgccgtattcatctctctgatcgggcagagtttgtcatggtacaaccatttttacgtgagcgtgtgcctctacggaaccgctaccgtagcaaagatcattctgatccacacccttgcgaagcggttttattatatgaacgcatctgcccagtatctgggtgaggtgttcttcgatatctctctgttcgttcactgttgcttcttagtgactttaacgtatcaggggctttgttctgctttcatttccgccgtatgggtggcattccccttgctgaccaaattgtgtgtgcacaaagatttcaagcagcacggagcccagggtaagttcattgctttctatctcctgggcatgtttatcccttacctgtatgccctgtatttaatctgggccgtctttgaaatgtttacaccaattctgggcaggtcgggttccgaaattcctccagatgtcgtgctcgcatctatattggccggttgtaccatgattctgtcaagctacttcattaatttcatttacctggcaaagtcaacaaaaaaaaccatgttaactctgacacttgtgtgtgcgataacattccttttagtttgctctgggacattcttcccctacagttctaaccctgcgaaccctaaacctaagagagtcttcctgcagcacatgacacgcaccttccatgacctcgaggggaatgccgtcaagcgagactcgggcatttggataaatggtttcgactataccggtatcagccacatcactccgcacatcccggagataaacgattctattcgggcacactgcgaagagaacgctcctctgtgcggttttccttggtatttacctgttcactttctgatcagaaaaaattggtatttaccagcgccagaggtatctccgagaaaccccccacattttcgtctgataagcaaagagcagacaccctgggactcaatcaagctgactttcgaggccactggtccatctcacatgtccttctacgtcagggcgcacaaaggctcaaccctgtcacagtggtctctagggaacggcacaccggtaacctctaagggcggagattacttcgtgttctactcacacggactgcaggcaagcgcttggcaattctggatcgaagttcaggttagtgaagaacaccccgagggtatggtaacagtggcaatcgccgcacactacctgtctggggaagacaagcgctcgccccagcttgatgctttaaaggagaagtttccagattggacttttcctagtgcctgggtgtgcacctatgatctgtttgttttttag

SEQ ID NO: 217307 - DNA, 2715 bp, Artificial Sequence
  derived and/or modified sequence
atggaatgggggagtgaatctgcggcagtgcgaaggcaccgggttggcgtagagcgacgggagggcgctgccgctgcgcctccccctgaacgtgaagccagggcccaagagccgttagttgatgggtgttccggcggtggcaggaccagaaaacgatctccaggagggtcgggaggagcatcccgtggcgcagggactggactaagcgaggtgagggctgcactggggctcgcactgtatcttatagccctgcggacgctggtccagcttagtttgcagcagctggttctccggggtgccgcaggacaccggggtgagttcgatgccctgcaggctcgggattatctggaacatatcaccagtattgggcctcggactaccggaagccccgaaaatgagattcttactgtacactatcttctggagcagattaagctcattgaggtgcagtctaattcattacacaaaatttccgtggatgtccagcgccctacaggctcattcagtatcgatttcttaggtggctttactagttattacgacaacatcacgaatgtagtcgtgaagctcgaacctcgagacggggcacagcatgcggttttggccaactgtcactttgactccgttgctaactctccgggtgccagcgacgacgctgtaagctgttccgttatgctcgaggtactgagggtgctgagcacatccagcgaggcactccaccatgctgtgattttcttatttaacggcgcagaagaaaatgtgttgcaggccagccacgggttcattacgcagcacccatgggcatctctcattagggctttcattaacttagaagccgctggggtggggggtaaggagctggtgttccagaccggtccggaaaatccctggctcgtccaggcctacgtgtccgccgctaaacatcccttcgcctctgtggttgcccaagaggtgtttcagtctggaattatcccctctgacacggacttccgcatatatcgggattttggaaatatccctggaatcgatctggctttcattgaaaatggatacatctatcacacaaagtacgataccgccgaccgcatcctaacagactcgatccaaagggctggagacaacattctcgccgtcttgaagcaccttgcaacatcggacatgctggccgctgcttccaagtatcgccacggcaacatggtgttttttgacgtcttgggtctctttgtaatcgcgtaccctagcagaatcggttcaattatcaattacatggtagtaatgggcgtggtgctatacctgggcaaaaaattcctgcagccaaaacataaaactggcaactacaagaaagatttcttatgtggcctgggaattactttgatttcctggttcacatcactcgtgaccgtccttatcatcgccgtgtttatctccctcatcgggcagtctctcagctggtataatcacttttatgtgtctgtgtgcctatacgggaccgcgaccgtggccaaaatcattctgatccatacactggccaagcggttctactatatgaatgccagtgcacagtacctgggagaagtttttttcgatataagcctctttgtgcactgttgttttctcgtaaccctgacctatcagggactgtgtagtgcattcatctctgccgtgtgggtcgcctttccactcctgaccaagctgtgcgtgcataaagatttcaaacagcatggggcacaggggaaatttatcgctttctacctgctgggcatgttcatcccctatctctatgcactttatttgatatgggccgtatttgagatgttcacccccatccttgggcgatcaggttcagagatcccccctgacgtcgtgcttgcctctattctggccggttgtaccatgattctcagttcttatttcatcaatttcatctatcttgctaagagtacaaagaaaacaatgctgacgctcacactggtgtgtgccatcacctttctcctggtgtgtagtggcacatttttcccctactccagtaaccccgctaacccgaaaccaaagagggtatttctccagcacatgaccaggacatttcatgatcttgagggcaacgcagttaaacgagacagtgggatttggatcaacggcttcgattacaccggcatctcacatatcaccccgcacatccccgagatcaatgattctattagggcccactgtgaggaaaacgctccgctgtgcgggttcccatggtacctgccggtacacttcctgatcaggaagaactggtatttgcccgcaccagaggtttcaccacggaatcctccacattttcgccttatcagcaaagagcaaaccccttgggacagtatcaagctgaccttcgaggctactggtccttcccacatgtctttctatgtgagagcccacaaaggttcaacattgtcgcagtggtcacttggcaacgggacgcccgtaacctctaagggcggtgattacttcgtgttctattcccacggactacaggcgagtgcctggcaattttggatcgaggtgcaggtgtctgaggaacaccccgagggaatggtcacagttgccattgctgctcattaccttagcggtgaggataagcgttctccccagctggatgccctgaaagagaaatttcccgactggacattccccagcgcttgggtgtgtacctatgacctctttgtgttttag

SEQ ID NO: 217308 - DNA, 2715 bp, Artificial Sequence
  derived and/or modified sequence
atggagtggggcagcgagagcgccgccgtgagaagacacagagtgggcgtggagagaagagagggcgccgccgccgcccccccccccgagagagaggccagagcccaggagcccctggtggacggctgcagcggcggcggcagaaccagaaagagaagccccggcggcagcggcggcgccagcagaggcgccggcaccggcctgagcgaggtgagagccgccctgggcctggccctgtacctgatcgccctgagaaccctggtgcagctgagcctgcagcagctggtgctgagaggcgccgccggccacagaggcgagttcgacgccctgcaggccagagactacctggagcacatcaccagcatcggccccagaaccaccggcagccccgagaacgagatcctgaccgtgcactacctgctggagcagatcaagctgatcgaggtgcagagcaacagcctgcacaagatcagcgtggacgtgcagagacccaccggcagcttcagcatcgacttcctgggcggcttcaccagctactacgacaacatcaccaacgtggtggtgaagctggagcccagagacggcgcccagcacgccgtgctggccaactgccacttcgacagcgtggccaacagccccggcgccagcgacgacgccgtgagctgcagcgtgatgctggaggtgctgagagtgctgagcaccagcagcgaggccctgcaccacgccgtgatcttcctgttcaacggcgccgaggagaacgtgctgcaggccagccacggcttcatcacccagcacccctgggccagcctgatcagagccttcatcaacctggaggccgccggcgtgggcggcaaggagctggtgttccagaccggccccgagaacccctggctggtgcaggcctacgtgagcgccgccaagcaccccttcgccagcgtggtggcccaggaggtgttccagagcggcatcatccccagcgacaccgacttcagaatctacagagacttcggcaacatccccggcatcgacctggccttcatcgagaacggctacatctaccacaccaagtacgacaccgccgacagaatcctgaccgacagcatccagagagccggcgacaacatcctggccgtgctgaagcacctggccaccagcgacatgctggccgccgccagcaagtacagacacggcaacatggtgttcttcgacgtgctgggcctgttcgtgatcgcctaccccagcagaatcggcagcatcatcaactacatggtggtgatgggcgtggtgctgtacctgggcaagaagttcctgcagcccaagcacaagaccggcaactacaagaaggacttcctgtgcggcctgggcatcaccctgatcagctggttcaccagcctggtgaccgtgctgatcatcgccgtgttcatcagcctgatcggccagagcctgagctggtacaaccacttctacgtgagcgtgtgcctgtacggcaccgccaccgtggccaagatcatcctgatccacaccctggccaagagattctactacatgaacgccagcgcccagtacctgggcgaggtgttcttcgacatcagcctgttcgtgcactgctgcttcctggtgaccctgacctaccagggcctgtgcagcgccttcatcagcgccgtgtgggtggccttccccctgctgaccaagctgtgcgtgcacaaggacttcaagcagcacggcgcccagggcaagttcatcgccttctacctgctgggcatgttcatcccctacctgtacgccctgtacctgatctgggccgtgttcgagatgttcacccccatcctgggcagaagcggcagcgagatcccccccgacgtggtgctggccagcatcctggccggctgcaccatgatcctgagcagctacttcatcaacttcatctacctggccaagagcaccaagaagaccatgctgaccctgaccctggtgtgcgccatcaccttcctgctggtgtgcagcggcaccttcttcccctacagcagcaaccccgccaaccccaagcccaagagagtgttcctgcagcacatgaccagaaccttccacgacctggagggcaacgccgtgaagagagacagcggcatctggatcaacggcttcgactacaccggcatcagccacatcaccccccacatccccgagatcaacgacagcatcagagcccactgcgaggagaacgcccccctgtgcggcttcccctggtacctgcccgtgcacttcctgatcagaaagaactggtacctgcccgcccccgaggtgagccccagaaaccccccccacttcagactgatcagcaaggagcagaccccctgggacagcatcaagctgaccttcgaggccaccggccccagccacatgagcttctacgtgagagcccacaagggcagcaccctgagccagtggagcctgggcaacggcacccccgtgaccagcaagggcggcgactacttcgtgttctacagccacggcctgcaggccagcgcctggcagttctggatcgaggtgcaggtgagcgaggagcaccccgagggcatggtgaccgtggccatcgccgcccactacctgagcggcgaggacaagagaagcccccagctggacgccctgaaggagaagttccccgactggaccttccccagcgcctgggtgtgcacctacgacctgttcgtgttctag

SEQ ID NO: 217309 - DNA, 5376 bp, Artificial Sequence
  derived and/or modified sequence
aggaggcgctgcggcagcgacggcggcgtcggcggcggccggggctgtcgcgggttggggcggttgggctggcagctgaggctcgtggccatggagtggggttctgagtcggctgctgtgaggcggcaccgcgtcggagtagagcgtcgagagggagcggcggccgcgccaccgccggagagggaggcccgagcgcaggagcctctggtggatgggtgcagcggcggcgggaggacgcggaagaggagccccgggggtagcggcggcgcgagcaggggcgcggggaccgggctgtctgaggtgcgcgccgcgctggggctcgcgctctacctgatcgcgctgcggacgctggtgcagctctcgctgcagcagctcgtgctacgcggggccgctggacaccgcggggagttcgacgcgctccaagccagggattatcttgaacacataacctccattggccccaggactacaggaagtccagaaaatgaaattctgaccgtgcactaccttttggaacagattaaactgattgaagtgcaaagcaacagccttcataagatttcagtagatgtacaacggcccacaggctcttttagcattgatttcttgggaggttttacaagctattatgacaacatcaccaatgttgtggtaaagctggaacccagagatggagcccagcatgctgtcttggctaattgtcattttgactcagtagcaaactcaccaggtgccagtgatgatgcagttagctgctcagtgatgctggaagtccttcgcgtcttgtcaacatcttcagaagccttgcatcatgctgtcatatttctctttaatggtgctgaggaaaatgtcttgcaagccagtcatggtttcattactcagcacccctgggctagcttgattcgtgcattcattaacctagaggcagcaggtgtaggagggaaagaacttgtattccaaacaggtcctgaaaatccttggttggttcaagcttatgtttcagcagctaaacacccttttgcttctgtggtggctcaggaggtttttcagagtggaatcattccttcagatactgactttcgtatctacagggattttgggaacattccaggaatagacttagcttttattgagaatggatacatttatcacaccaagtatgacacagcggacagaattctaacagattccattcagagagcaggtgacaacattttagcagttcttaagcatctagctacatctgatatgctggctgctgcttctaagtatcgacatggaaacatggtcttctttgatgtgctgggcctgtttgtcattgcctacccctctcgtattggctcaatcataaactacatggtggtaatgggtgttgttttgtacctgggcaaaaaatttttgcagcccaaacataagactggtaactacaagaaggacttcttgtgtggacttggcatcactttgatcagctggttcactagccttgttaccgttctcattatagcagtgttcatctctcttattggacagtctctctcatggtataaccacttctatgtctccgtttgtctgtatggaactgcaactgtagccaaaataatacttatacatactcttgcgaaaagattttattacatgaatgccagtgcccagtatctgggagaagtattttttgacatttcgctgtttgtccattgctgttttcttgttaccctcacttaccaaggactttgctcggcgtttattagtgctgtctgggtagcattcccattgctcacaaagctctgtgtgcataaggacttcaagcagcatggtgcccaaggaaaatttattgctttttaccttttggggatgtttattccttatctttatgcattgtacctcatctgggcagtatttgagatgtttacccctatcctcgggagaagtggttctgaaatcccacctgatgttgtgctggcatccattttggctggctgtacaatgattctctcgtcctattttattaacttcatctaccttgccaagagcacaaaaaaaaccatgctaactttaactttggtatgtgcaattacattcctccttgtttgcagtggaacattttttccatatagctccaatcctgctaatccgaagccaaagagagtgtttcttcagcatatgactagaacattccatgacttggaaggaaatgcagttaaacgggactctggaatatggatcaatgggtttgattatactggaatttctcacataacccctcacattcctgagatcaatgatagtatccgagctcactgtgaggagaatgcacctctttgtggttttccttggtatcttccagtgcactttctgatcaggaaaaactggtatcttcctgccccagaagtttctccaagaaatcctcctcatttccgactcatatccaaagaacagacaccttgggattctataaaattgacttttgaagcaacaggaccaagccatatgtccttctatgttcgagcccacaaagggtcaacactttctcagtggtctcttggcaatggcaccccagtcacaagtaaaggaggagactactttgtcttttactcccatggactccaggcctctgcatggcagttctggatagaagtgcaggtttcagaagaacatcctgaaggaatggtcaccgtggccattgctgcccactatctgtctggggaagacaagagatcccctcaactggatgctctgaaggaaaagttcccagattggacatttccctctgcctgggtgtgcacctacgatctctttgtattttaatcttgtggatgagctctaagtacatgcccagtggatactccatgtgacatggtttctccctatgttacgtggatgtttgtaacgtaagtcaatgaattttaatgatcatatgttcaaagagctttctgggttaacgcttttcagggccaagcactataagggtttagctgtggcgcagtgatgcatggcctgttgacacttgaaaatgccagtcttttggcacttcagcacatgtgggtactgccactacacacacgtcattttatatgaccttaaggacaaagccaacaatccacttcaatagctgcccctttaggatcaagaaagatgtacactgtcagagcattgttaatgagacaaaagttgtttccaatttaagccccaaaaccatttgttgtattagtggatggtgggtaaaatatcattcactgaggtaatgattccccttgagaatataactctgtgtaggtcactggaaagtgattgccatagggctgggagagaagcattgcactcttgaggctgtagcctgtgtcaagctgtttcttcaggcagcctctcaaatgtgctttgtctctctgtgctgaggcctggaccctgtgctgagctggtgactcactgtcctgacaagtggacacacagatgcactgctgtgctgctttcctgaggtggttttctatgcctgttttcctctgaaacatgtctgttacccctctccatcttaccaagttgaaaaggggaatatttggccacatacccctctggttttcgtaggttcttttggttcagaatattgtttgtgccagtacatgaccttaacttccttcctcagagcactgagctgccatctgggctattctggggtagaaggaaggctgggagtggtgggaattttataaatatttattctcttttctttgtttcataggagtcttgtgttatacaaggttagtccttcatggtataatcttactgatgcactgggcctatctttttgttttccagccagttgaatagattagtttttctcagtaacttactatccagcagactggctttcctgagacttgaggttgtggcttatactggaatgagaccactgtacgtgtaggtggttcagatcctgcgtaatggcagcatgaggacttaaaaggtggttttcattttgaagatggctatgtagcttgtaaggtgtatcacagcagtacctctcatggctttttggttccagcagtgagggcattggtgagatcaatggtaaactgtgcaagctttctttttatcattaggaaatgtgaaacgttggacaaattttgagttttaacaaggacaaaaagttgaaagaaaaggcacagttaacaaaaaagggtggctagatttatcttgggtgatggaggaaatgagagaggaatgctcttgaaaggtggtctgtggatctgtctgaatagaaagagcacagtaagtatgcattgccggagaaaacgtccttgaagctgcttgtctcatgtgtatgatgtgctttttaaatcatgcccctcgttgcctgcctaatctgtgactccctaaaaactaactgggcccatgtagatggggctgcaaccagagctgaataacatgttaggctcacacatgcatcagcactgcacactggaatcattgctcttcctggactttgtagaaatcagtctcaagtgcttcaagagtctggctcctgctacttttatctgtcaggtagcacataaggtttgcagggtttatattttgtatagaatcacagttgtggagaaaaagtaataatttctcaatgaattttaaaaatgggcctattttctatccccgtggttcatctgatataattagtgttccctgtgaattccccccctctatgggaaggatgcctttactctttatcagtaataaattatgactgttttcatattgccttagggttatttccctgtgtaaaccattgtcttttgttttggttttctttagcattatgaagctttggtattgtacaaggtcagtagtaagatgctcactagtctcagggcttgtgtaatattctgggaggtcatttaaatgccagaaatggtcaagcaattatacacagtatttatgactctgttaagcataccgtttgtctgtcacattagtagattctgagattaaaaaaaatttttaaagagtgatcatttaaataatttctaaaagggtcttttcaagctctaacaaagtcactaacaaatgcattattttctacagaattagatgttagtagtacagtactgcatattcagggaaaaagtgtgaggaattgatttcaaaatagttcgttcttgtgtttgacctaagaatgattgtcgcatgaagtgtttgtttttacagtttagcatatataaacaaacatgataggattccttaagatgttaccacccagggggccacaagccagcctgctgtctcaggaagctgtagaaggagtgtttgtcaatttcttgtcactggtttgctgacttactgaggattaattgttgccttacaatgttactgaaataaactgtttaatat

SEQ ID NO: 217310 - DNA, 3554 bp, Artificial Sequence
  derived and/or modified sequence
tcgcgggttggggcggttgggctggcagctgaggctcgtggccatggagtggggttctgagtcggctgctgtgaggcggcaccgcgtcggagtagagcgtcgagagggagcggcggccgcgccaccgccggagagggaggcccgagcgcaggagcctctggtggatgggtgcagcggcggcgggaggacgcggaagaggagccccgggggtagcggcggcgcgagcaggggcgcggggaccgggctgtctgaggtgcgcgccgcgctggggctcgcgctctacctgatcgcgctgcggacgctggtgcagctctcgctgcagcagctcgtgctacgcggggccgctggacaccgcggggagttcgacgcgctccaagccagggattatcttgaacacataacctccattggccccaggactacaggaagtccagaaaatgaaattctgaccgtgcactaccttttggaacagattaaactgattgaagtgcaaagcaacagccttcataagatttcagtagatgtacaacggcccacaggctcttttagcattgatttcttgggaggttttacaagctattatgacaacatcaccaatgttgtggtaaagctggaacccagagatggagcccagcatgctgtcttggctaattgtcattttgactcagtagcaaactcaccaggtgccagtgatgatgcagttagctgctcagtgatgctggaagtccttcgcgtcttgtcaacatcttcagaagccttgcatcatgctgtcatatttctctttaatggtgctgaggaaaatgtcttgcaagccagtcatggtttcattactcagcacccctgggctagcttgattcgtgcattcattaacctagaggcagcaggtgtaggagggaaagaacttgtattccaaacaggtcctgaaaatccttggttggttcaagcttatgtttcagcagctaaacacccttttgcttctgtggtggctcaggaggtttttcagagtggaatcattccttcagatactgactttcgtatctacagggattttgggaacattccaggaatagacttagcttttattgagaatggatacatttatcacaccaagtatgacacagcggacagaattctaacagattccattcagagagcaggtgacaacattttagcagttcttaagcatctagctacatctgatatgctggctgctgcttctaagtatcgacatggaaacatggtcttctttgatgtgctgggcctgtttgtcattgcctacccctctcgtattggctcaatcataaactacatggtggtaatgggtgttgttttgtacctgggcaaaaaatttttgcagcccaaacataagactggtaactacaagaaggacttcttgtgtggacttggcatcactttgatcagctggttcactagccttgttaccgttctcattatagcagtgttcatctctcttattggacagtctctctcatggtataaccacttctatgtctccgtttgtctgtatggaactgcaactgtagccaaaataatacttatacatactcttgcgaaaagattttattacatgaatgccagtgcccagtatctgggagaagtattttttgacatttcgctgtttgtccattgctgttttcttgttaccctcacttaccaaggactttgctcggcgtttattagtgctgtctgggtagcattcccattgctcacaaagctctgtgtgcataaggacttcaagcagcatggtgcccaaggaaaatttattgctttttaccttttggggatgtttattccttatctttatgcattgtacctcatctgggcagtatttgagatgtttacccctatcctcgggagaagtggttctgaaatcccacctgatgttgtgctggcatccattttggctggctgtacaatgattctctcgtcctattttattaacttcatctaccttgccaagagcacaaaaaaaaccatgctaactttaactttggtatgtgcaattacattcctccttgtttgcagtggaacattttttccatatagctccaatcctgctaatccgaagccaaagagagtgtttcttcagcatatgactagaacattccatgacttggaaggaaatgcagttaaacgggactctggaatatggatcaatgggtttgattatactggaatttctcacataacccctcacattcctgagatcaatgatagtatccgagctcactgtgaggagaatgcacctctttgtggttttccttggtatcttccagtgcactttctgatcaggaaaaactggtatcttcctgccccagaagtttctccaagaaatcctcctcatttccgactcatatccaaagaacagacaccttgggattctataaaattgacttttgaagcaacaggaccaagccatatgtccttctatgttcgagcccacaaagggtcaacactttctcagtggtctcttggcaatggcaccccagtcacaagtaaaggaggagactactttgtcttttactcccatggactccaggcctctgcatggcagttctggatagaagtgcaggtttcagaagaacatcctgaaggaatggtcaccgtggccattgctgcccactatctgtctggggaagacaagagatcccctcaactggatgctctgaaggaaaagttcccagattggacatttccctctgcctgggtgtgcacctacgatctctttgtattttaatcttgtggatgagctctaagtacatgcccagtggatactccatgtgacatggtttctccctatgttacgtggatgtttgtaacagggaccagatggcatacttagtgttttctgtaaactgaatttactggcaggaacattttcagctgactgggataaactgatgcttcgattcctgaagaactcaaatccaccacttgaactgggttcctaggattacacaccatatgcagtaccattagagaaagatgctacgtgggtgtatggcctagagaagatgtgtaacttttgcaactaacctgagctgtgggtgtggatggaggtgtctcagattctccagagccaatggctttaagaaatcgaatcatgtgtcgacaaaggtcccacttgccttgttctagtgctgtgttgaatagaagggtagcatgttgcctacttactgcagggacttccatattctacaaaaaacaaccaggacagcattctttttatactacacaatttgggaagatatgagcaattctttatctcgttttctaaactcaaagaatgtagccacaccaccacaggggttagtttaataataagattaaaaagtaccatacaaggaaaagcgaggcaagtactcttctggtgtatgtaaactataatttattaaactcctactacatgccagatagcatacatatactttaagtcatttcatttatttctcccagtgactctgcagataggcatatcatttgtattttacaagtgaggaaactgagttaagtaaattgttgaagatcagcag

SEQ ID NO: 217311 - DNA, 1637 bp, Artificial Sequence
  derived and/or modified sequence
cgtattggctcaatcataaactacatggtggtaatgggtgttgttttgtacctgggcaaaaaatttttgcagcccaaacataagactggtaactacaagaaggacttcttgtgtggacttggcatcactttgatcagctggttcactagccttgttaccgttctcattatagcagtgttcatctctcttattggacagtctctctcatggtataaccacttctatgtctccgtttgtctgtatggaactgcaactgtagccaaaataatacttatacatactcttgcgaaaagattttattacatgaatgccagtgcccagtatctgggagaagtattttttgacatttcgctgtttgtccattgctgttttcttgttaccctcacttaccaaggactttgctcggcgtttattagtgctgtctgggtagcattcccattgctcacaaagctctgtgtgcataaggacttcaagcagcatggtgcccaaggaaaatttattgctttttaccttttggggatgtttattccttatctttatgcattgtacctcatctgggcagtatttgagatgtttacccctatcctcgggagaagtggttctgaaatcccacctgatgttgtgctggcatccattttggctggctgtacaatgattctctcgtcctattttattaacttcatctaccttgccaagagcacaaaaaaaaccatgctaactttaactttggtatgtgcaattacattcctccttgtttgcagtggaacattttttccatatagctccaatcctgctaatccgaagccaaagagagtgtttcttcagcatatgactagaacattccatgacttggaaggaaatgcagttaaacgggactctggaatatggatcaatgggtttgattatactggaatttctcacataacccctcacattcctgagatcaatgatagtatccgagctcactgtgaggagaatgcacctctttgtggttttccttggtatcttccagtgcactttctgatcaggaaaaactggtatcttcctgccccagaagtttctccaagaaatcctcctcatttccgactcatatccaaagaacagacaccttgggattctataaaattgacttttgaagcaacagcctgcctgcctatccttcagattttggacttgccagcctcaacaatcatgaccaagccatatgtccttctatgttcgagcccacaaagggtcaacactttctcagtggtctcttggcaatggcaccccagtcacaagtaaaggaggagactactttgtcttttactcccatggactccaggcctctgcatggcagttctggatagaagtgcaggtttcagaagaacatcctgaaggaatggtcaccgtggccattgctgcccactatctgtctggggaagacaagagatcccctcaactggatgctctgaaggaaaagttcccagattggacatttccctctgcctgggtgtgcacctacgatctctttgtattttaatcttgtggatgagctctaagtacatgcccagtggatactccatgtgacatggtttctccctatgttacgtggatgtttgtaacgtaagtcaatgaattttaatgatcatatgttc

SEQ ID NO: 217312 - protein, 659 aa, Artificial Sequence
  derived and/or modified sequence
MSLPPEKASELKQLIHQQLSKMDVHGRIREILAETIREELAPDQQHLSTEDLIKALRRRGIIDDVMKELNFVTDSVEQELPSSPKQPICFDRQSTLKKTNIDPTRRYLYLQVLGGKAFLEHLQEPEPLPGQVCSTFTLCLHYRNQRFRSKPVPCACEPDFHDGFLLEVHRESLGDGTRMADSTTMLSISDPIHMVLIKTDIFGETTLVASYFLEWRSVLGSENGVTSLTVELMGVGTESKVSVGILNIKLEMYPPLNQTLSQEVVNTQLALERQKTAEKERLFLVYAKQWWREYLQIRPSHNSRLVKIFAQDENGINRPVCSYVKPLRAGRLLDTPRQAARFVNVLGYERAPVIGGGGKQEQWCTLLAFLCRNKGDCEDHANLLCSLLLGYGLEAFVCVGTKAKGVPHAWVMTCGTDGAITFWESLTGHRYIHKPTNPDEPPVAEQPKPLYPYRTIGCVFNHQMFLGNCQPSDAVETCVFDLNDESKWKPMSEEAIKSVCAPGATTSLPPFPPLCASTIDASVTSNEIEMQLRLLVSEHRKDLGLTTVWEDQLSYLLSPALASYEFERTTSISAGNEEFQDAIRRAVPDGHTFKGFPIHFVYRNARRAFATCLRSPFCEEIICCRGDQVRLAVRVRVFTYPESACAVWIMFACKYRSVL

SEQ ID NO: 217313 - DNA, 1980 bp, Artificial Sequence
  derived and/or modified sequence
atgagtctgccacccgaaaaggccagcgaactaaagcagttgatccaccaacagctgagcaaaatggatgttcacggaaggataagggagatcctggcagagaccatacgggaggaactcgcaccagatcagcagcatctgagcaccgaggatcttattaaggccttacggaggagaggcatcatcgacgacgtgatgaaggagctgaatttcgtgacagatagcgtggagcaggagttgcccagctcaccaaaacagccaatttgctttgatcgccagtctaccctaaaaaaaacgaatatagaccctacccgcaggtatctttatctgcaggtacttggcggcaaggcattccttgaacatctgcaagaaccggaacccctcccggggcaagtttgcagtacgttcacgctttgcctgcattacagaaatcagagatttaggtctaagcctgtgccctgcgcttgcgagcctgatttccacgatgggtttctactcgaagtccaccgcgagtctcttggcgatggcacccgcatggctgacagtacaaccatgctcagcatcagcgaccccatacacatggtgctcattaagactgacatcttcggcgaaaccacactggtggcttcctattttctggaatggcgctcggtgcttgggtccgagaacggcgtcacatctttaactgtcgaactgatgggggtggggacggagagcaaggtgagcgtgggcattttgaatatcaaactcgagatgtatcccccgcttaaccagacattgagccaggaagtggtgaacacacaactggccctggaaagacaaaagacagctgagaaggagagactatttcttgtgtacgcaaagcagtggtggagagaatacctgcagatcaggcccagccataatagtcggttggtgaaaatctttgctcaggatgagaatgggatcaacaggccagtctgcagttatgtgaagccattacgcgcgggtagactcctcgacacaccccgccaagcagcgcgtttcgtcaacgtgcttggctatgagcgagccccggtgatcggcggaggcggtaaacaggagcaatggtgtactctgttggcattcctgtgccgcaataaaggcgactgcgaggatcacgccaacctcttgtgctctctcttgctcggctatggtcttgaggctttcgtctgcgtgggtaccaaggcaaagggcgtgcctcacgcttgggtgatgacttgcggaaccgacggtgctatcactttctgggaatcgcttaccggccacaggtatattcacaaaccaacaaatcctgacgaacccccagtggccgaacagccaaagcccctgtatccctatcgcactattggatgtgtctttaaccatcagatgtttctggggaattgtcagccgtccgatgccgtcgaaacatgcgtatttgatttaaatgatgagagcaagtggaagccgatgtccgaggaagctattaaaagtgtttgcgcaccaggtgctaccacaagcctgccaccatttccccccctgtgcgcttcgaccattgatgcgtctgttacctctaatgagattgagatgcaacttcgcctgctcgtgagcgagcacaggaaagacttaggtctaaccaccgtgtgggaggaccagctctcctacttactctctcctgcactcgctagctatgagttcgagagaaccaccagtattagcgcgggtaatgaagaattccaggacgccatcagacgtgcagtccccgacgggcacactttcaaaggatttcccatccacttcgtgtacagaaatgctcggcgagccttcgctacctgcctgcggagccctttctgcgaggaaatcatttgttgtagaggcgatcaagtgcgtctggctgttcgagtgagagtatttacttatccagagagcgcctgtgccgtgtggattatgttcgcttgtaagtatcgttccgtgttatag

SEQ ID NO: 217314 - DNA, 1980 bp, Artificial Sequence
  derived and/or modified sequence
atgagcctgcccccagagaaggccagcgagctgaagcagctgatccaccagcagctgagcaagatggatgtgcacggccgcatccgggagatcctggccgagaccatccgggaggagctggccccagaccagcagcacctgagcacagaggacctgatcaaggccctgcggcggcggggcatcattgatgatgtgatgaaggagctgaactttgtgacagattctgtggagcaggagctgcccagcagccccaagcagcccatctgctttgaccggcagagcaccctgaagaagaccaacatcgaccccacccggcgctacctgtacctgcaggtgctgggcggcaaggccttcctggagcacctgcaggagcctgagcccctgcccggccaggtgtgcagcaccttcaccctgtgcctgcactacagaaaccagcgcttccgcagcaagcctgtgccctgtgcctgtgagccagacttccatgatggcttcctgctggaggtgcaccgggagagcctgggagatggcaccaggatggctgacagcaccaccatgctgagcatcagtgaccccatccacatggtgctgatcaagacagacatctttggagagaccaccctggtggccagctacttcctggagtggaggtctgtgctgggctctgaaaatggagtgaccagcctgactgtggagctgatgggcgtgggcacagagagcaaggtgtctgtgggcatcctgaacatcaagctggagatgtacccacccctgaaccagaccctgagccaggaggtggtgaacacccagctggccctggagcggcagaagacagctgagaaggagcggctcttcctggtgtatgccaagcagtggtggagggagtacctgcagatccggcccagccacaacagccggctggtgaagatctttgcccaggatgaaaatggcatcaacagacctgtgtgcagctatgtgaagcccctgcgggccggccgcctgctggacaccccccggcaggccgccaggtttgtgaatgtgctgggctatgaaagagcccctgtgattggaggcggcggcaagcaggagcagtggtgcaccctgctggccttcctgtgcaggaacaagggggactgtgaggaccacgccaacctgctgtgcagcctgctgctgggctacggcctggaggcctttgtgtgtgtgggcaccaaggccaagggcgtgccccacgcctgggtgatgacctgtggcacagatggagccatcaccttctgggagagcctgaccggccaccgctacatccacaagcccaccaacccagatgagccccctgtggccgagcagcccaagcccctgtacccctaccgcaccatcggctgtgtgttcaaccaccagatgttcctgggcaactgccagcccagtgatgctgtggagacctgtgtgtttgacctgaatgatgagagcaagtggaagcccatgtctgaggaggccatcaagtctgtgtgtgcccctggggccaccaccagcctgccccccttcccccccctgtgtgccagcaccattgatgcctctgtgaccagcaatgaaattgagatgcagctgcggctgctggtgtctgagcacaggaaggacctgggcctgaccaccgtgtgggaggaccagctgagctacctgctgagccctgccctggccagctatgaatttgagaggaccaccagcatctctgctggaaatgaggagttccaggatgccatccggcgggctgtgcctgatggccacaccttcaagggcttccccatccactttgtgtacagaaatgcccggcgggcctttgccacctgcctgcggagccccttctgtgaggagatcatctgctgccgcggggaccaggtgcggctggccgtgcgggtgcgggtcttcacctacccagagagcgcctgtgctgtgtggatcatgtttgcctgcaagtacagatctgtgctgtag

SEQ ID NO: 217315 - DNA, 1980 bp, Artificial Sequence
  derived and/or modified sequence
atgagcctgccccccgagaaggccagcgagctgaagcagctgatccatcaacagctgtccaaaatggacgtgcacggaagaattcgggagattttggccgagacaatacgggaggaactagcgccggatcagcagcatctgtcgaccgaggacttgattaaagccctgagaagaagaggcatcatcgacgacgtcatgaaggaactgaatttcgttacggatagtgtggagcaggaacttcccagtagccctaagcagcccatctgcttcgaccgtcagagcactctgaaaaagaccaacatcgacccgactagacgatacttgtatctgcaggtactgggagggaaggcttttctcgagcatctccaggaaccagagccattgcccgggcaggtctgctcaacgtttacgctttgccttcactataggaatcagagatttagatctaagccagtcccctgcgcctgcgaacctgacttccacgacggcttcctgctagaagtccacagagaatccctgggcgatggtacaagaatggcagactctactactatgctttcgattagtgacccaattcacatggtgttgatcaagaccgatatcttcggtgagacaaccctcgtggcctcctattttctggaatggcggtccgtccttggctcagagaacggagttacctcattgacggtcgaactgatgggtgtgggcacggagagcaaggtgtccgtgggcatcctgaatataaaattagagatgtaccctcctctcaaccaaaccctgtcccaggaagtggtaaatacccagctcgccctagaaaggcaaaagaccgcagagaaggagcgcctttttttggtatacgcaaaacagtggtggagagaatatctccagattagaccatcacataatagccggttggtgaaaatttttgctcaggacgagaacggaatcaaccggcctgtatgtagctacgtaaaacctttgcgggccggtcgcctgctcgatacacccagacaggcagcaaggttcgtaaacgtgttgggatacgaacgggcccccgtcatcggagggggggggaagcaggagcagtggtgcacgctcctggcctttctttgtcgaaacaaaggcgattgcgaagatcatgctaacctgctctgctcactattactcgggtacggcctagaggcgttcgtttgcgtgggcaccaaggctaaaggggtaccccacgcctgggtgatgacctgtggcaccgacggcgctattacattttgggaatctctcacggggcacagatacatacacaagcccacaaatcccgacgaacctcccgtcgccgaacagcccaaacctctttatccataccgtactatcggttgcgtgttcaatcatcaaatgtttctcggaaattgccagccctctgatgcagtcgagacctgcgtctttgatcttaatgatgagagcaaatggaagccaatgtcagaggaagcgataaagtccgtttgcgcccctggcgccaccacctccttacctccattccctcccctctgcgctagtacaatcgacgctagtgttacatcgaacgagattgagatgcagctgaggctgcttgtttccgaacatcgcaaggatctagggctgactacagtgtgggaggaccagcttagctatctcctttctcctgctctcgctagttacgagtttgagcggacaacctccatcagcgcaggaaacgaggagttccaggatgctatacggcgagcagtgcccgatgggcacaccttcaaaggatttccaattcacttcgtgtaccggaatgccaggcgagccttcgcaacgtgtctgaggtcacctttctgcgaggagatcatttgttgcaggggtgatcaagtgaggttagcagtgcgggtgcgagtgtttacgtatccagagtctgcttgcgccgtttggatcatgtttgcatgcaagtacagatctgttctgtag

SEQ ID NO: 217316 - DNA, 1980 bp, Artificial Sequence
  derived and/or modified sequence
atgtcactgcctcctgaaaaggcatctgagctgaagcagcttatccatcagcaattaagcaagatggatgttcacggaaggattcgcgaaatcctggccgaaacaatccgagaggaacttgcaccagatcaacagcacctgtccaccgaggaccttattaaggctctccgtcggagagggataatagatgacgtgatgaaagagctcaactttgttacggatagtgtggagcaggaattaccttcgtcacctaaacagccaatttgtttcgaccggcagagcacactgaagaagaccaacatagaccccacccggcgatatctgtatttacaggtgctaggaggcaaggcatttttggaacacctgcaggaacctgaacccctccccggacaggtttgcagcacctttaccctctgcttacattataggaatcagcggtttcgctctaagcccgtgccttgtgcctgtgagcctgactttcatgacggttttctgctggaagtgcatcgtgagtcactgggggacgggacccgcatggccgactctactaccatgctgtccatttccgaccctatacacatggtgctgatcaagacagatatttttggtgagaccacccttgtcgcaagttatttcctggaatggcggtctgtgctgggcagtgaaaatggggtcactagcctgacggtggaactgatgggcgtagggactgaatccaaagtgagcgtcgggatcctgaacattaagctggagatgtacccaccgctgaatcaaactctgtcgcaggaggtcgtcaatacccagctcgcccttgagagacaaaaaactgccgagaaggagcgcctgttccttgtgtatgccaaacaatggtggagagagtacctgcagattagaccgtcacataacagccgcctggtgaaaatcttcgcgcaggacgagaatggcatcaacaggcccgtttgcagctacgttaaacccctcagggcaggacgcttgctggatacacctcgtcaggctgcacggttcgtgaatgtccttggctatgagcgagcaccggttataggtggtggaggcaaacaggagcagtggtgtactctgctggcatttctgtgccggaacaagggggattgcgaagatcacgcaaatctgttgtgttcccttctcctaggatacgggttggaagcgtttgtatgcgtcggtacaaaagctaagggggtgccgcatgcatgggtgatgacctgcgggactgatggcgctattaccttttgggagtctctgaccgggcaccgttacatccacaagcctacaaatccagatgaaccgcctgtggcagaacagcctaaacccctctacccctacagaactatcggatgtgtcttcaaccaccagatgttcctcgggaactgtcagccttcggatgccgtagagacatgcgtctttgacttgaacgacgaatctaaatggaagccgatgtctgaggaggcaattaaatctgtgtgtgctcccggtgcgacgacatcattgcctcctttccctccattgtgtgccagcaccattgacgcaagtgtgacctccaatgaaatagagatgcagctgagactcctggtttcggaacaccgtaaggaccttgggctgacgaccgtttgggaggaccaattgtcttacctactttcacccgcactggcctcttacgaatttgagcgcaccacctctatcagcgccggaaatgaggagtttcaagacgccattaggcgggctgtgcccgacggccataccttcaagggattccctatccactttgtttatcggaacgctagacgcgctttcgcaacttgtcttcgttcccctttttgtgaggagatcatctgctgtaggggagaccaggtgaggctcgcggtaagggtgcgtgtctttacataccccgaatcggcgtgtgcggtgtggattatgtttgcctgcaagtataggtccgtgctgtag

SEQ ID NO: 217317 - DNA, 2939 bp, Artificial Sequence
  derived and/or modified sequence
gtttgtccgccactgtttgaaaacagttggcgccgccgccgccggggcctcatttccaggtcagcccccggcctgacgcggcgttgcgtcccccgggagctgcgctaggcgaacggctgcggcgctttgtgctccagtcgctcctaacgctccctggcccggccggggccgcgcagttagggcatctgaggcggggagaagcggcggggagacgccggctgccagcatgtcgctgcctccggagaaagcctccgagctgaagcagctcatccaccagcagctgagcaagatggatgtccatggtagaataagagaaatccttgctgagactatacgggaagaattggcacctgatcaacagcatttatcaacagaagatttgatcaaagcccttagacgtcgaggaatcattgacgatgtgatgaaagaacttaattttgttactgacagtgttgagcaagaactcccttcctctccaaaacaacctatttgttttgatagacaatcgacattaaaaaaaactaatattgatccaacacggaggtatctttaccttcaggttttgggtggaaaagctttcttggaacatctgcaagaacctgagcctttacctggacaagtttgttcaacgtttactttatgtttacattatcgaaaccaacgttttcgttctaaacctgttccatgtgcctgtgaaccagattttcatgatggctttttacttgaagtacacagagaaagcttgggtgatggaactagaatggctgattcaacaacaatgttatcaataagtgatccaattcatatggtgctaatcaaaacagacatatttggtgagacgactttagtagcatcatattttctggaatggcgatcggttttgggctcagaaaatggagtgaccagtctgactgtggaacttatgggtgtaggcacagaatcaaaagtttctgtgggaattttaaatataaaacttgaaatgtatccaccactcaatcaaacgttatctcaagaagtagtgaacacacagcttgctttggaacgtcagaaaactgcagagaaagagcgattatttcttgtatatgctaagcagtggtggagagaatatttgcaaattcgaccctcacacaactcacgactggttaagatttttgcacaggatgaaaatgggataaatagaccagtctgttcctatgttaaaccacttcgagctggacggcttcttgatactccaaggcaagcagcaagatttgttaatgtccttggttatgaacgagcccctgttattggaggaggaggtaaacaggagcagtggtgcactctgctggcctttctctgtagaaacaagggtgactgtgaagatcacgctaaccttctgtgcagccttcttcttggatatggattagaagcctttgtttgtgttgggaccaaggcaaaaggagtacctcatgcatgggttatgacttgtggaactgatggggccatcactttttgggagagtttaacaggacacaggtacatccataaacctaccaatcctgatgaacctccagttgctgaacagcccaaaccactgtacccatatcgaacaattggttgtgttttcaaccatcagatgttcctgggaaattgtcaaccctctgatgcagtagaaacctgtgtatttgatttgaacgatgaatccaaatggaaacccatgagtgaggaagcaattaaatctgtgtgtgctcctggagctacaacatcccttcctccctttccacctctgtgtgcatccacaattgacgcgtcagtaacaagtaatgaaattgaaatgcagctgaggctcctggtgtcagaacacaggaaggatcttggcctcactactgtttgggaagaccagctctcctaccttttatcaccagctttggcttcttatgaatttgagcgtacaacaagtatatcagcaggcaatgaagaatttcaagatgccataagaagggctgtacctgatggtcacacatttaaagggttcccaatacattttgtgtatagaaatgcaagacgtgcatttgccacatgtcttcgatctcctttctgtgaagaaataatctgttgccgtggagaccaagtgcgactggcagttcgtgtccgagtatttacttaccctgaatctgcatgtgctgtttggatcatgtttgcttgtaaatatcgctcggtattatagggccaatatttatataagatttatacctgtgtttaattggaattttacacattgtacattacttagctatttagaggtttgttattttaaaatcacaatctggcttgaatggcatacttcaattttgtatatacttgactggtaatgtttaaaaaaaatcatgcattcctttaaaaattaaggctgaaaaacttgtataaatctccctggaatttagtataaattaagtgtatattctattttaataaatgctactttgtttacagttatcagtagtttaaatattaatataaaatgcattcagttttctttacacaaacaggtaatcaaagagatgtttgtctaagggtttgagccctagacaaatcagtatgatcattacttttcacaggttaatggaattattttatacagattaggagaaattaacctcatgacagatttatttattgcattggtgaaaataaatgttaatgaattaccacttttgtggtttattcgtggtccttgggatatttgagactgtccagaaatttatggttggaccttgaagcaagagtaggaaaaaactaataccagaaaagcataaatattaataacctcatatgaaagtacatgaatcatttagaaatatttatcactgtgatttgttgtaaaaatgaattgggtattttagaaaaactttattatacctctttgttatgatactgataaattgtgatcttgcagtcga

SEQ ID NO: 217318 - DNA, 1980 bp, Artificial Sequence
  derived and/or modified sequence
atgagcctgccccccgagaaggccagcgagctgaagcagctgatccaccagcagctgagcaagatggacgtgcacggcagaatcagagagatcctggccgagaccatcagagaggagctggcccccgaccagcagcacctgagcaccgaggacctgatcaaggccctgagaagaagaggcatcatcgacgacgtgatgaaggagctgaacttcgtgaccgacagcgtggagcaggagctgcccagcagccccaagcagcccatctgcttcgacagacagagcaccctgaagaagaccaacatcgaccccaccagaagatacctgtacctgcaggtgctgggcggcaaggccttcctggagcacctgcaggagcccgagcccctgcccggccaggtgtgcagcaccttcaccctgtgcctgcactacagaaaccagagattcagaagcaagcccgtgccctgcgcctgcgagcccgacttccacgacggcttcctgctggaggtgcacagagagagcctgggcgacggcaccagaatggccgacagcaccaccatgctgagcatcagcgaccccatccacatggtgctgatcaagaccgacatcttcggcgagaccaccctggtggccagctacttcctggagtggagaagcgtgctgggcagcgagaacggcgtgaccagcctgaccgtggagctgatgggcgtgggcaccgagagcaaggtgagcgtgggcatcctgaacatcaagctggagatgtacccccccctgaaccagaccctgagccaggaggtggtgaacacccagctggccctggagagacagaagaccgccgagaaggagagactgttcctggtgtacgccaagcagtggtggagagagtacctgcagatcagacccagccacaacagcagactggtgaagatcttcgcccaggacgagaacggcatcaacagacccgtgtgcagctacgtgaagcccctgagagccggcagactgctggacacccccagacaggccgccagattcgtgaacgtgctgggctacgagagagcccccgtgatcggcggcggcggcaagcaggagcagtggtgcaccctgctggccttcctgtgcagaaacaagggcgactgcgaggaccacgccaacctgctgtgcagcctgctgctgggctacggcctggaggccttcgtgtgcgtgggcaccaaggccaagggcgtgccccacgcctgggtgatgacctgcggcaccgacggcgccatcaccttctgggagagcctgaccggccacagatacatccacaagcccaccaaccccgacgagccccccgtggccgagcagcccaagcccctgtacccctacagaaccatcggctgcgtgttcaaccaccagatgttcctgggcaactgccagcccagcgacgccgtggagacctgcgtgttcgacctgaacgacgagagcaagtggaagcccatgagcgaggaggccatcaagagcgtgtgcgcccccggcgccaccaccagcctgccccccttcccccccctgtgcgccagcaccatcgacgccagcgtgaccagcaacgagatcgagatgcagctgagactgctggtgagcgagcacagaaaggacctgggcctgaccaccgtgtgggaggaccagctgagctacctgctgagccccgccctggccagctacgagttcgagagaaccaccagcatcagcgccggcaacgaggagttccaggacgccatcagaagagccgtgcccgacggccacaccttcaagggcttccccatccacttcgtgtacagaaacgccagaagagccttcgccacctgcctgagaagccccttctgcgaggagatcatctgctgcagaggcgaccaggtgagactggccgtgagagtgagagtgttcacctaccccgagagcgcctgcgccgtgtggatcatgttcgcctgcaagtacagaagcgtgctgtag

SEQ ID NO: 217319 - protein, 256 aa, Artificial Sequence
  derived and/or modified sequence
MPGPATDAGKIPFCDAKEEIRAGLESSEGGGGPERPGARGQRQNIVWRNVVLMSLLHLGAVYSLVLIPKAKPLTLLWAYFCFLLAALGVTAGAHRLWSHRSYRAKLPLRIFLAVANSMAFQNDIFEWSRDHRAHHKYSETDADPHNARRGFFFSHIGWLFVRKHRDVIEKGRKLDVTDLLADPVVRIQRNTQHIQKEGRALNQEAACEMLREWHQGHILKVTLPGLHILALLHTHCNHSEKCCLMLRALSVSLEVF

SEQ ID NO: 217320 - protein, 132 aa, Artificial Sequence
  derived and/or modified sequence
MPGPATDAGKIPFCDAKEEIRAGLESSEGGGGPERPGARGQRQNIVWRNVVLMSLLHLGAVYSLVLIPKAKPLTLLWAYFCFLLAALGVTAGAHRLWSHRSYRAKLPLRIFLAVANSMAFQAAAEVVLTQMP

SEQ ID NO: 217321 - DNA, 771 bp, Artificial Sequence
  derived and/or modified sequence
atgcccggccccgccaccgacgccggcaagatccccttctgcgacgccaaggaggagatcagagccggcctggagagcagcgagggcggcggcggccccgagagacccggcgccagaggccagagacagaacatcgtgtggagaaacgtggtgctgatgagcctgctgcacctgggcgccgtgtacagcctggtgctgatccccaaggccaagcccctgaccctgctgtgggcctacttctgcttcctgctggccgccctgggcgtgaccgccggcgcccacagactgtggagccacagaagctacagagccaagctgcccctgagaatcttcctggccgtggccaacagcatggccttccagaacgacatcttcgagtggagcagagaccacagagcccaccacaagtacagcgagaccgacgccgacccccacaacgccagaagaggcttcttcttcagccacatcggctggctgttcgtgagaaagcacagagacgtgatcgagaagggcagaaagctggacgtgaccgacctgctggccgaccccgtggtgagaatccagagaaacacccagcacatccagaaggagggcagagccctgaaccaggaggccgcctgcgagatgctgagagagtggcaccagggccacatcctgaaggtgaccctgcccggcctgcacatcctggccctgctgcacacccactgcaaccacagcgagaagtgctgcctgatgctgagagccctgagcgtgagcctggaggtgttctag

SEQ ID NO: 217322 - DNA, 399 bp, Artificial Sequence
  derived and/or modified sequence
atgcccggccccgccaccgacgccggcaagatccccttctgcgacgccaaggaggagatcagagccggcctggagagcagcgagggcggcggcggccccgagagacccggcgccagaggccagagacagaacatcgtgtggagaaacgtggtgctgatgagcctgctgcacctgggcgccgtgtacagcctggtgctgatccccaaggccaagcccctgaccctgctgtgggcctacttctgcttcctgctggccgccctgggcgtgaccgccggcgcccacagactgtggagccacagaagctacagagccaagctgcccctgagaatcttcctggccgtggccaacagcatggccttccaggccgccgccgaggtggtgctgacccagatgccctag

SEQ ID NO: 217323 - DNA, 771 bp, Artificial Sequence
  derived and/or modified sequence
atgccaggccccgctactgacgctggaaaaatcccgttctgcgacgcaaaagaggaaattcgggctgggctggagagttcggagggtggcggcggccctgaaaggcctggtgccaggggccaaaggcagaacatcgtttggcggaatgttgttctgatgagtctgctgcacctcggggctgtatactcgttggtgctcatccccaaagccaagccattgacccttctgtgggcctacttctgctttctgttggctgccctgggcgtaaccgccggggctcatcgtctgtggagtcaccgcagctatagagccaagttgcccctgcgcatttttctggctgtcgccaacagcatggccttccagaatgacattttcgagtggtctagggaccaccgggcccaccataaatacagcgaaaccgatgctgaccctcacaatgcacgacggggcttcttcttcagccacataggctggctgtttgtcagaaaacaccgagatgtgatcgagaaggggcggaagctggacgtgacagatctgctcgcggacccggtcgtaagaattcagcgcaatacccaacacatccagaaggaagggcgggccctcaaccaggaagcagcctgtgaaatgctgagggagtggcaccaagggcacatactgaaagttacacttccagggttgcacatactggccctcctgcacacacattgcaaccacagtgagaagtgctgtcttatgcttcgagcactgtctgtgagtctagaggtcttctag

SEQ ID NO: 217324 - DNA, 399 bp, Artificial Sequence
  derived and/or modified sequence
atgcctgggcccgccacagacgcagggaagattcctttctgcgatgctaaggaggaaatccgggcagggctcgagtctagcgaggggggaggaggccctgagcgtcccggcgctcgagggcagaggcaaaacatagtgtggcgtaacgtggtcctgatgtccctcctgcatctcggagctgtctacagcttggtactgataccaaaggccaagccactaacactgctgtgggcctatttttgtttcctgttggctgccctgggagttaccgcaggggctcacaggctatggagccacagatcataccgcgccaagttaccgctcagaatttttttggccgtcgccaactcgatggcttttcaagccgcagccgaagtcgtgctgacacagatgccatag

SEQ ID NO: 217325 - DNA, 771 bp, Artificial Sequence
  derived and/or modified sequence
atgcctggccctgccacagatgctgggaagatccccttctgtgatgccaaggaggagatccgggccggcctggagagcagcgagggcggcggcggccctgagaggcctggggcccggggccagaggcagaacatcgtgtggagaaatgtggtgctgatgagcctgctgcacctgggcgctgtgtacagcctggtgctgatccccaaggccaagcccctgaccctgctgtgggcctacttctgcttcctgctggccgccctgggcgtgacagctggggcccaccggctgtggagccacaggagctaccgggccaagctgcccctgcgcatcttcctggccgtggccaacagcatggccttccagaatgacatctttgagtggagccgggaccaccgggcccaccacaagtacagcgagacagatgctgacccccacaatgcccggcggggcttcttcttcagccacatcggctggctgtttgtgaggaagcacagagatgtgattgagaagggcaggaagctggatgtgacagacctgctggccgaccctgtggtgcgcatccagaggaacacccagcacatccagaaggagggccgggccctgaaccaggaggccgcctgtgagatgctgcgggagtggcaccagggccacatcctgaaggtgaccctgcccggcctgcacatcctggccctgctgcacacccactgcaaccacagcgagaagtgctgcctgatgctgcgggccctgtctgtgtccctggaggtgttctag

SEQ ID NO: 217326 - DNA, 399 bp, Artificial Sequence
  derived and/or modified sequence
atgcctggccctgccacagatgctgggaagatccccttctgtgatgccaaggaggagatccgggccggcctggagagcagcgagggcggcggcggccctgagaggcctggggcccggggccagaggcagaacatcgtgtggagaaatgtggtgctgatgagcctgctgcacctgggcgctgtgtacagcctggtgctgatccccaaggccaagcccctgaccctgctgtgggcctacttctgcttcctgctggccgccctgggcgtgacagctggggcccaccggctgtggagccacaggagctaccgggccaagctgcccctgcgcatcttcctggccgtggccaacagcatggccttccaggccgctgctgaggtggtgctgacccagatgccctag

SEQ ID NO: 217327 - DNA, 771 bp, Artificial Sequence
  derived and/or modified sequence
atgcccggccccgccaccgacgccggcaagatccccttctgcgacgcaaaggaggaaattcgagccggcttggagagctctgagggaggtggcgggcctgaacgccccggagctcgcgggcagagacagaatatcgtgtggcgtaacgtggtgttgatgtccctactgcacttaggagcagtttactctctggtcttaatccccaaggcaaaacccctgactctactctgggcgtacttttgtttcctgttagctgcattaggagttaccgcgggcgcacacaggctctggagccacaggagctatcgtgcaaagttgcccctgcggatatttcttgcagttgcgaacagcatggcctttcaaaacgatatcttcgaatggtccagggaccatcgggctcatcacaagtatagcgagacagatgctgacccccacaatgcccgacgcggcttctttttcagtcacattgggtggctatttgtgcgcaaacacagagacgtgatcgaaaagggccgcaagctagatgtgaccgacctgctcgccgaccctgtggtgcgaattcaacggaatactcagcatatccaaaaagaagggcgggctctgaaccaagaagccgcatgtgaaatgttgcgcgaatggcaccagggacacatcctaaaagttacgctgcctggcctgcacatcctcgctctcctccacacacactgcaatcattccgagaagtgctgtctgatgctaagggctctgagtgtttccctggaggtgttttag

SEQ ID NO: 217328 - DNA, 399 bp, Artificial Sequence
  derived and/or modified sequence
atgcccggccccgccaccgacgccggcaagatccccttctgcgacgccaaagaggaaattagggcgggcctggaaagcagtgagggggggggggggcccgagcgcccaggagccagagggcaacgacagaatatcgtctggcgaaacgtagtcctgatgtccctgctgcatctcggggctgtatacagccttgtgctgatacctaaggcaaaacccttgacattgctgtgggcctacttctgtttcctgctagctgcgctgggggtcaccgctggcgcccatagactgtggagccatagaagctaccgcgcgaaacttcctctccgcatattcctcgccgtggccaactcaatggcctttcaggccgcagccgaggtggttctgacccagatgccttag

SEQ ID NO: 217329 - DNA, 771 bp, Artificial Sequence
  derived and/or modified sequence
atgccaggcccagccaccgacgcaggcaagatccctttctgtgatgccaaggaggaaatccgggcaggattagaatccagcgagggaggaggcggacccgaacgcccaggggctcggggtcagcgacaaaatatcgtatggagaaatgtggtgttaatgtctctactgcacctgggtgctgtatatagtctggtactcatcccaaaggcaaagcctctaaccctgctttgggcctacttctgctttttactggcagctctaggggttactgccggtgcccacagactttggtctcacagatcatatagggctaagcttcctcttagaattttcctcgctgtagccaatagtatggcgtttcagaacgacatatttgagtggtcacgggatcatagggcccatcacaaatactcagagactgatgccgacccccacaacgcccgtagaggctttttcttctcccacatagggtggctgttcgtccgaaagcatcgggatgtgattgaaaaggggagaaagctcgacgttactgatctgctggctgaccccgtagtgaggattcagcgcaacacccaacacattcagaaggagggacgcgctttgaaccaggaagctgcctgcgaaatgctgcgcgaatggcaccaaggccatatcctcaaggtaaccctccctggactccacatcctggccctcttgcatacacattgtaatcattctgagaaatgctgcctcatgctgagggcactaagtgtgtctctggaggtgttctag

SEQ ID NO: 217330 - DNA, 399 bp, Artificial Sequence
  derived and/or modified sequence
atgcccggtcctgccacggacgcagggaaaatcccgttctgcgacgccaaagaggaaatccgggcagggctcgagagttcagagggcggaggtgggcctgaaagacctggcgctagggggcaacgtcaaaatatcgtgtggagaaatgtggtactaatgtccctgctgcatttgggggctgtgtatagtctcgtattgatacccaaggcgaaaccacttaccctgctgtgggcttatttttgcttcttactagcagcactgggagtcaccgcaggagcacatcgactgtggagtcatcggagttaccgagccaagctacctctccggatctttctggccgtcgccaattcaatggccttccaggctgcagcagaagtggttctgacgcaaatgccctag

SEQ ID NO: 217331 - DNA, 1995 bp, Artificial Sequence
  derived and/or modified sequence
agccatatgggggatacgccagcaacagacgccggccgccaagatctgcatccctaggccacgctaagaccctggggaagagcgcaggagcccgggagaagggctggaaggaggggactggacgtgcggagaattcccccctaaaaggcagaagcccccgcccccaccctcgagctccgctcgggcagagcgcctgcctgcctgccgctgctgcgggcgcccacctcgcccagccatgccaggcccggccaccgacgcggggaagatccctttctgcgacgccaaggaagaaatccgtgccgggctcgaaagctctgagggcggcggcggcccggagaggccaggcgcgcgcgggcagcggcagaacatcgtctggaggaatgtcgtcctgatgagcttgctccacttgggggccgtgtactccctggtgctcatccccaaagccaagccactcactctgctctgggcctacttctgcttcctcctggccgctctgggtgtgacagctggtgcccatcgcttgtggagccacaggtcctaccgggccaagctgcctctgaggatatttctggctgtcgccaactccatggctttccagaatgacatcttcgagtggtccagggaccaccgagcccaccacaagtactcagagacggatgctgacccccacaatgcccgccggggcttcttcttctcccatattgggtggctgtttgttcgcaagcatcgagatgttattgagaaggggagaaagcttgacgtcactgacctgcttgctgatcctgtggtccggatccagagaaatacacagcacatccagaaagaaggaagagctctcaatcaagaggcagcgtgtgagatgcttcgtgaatggcatcaagggcatatattgaaagtcacccttcccggattacacattttagctttgttacatactcattgtaaccactccgaaaagtgctgcttgatgctgcgtgctctttctgtgtccctggaggtattctgaaggtcagaagagagatatacaacagcgaggcttggtgataacgtatagaataacagacggggactccacacccaggccttttttaacggtgtgaagcatagacagagctgcagtctgtgctaacattaggttatttattgattcaatcagttgacacaaggaggcagctacggggaggtaaaatatggtcctaaaatcaaaaagatttcagttttgtcattctgtctctgagattctatttccacatctagagcagggtaataatgatacctaccttacaaaattattgggagaatacattagttaatatatgtgaaagtatggaggagatgtgcaataaatatttgtgttattaactacacatacagcactctataggagatattccatttataaaaactttaggttctaaaaacctgtacacgttgattatttttgtaagtcaaaagtgattaagaggagtttaagctatcatttccagatgtatttctataaataaaaacataagtatattcagttgatttggggtggagagttccatagatgtctgttaggtccgcttggtccagagctgagttcaagtcctgaatatccttgttaattttctgtcttgttgatctgtctaatattgacagtggggtattaaagtctcccactattattatatgggagtctaagtctccttgtaggtctctaagaacttgctttatgaatctgggtgctcctgtattaggtgcatacatatttaggatagttagctcttcttgctgcattgatcccattaccattatataatgcccttctttgtcttttttgatctttgttggtttaaagtctgttttattagagactaggattgcaacccctgctatttttttttttttttttgcttgataaatattcctgtatccctttattttgagcctatatgtgtctttgcacgtgaggtgggtctcctgaatacagcacaccgatgggttttgactcta

SEQ ID NO: 217332 - DNA, 841 bp, Artificial Sequence
  derived and/or modified sequence
cgccagcaacagacgccggccgccaagatctgcatccctaggccacgctaagaccctggggaagagcgcaggagcccgggagaagggctggaaggaggggactggacgtgcggagaattcccccctaaaaggcagaagcccccgcccccaccctcgagctccgctcgggcagagcgcctgcctgcctgccgctgctgcgggcgcccacctcgcccagccatgccaggcccggccaccgacgcggggaagatccctttctgcgacgccaaggaagaaatccgtgccgggctcgaaagctctgagggcggcggcggcccggagaggccaggcgcgcgcgggcagcggcagaacatcgtctggaggaatgtcgtcctgatgagcttgctccacttgggggccgtgtactccctggtgctcatccccaaagccaagccactcactctgctctgggcctacttctgcttcctcctggccgctctgggtgtgacagctggtgcccatcgcttgtggagccacaggtcctaccgggccaagctgcctctgaggatatttctggctgtcgccaactccatggctttccaggcagcagcagaagtggtcctgacccagatgccctgacagcttttcctggtgtgattttggaagttaacccttgaacagaatgggtttgaactgcgcagcttcacttaaatgcatggattttcttctgcctccaccacctctgagacagcaagatcagcccctcctcctctcagcctactcaatgcaaagaagacaaggatgaagacctttatgatgatccacttccacttaatgaatagtaaatatattttctcttctt

SEQ ID NO: 217333 - protein, 278 aa, Artificial Sequence
  derived and/or modified sequence
MGARLSRRRLPADPSLALDALPPELLVQVLSHVPPRSLVTRCRPVCRAWRDIVDGPTVWLLQLARDRSAEGRALYAVAQRCLPSNEDKEEFPLCALARYCLRAPFGRNLIFNSCGEQGFRGWEVEHGGNGWAIEKNLTPVPGAPSQTCFVTSFEWCSKRQLVDLVMEGVWQELLDSAQIEICVADWWGARENCGCVYQLRVRLLDVYEKEVVKFSASPDPVLQWTERGCRQVSHVFTNFGKGIRYVSFEQYGRDVSSWVGHYGALVTHSSVRVRIRLS

SEQ ID NO: 217334 - DNA, 837 bp, Artificial Sequence
  derived and/or modified sequence
atgggggcccggctctcaagacggcgactgcctgccgatccttctctggcattagacgcacttccccctgagttacttgttcaggtcctctcccacgtacctccgagatctctcgtgactcggtgccgtccagtgtgcagagcatggcgcgatatagtggacggtcccacagtatggctgctgcagctggcacgcgaccgcagtgcagagggtagagctctttacgcggtcgcacagcggtgtctgccatctaacgaagataaggaggaattcccactgtgtgccctggccaggtattgtttgcgggctccattcggcagaaacctaatttttaattcttgcggggaacaaggctttcgaggttgggaggtagagcacggggggaacggctgggccattgagaagaacttgacacccgttcctggcgccccctctcagacgtgctttgtcacctctttcgagtggtgctcgaaaaggcagttagtggatctcgtaatggagggggtttggcaggaacttcttgatagtgctcagattgagatctgcgtcgcggattggtggggcgcgcgcgagaactgcggatgtgtgtatcaactgagagtgcggctgctggacgtctatgaaaaggaagtcgtcaaattctcagccagtccagaccctgtgttacaatggacggaaagaggatgccgtcaggttagccacgtgtttaccaattttggaaaggggatacgttatgttagttttgaacaatatgggcgcgatgtctcttcctgggttgggcactatggcgcgttggtcacccattcgtcagtgagagtgcggattcggctgagttag

SEQ ID NO: 217335 - DNA, 837 bp, Artificial Sequence
  derived and/or modified sequence
atgggcgcccggctgagcagaagaaggctgcctgctgaccccagcctggccctggatgccctgcccccagagctgctggtgcaggtgctgagccacgtgccccccaggagcctggtgacccgctgcaggcctgtgtgccgggcctggagggacatcgtggatggccccaccgtgtggctgctgcagctggcccgggacagatctgctgagggccgggccctgtatgctgtggcccagcgctgcctgcccagcaatgaagacaaggaggagttccccctgtgtgccctggcccgctactgcctgcgggccccctttggaagaaacctgatcttcaacagctgtggggagcagggcttccggggctgggaggtggagcacggcggcaatggctgggccatcgagaagaacctgacccctgtgcctggggcccccagccagacctgctttgtgaccagctttgagtggtgcagcaagaggcagctggtggacctggtgatggagggcgtgtggcaggagctgctggacagcgcccagatcgagatctgtgtggccgactggtggggcgcccgggagaactgtggctgtgtgtaccagctgcgggtgcggctgctggatgtgtatgagaaggaggtggtgaagttcagcgccagcccagaccctgtgctgcagtggacagagcggggctgccggcaggtgagccacgtgttcaccaactttgggaagggcatccgctacgtgtcctttgagcagtatggaagagatgtgtcctcctgggtgggccactacggggccctggtgacccacagctctgtgcgggtgcgcatccggctgtcctag

SEQ ID NO: 217336 - DNA, 837 bp, Artificial Sequence
  derived and/or modified sequence
atgggcgcccggctgagccggcggcggctgcccgccgaccccagcctggcccttgatgctttacctcctgaactgttagtgcaggtactgtctcacgtccccccacgtagcctggtcacaaggtgtcggcctgtgtgcagggcctggcgggacatcgtcgacgggcctacagtgtggcttctgcagttggcccgtgatcgctccgccgagggaagagccctgtatgctgtggcccaaaggtgtctcccctccaatgaggacaaagaagagttccctctgtgtgccctggctcgctattgtttacgagcacccttcgggcggaatctcatctttaattcctgtggcgagcagggctttaggggttgggaggtagaacacggcggcaatggttgggcgatagaaaaaaacttgactcccgtgcccggggccccgagccagacctgttttgttacgtcgttcgagtggtgctctaagcgtcaactggtagatctggtgatggaaggggtctggcaggaactcctggatagcgcccaaattgaaatttgtgttgccgactggtggggtgcgagggaaaattgcggctgcgtgtatcagctcagggtgaggttgctggatgtgtatgaaaaggaagtggtcaagttcagtgcatcccctgatcccgtgcttcagtggacagagcgcggctgccgtcaggtgtcccacgtgtttactaacttcggcaagggcatcaggtatgtgtcattcgagcaatatggcagggacgtgagtagttgggtggggcactatggagctctagtgactcactcatcagtccgcgtgcgtatcaggctgagttag

SEQ ID NO: 217337 - DNA, 837 bp, Artificial Sequence
  derived and/or modified sequence
atgggggcacgccttagtagacgccgactgccggctgatccttccttggcccttgatgcgctgcccccagaactgctggtccaagtgcttagccatgtgcccccacgttctctggtgactcggtgccgtccagtttgcagagcatggagagacattgtggatgggccaaccgtgtggttgttgcagctcgcccgtgaccgcagcgccgaaggcagggccctgtatgccgtggcacagagatgccttcccagtaatgaagacaaggaggaattccctttatgtgctctggctagatattgtttgcgagcgccattcggtaggaacctgatcttcaactcgtgcggcgaacagggctttagaggctgggaagtagagcacggtggaaatggctgggcgattgaaaagaatttgacacctgtgcctggtgcgccttctcagacttgtttcgtcacttctttcgagtggtgctcaaaaagacagcttgtggatctggttatggaaggggtgtggcaggagctgcttgattctgctcaaatcgaaatctgtgtcgccgattggtggggagctcgtgagaactgtggctgcgtttatcaactgagggtacggttactggacgtatacgaaaaggaggttgttaagttctctgcatcccccgatccggtacttcagtggaccgagcggggttgccgtcaggtgtctcatgtgttcacgaactttggtaaaggtatcagatacgtgagtttcgaacagtacggccgagacgtgtcttcttgggtcgggcattacggcgcactggttacccacagtagcgttagagtacggataagactgtcctag

SEQ ID NO: 217338 - DNA, 837 bp, Artificial Sequence
  derived and/or modified sequence
atgggcgccagactgagcagaagaagactgcccgccgaccccagcctggccctggacgccctgccccccgagctgctggtgcaggtgctgagccacgtgccccccagaagcctggtgaccagatgcagacccgtgtgcagagcctggagagacatcgtggacggccccaccgtgtggctgctgcagctggccagagacagaagcgccgagggcagagccctgtacgccgtggcccagagatgcctgcccagcaacgaggacaaggaggagttccccctgtgcgccctggccagatactgcctgagagcccccttcggcagaaacctgatcttcaacagctgcggcgagcagggcttcagaggctgggaggtggagcacggcggcaacggctgggccatcgagaagaacctgacccccgtgcccggcgcccccagccagacctgcttcgtgaccagcttcgagtggtgcagcaagagacagctggtggacctggtgatggagggcgtgtggcaggagctgctggacagcgcccagatcgagatctgcgtggccgactggtggggcgccagagagaactgcggctgcgtgtaccagctgagagtgagactgctggacgtgtacgagaaggaggtggtgaagttcagcgccagccccgaccccgtgctgcagtggaccgagagaggctgcagacaggtgagccacgtgttcaccaacttcggcaagggcatcagatacgtgagcttcgagcagtacggcagagacgtgagcagctgggtgggccactacggcgccctggtgacccacagcagcgtgagagtgagaatcagactgagctag

SEQ ID NO: 217339 - protein, 626 aa, Artificial Sequence
  derived and/or modified sequence
MSRSGAAAEKADSRQRPQMKVNEYKENQNIAYVSLRPAQTTVLIKTAKVYLAPFSLSNYQLDQLMCPKSLSEKNSNNEVACKKTKIKKTCRRIIPPKMKNTSSKAESTLQNSSSAVHTESNKLQPKRTADAMNLSVDVESSQDGDSDEDTTPSLDFSGLSPYERKRLKNISENADFFASLQLSESAARLREMIEKRQPPKSKRKKPKRENGIGCRRSMRLLKVDPSGVSLPAAPTPPTLVADETPLLPPGPLEMTSENQEDNNERFKGFLHTWAGMSKPSSKNTEKGLSSIKSYKANLNGMVISEDTVYKVTTGPIFSMALHPSETRTLVAVGAKFGQVGLCDLTQQPKEDGVYVFHPHSQPVSCLYFSPANPAHILSLSYDGTLRCGDFSRAIFEEVYRNERSSFSSFDFLAEDASTLIVGHWDGNMSLVDRRTPGTSYEKLTSSSMGKIRTVHVHPVHRQYFITAGLRDTHIYDARRLNSRRSQPLISLTEHTKSIASAYFSPLTGNRVVTTCADCNLRIFDSSCISSKIPLLTTIRHNTFTGRWLTRFQAMWDPKQEDCVIVGSMAHPRRVEIFHETGKRVHSFGGEYLVSVCSINAMHPTRYILAGGNSSGKIHVFMNEKSC

SEQ ID NO: 217340 - protein, 562 aa, Artificial Sequence
  derived and/or modified sequence
MCPKSLSEKNSNNEVACKKTKIKKTCRRIIPPKMKNTSSKAESTLQNSSSAVHTESNKLQPKRTADAMNLSVDVESSQDGDSDEDTTPSLDFSGLSPYERKRLKNISENADFFASLQLSESAARLREMIEKRQPPKSKRKKPKRENGIGCRRSMRLLKVDPSGVSLPAAPTPPTLVADETPLLPPGPLEMTSENQEDNNERFKGFLHTWAGMSKPSSKNTEKGLSSIKSYKANLNGMVISEDTVYKVTTGPIFSMALHPSETRTLVAVGAKFGQVGLCDLTQQPKEDGVYVFHPHSQPVSCLYFSPANPAHILSLSYDGTLRCGDFSRAIFEEVYRNERSSFSSFDFLAEDASTLIVGHWDGNMSLVDRRTPGTSYEKLTSSSMGKIRTVHVHPVHRQYFITAGLRDTHIYDARRLNSRRSQPLISLTEHTKSIASAYFSPLTGNRVVTTCADCNLRIFDSSCISSKIPLLTTIRHNTFTGRWLTRFQAMWDPKQEDCVIVGSMAHPRRVEIFHETGKRVHSFGGEYLVSVCSINAMHPTRYILAGGNSSGKIHVFMNEKSC

SEQ ID NO: 217341 - DNA, 1881 bp, Artificial Sequence
  derived and/or modified sequence
atgagcagaagcggcgccgccgccgagaaggccgacagcagacagagaccccagatgaaggtgaacgagtacaaggagaaccagaacatcgcctacgtgagcctgagacccgcccagaccaccgtgctgatcaagaccgccaaggtgtacctggcccccttcagcctgagcaactaccagctggaccagctgatgtgccccaagagcctgagcgagaagaacagcaacaacgaggtggcctgcaagaagaccaagatcaagaagacctgcagaagaatcatcccccccaagatgaagaacaccagcagcaaggccgagagcaccctgcagaacagcagcagcgccgtgcacaccgagagcaacaagctgcagcccaagagaaccgccgacgccatgaacctgagcgtggacgtggagagcagccaggacggcgacagcgacgaggacaccacccccagcctggacttcagcggcctgagcccctacgagagaaagagactgaagaacatcagcgagaacgccgacttcttcgccagcctgcagctgagcgagagcgccgccagactgagagagatgatcgagaagagacagccccccaagagcaagagaaagaagcccaagagagagaacggcatcggctgcagaagaagcatgagactgctgaaggtggaccccagcggcgtgagcctgcccgccgcccccaccccccccaccctggtggccgacgagacccccctgctgccccccggccccctggagatgaccagcgagaaccaggaggacaacaacgagagattcaagggcttcctgcacacctgggccggcatgagcaagcccagcagcaagaacaccgagaagggcctgagcagcatcaagagctacaaggccaacctgaacggcatggtgatcagcgaggacaccgtgtacaaggtgaccaccggccccatcttcagcatggccctgcaccccagcgagaccagaaccctggtggccgtgggcgccaagttcggccaggtgggcctgtgcgacctgacccagcagcccaaggaggacggcgtgtacgtgttccacccccacagccagcccgtgagctgcctgtacttcagccccgccaaccccgcccacatcctgagcctgagctacgacggcaccctgagatgcggcgacttcagcagagccatcttcgaggaggtgtacagaaacgagagaagcagcttcagcagcttcgacttcctggccgaggacgccagcaccctgatcgtgggccactgggacggcaacatgagcctggtggacagaagaacccccggcaccagctacgagaagctgaccagcagcagcatgggcaagatcagaaccgtgcacgtgcaccccgtgcacagacagtacttcatcaccgccggcctgagagacacccacatctacgacgccagaagactgaacagcagaagaagccagcccctgatcagcctgaccgagcacaccaagagcatcgccagcgcctacttcagccccctgaccggcaacagagtggtgaccacctgcgccgactgcaacctgagaatcttcgacagcagctgcatcagcagcaagatccccctgctgaccaccatcagacacaacaccttcaccggcagatggctgaccagattccaggccatgtgggaccccaagcaggaggactgcgtgatcgtgggcagcatggcccaccccagaagagtggagatcttccacgagaccggcaagagagtgcacagcttcggcggcgagtacctggtgagcgtgtgcagcatcaacgccatgcaccccaccagatacatcctggccggcggcaacagcagcggcaagatccacgtgttcatgaacgagaagagctgctag

SEQ ID NO: 217342 - DNA, 1881 bp, Artificial Sequence
  derived and/or modified sequence
atgagtcgctctggagctgctgcagagaaggccgactcccgccagaggccccagatgaaggttaatgagtataaagagaatcaaaatattgcttatgttagcttacgcccggcgcagaccaccgtgttaataaagaccgcaaaagtgtatctcgctcccttttcactttctaattatcaactagatcaactgatgtgccctaagtccctctcggagaagaactctaataatgaagtggcatgcaagaaaactaagattaagaagacctgcaggaggatcatccctcctaagatgaaaaatacctcgagcaaggcggagagcactctacagaattccagctccgcagtgcacacagagagcaacaaactgcagccgaaaaggacggcagacgcgatgaacctctcggtggatgtggaatctagccaggatggcgactctgacgaagacaccactcccagccttgacttttccgggctgtctccatacgaaaggaagcgcctaaaaaacattagtgaaaacgcagacttctttgctagcctacagcttagcgaatctgctgccagactgagagaaatgattgagaagcgccagcctcccaaaagcaaaaggaagaagccaaaacgtgagaatggtattggctgtcggagatctatgaggttactaaaggtcgatccatcaggcgtcagccttccagcggctccaacacctcctactctcgtggctgacgagactccacttttacccccagggcctctagagatgacttctgagaatcaggaagacaataatgagcgctttaaaggcttcctgcacacgtgggccggaatgtccaagccgtcttctaaaaacacggagaagggcttaagctctatcaagtcctacaaagccaatctgaatgggatggtcatctccgaagacactgtgtacaaagttactaccgggcctatctttagcatggcgttgcaccccagtgagactcggacattagttgctgtaggcgccaagtttggacaggtgggactctgcgatttaacccagcaacctaaagaagacggtgtctatgtttttcacccccatagccaacccgtgagttgcctgtacttctcccccgctaatcccgctcacatactgtctctgtcctacgacggcacgctgcggtgtggagacttctcacgagccattttcgaagaggtttacagaaacgagcgtagcagcttctcttcattcgatttccttgcagaggacgcttctaccctaatcgtgggccactgggacggcaacatgagcctggttgacaggaggactcccggtacatcttatgagaagcttacctcatctagtatggggaagatacggacggtgcatgtccaccccgtacaccggcaatatttcattacggctggtctgagagacacccatatttatgatgcaagacggctcaactctaggagatctcagcccttaatctctcttaccgaacatactaagtccatagcgtctgcgtatttcagcccgctaaccggtaatcgggtagtcacgacctgtgcagattgtaacctacgcatctttgactcatcttgcatcagttccaagataccacttttaaccaccatccgccacaatactttcacaggaaggtggctcacccggttccaggcaatgtgggaccccaagcaggaggattgcgttatagttggatccatggcccatccccgcagagtagaaatatttcacgaaacgggcaagcgggtgcactcctttgggggtgagtacctcgtctccgtgtgttcaattaacgctatgcatcccacacgctatattctggcagggggaaatagtagcggtaagatccatgtcttcatgaacgagaagtcctgctag

SEQ ID NO: 217343 - DNA, 1881 bp, Artificial Sequence
  derived and/or modified sequence
atgagccgcagcggggctgctgctgagaaggctgacagccggcagaggccccagatgaaggtgaatgagtacaaggagaaccagaacatcgcctacgtgtccctgcggcctgcccagaccaccgtgctgatcaagacagccaaggtgtacctggcccccttcagcctgagcaactaccagctggaccagctgatgtgccccaagagcctgtctgagaagaacagcaacaatgaggtggcctgcaagaagaccaagatcaagaagacctgccgccgcatcatcccccccaagatgaagaacaccagcagcaaggccgagagcaccctgcagaacagcagcagcgctgtgcacacagagagcaacaagctgcagcccaagaggacagcagatgccatgaacctgtctgtggatgtggagagcagccaggatggagacagtgatgaggacaccacccccagcctggacttcagcggcctgagcccctatgaaaggaagaggctgaagaacatcagtgaaaatgctgacttctttgccagcctgcagctgtctgagagcgctgcccggctgcgggagatgattgagaagaggcagccccccaagagcaagaggaagaagcccaagagagaaaatggcatcggctgcagaagatccatgaggctgctgaaggtggaccccagcggcgtgtccctgcctgctgcccccaccccacccaccctggtggctgatgagacccccctgctgcccccaggccccctggagatgaccagcgagaaccaggaggacaacaatgaacgcttcaagggcttcctgcacacctgggccggcatgagcaagcccagcagcaagaacacagagaagggcctgagcagcatcaagagctacaaggccaacctgaatggcatggtgatcagtgaagatactgtgtacaaggtgaccaccggccccatcttctccatggccctgcaccccagcgagaccaggaccctggtggccgtgggcgccaagtttggccaggtgggcctgtgtgacctgacccagcagcccaaggaggatggagtgtatgtgttccacccccacagccagcctgtgtcctgcctgtacttcagccctgccaacccagcccacatcctgagcctgtcctatgatggcaccctgcgctgtggggacttcagccgggccatctttgaggaggtgtacagaaatgaaagaagcagcttcagcagctttgacttcctggccgaggatgccagcaccctcatcgtgggccactgggatggcaacatgagcctggtggacaggaggaccccaggcaccagctatgagaagctgaccagcagctccatgggcaagatcagaacagtgcacgtgcaccctgtgcaccggcagtacttcatcacagctggcctgcgggacacccacatctatgatgcccggcggctgaacagcagaagaagccagcccctcatcagcctgacagagcacaccaagagcatcgccagcgcctacttcagccccctgactggaaacagagtggtgaccacctgtgccgactgcaacctgcgcatctttgacagcagctgcatcagcagcaagatccccctgctgaccaccatccgccacaacaccttcaccggccgctggctgacccgcttccaggccatgtgggaccccaagcaggaggactgtgtgattgtgggctccatggcccacccccggcgggtggagatcttccacgagaccgggaagagggtgcacagctttggaggagagtacctggtgtctgtgtgcagcatcaatgccatgcaccccacccgctacatcctggccggcggcaacagcagcggcaagatccacgtgttcatgaatgagaagagctgctag

SEQ ID NO: 217344 - DNA, 1881 bp, Artificial Sequence
  derived and/or modified sequence
atgagccggagcggcgccgccgccgagaaggccgacagccggcagcgtcctcagatgaaagtgaatgaatataaagagaaccagaatattgcctatgtctctctgaggccagcccaaaccacagtgctgataaaaacagcaaaagtttatttggcccccttctcgctgagtaactatcagctagaccagctgatgtgcccaaagtcattaagtgaaaagaacagcaacaatgaggtagcctgtaaaaagaccaagatcaagaagacctgcaggaggatcatccctcccaaaatgaaaaacaccagtagtaaagctgaaagcaccctgcagaactccagttcagccgtgcatacagaatcgaacaaactccaacccaagcgcactgctgacgctatgaacttgtccgtggatgtcgagtcgagtcaggatggagatagcgacgaagacaccacccctagcctggacttcagcgggctgtcgccctacgagcgaaagagattgaaaaacatttctgagaacgcagacttctttgccagcctgcagctctcagagtcagcagcccgcctgagggaaatgattgaaaaacggcagccaccaaagagcaaaagaaaaaaacctaaacgagaaaatggaattgggtgtcggcgctcaatgaggttgcttaaagtagatcccagcggggtctccttgcctgccgcccctactccgccaacactggttgcagacgagaccccactgttgccaccaggccccttagagatgacttctgagaatcaagaggacaataatgaacgcttcaagggatttctgcacacatgggccggaatgtctaaaccaagcagcaaaaatactgagaaggggctctcatcaatcaaaagttacaaggccaacctcaacggaatggtgatctcagaggatacggtttacaaggtgactactggccccattttctccatggcactgcacccaagcgagactagaaccctggtggccgtgggggctaagttcggacaggtgggactttgtgacctgacgcagcagccaaaagaagatggtgtgtatgtgttccacccccacagccagccagtaagttgtctgtacttctcccccgctaatcccgcacacatcctttctctgagttacgacggaacactgcgctgtggggattttagccgtgctatctttgaggaagtgtaccggaatgagagatcctcattttcctccttcgacttcctggctgaggatgcctctacgctaatagtgggccactgggacggaaatatgtctctggtggaccgcagaacaccaggcacatcttatgagaaactgacatcttcctcaatgggcaagatccgcactgtgcacgtgcaccctgtccacaggcaatacttcattactgctggcctgcgcgacacgcatatctacgacgctagaaggctgaatagtaggcgttcacaaccgttaattagcttaacggagcacaccaagtccatcgcatctgcctattttagtcccctgacaggcaatcgcgttgtcacgacctgtgccgactgtaatcttcgtatcttcgatagtagttgcatttcgtctaaaattccactcctgaccaccatcagacacaacacatttacaggaagatggttgacgcgctttcaagccatgtgggatcccaaacaggaagactgtgtgattgttgggtcaatggcccaccctcgaagagtggaaattttccacgagactgggaagcgagtgcattcctttggcggggagtatttagtaagtgtctgtagtatcaatgctatgcatcctacaaggtacattctggccggaggaaacagcagcggtaagatccatgttttcatgaacgaaaagtcgtgctag

SEQ ID NO: 217345 - DNA, 1881 bp, Artificial Sequence
  derived and/or modified sequence
atgtctcgctctggcgcagcagccgagaaggccgacagtcgccagcggccacagatgaaggtgaatgaatacaaggagaatcagaatattgcgtatgtctccttaagacctgcgcagaccacagtgctgataaagacagctaaggtgtatctggctccctttagtttaagcaactaccagctggaccagctaatgtgcccaaagagtctttcagagaaaaacagcaacaatgaagtggcgtgtaaaaagactaaaataaaaaagacatgcagaagaattattccccctaaaatgaaaaacactagctctaaggccgaatctactctccaaaactcgagcagtgcagtgcataccgagtctaacaagctgcaaccaaagagaacggccgatgctatgaacctcagtgtcgatgtggaaagtagccaagacggtgactcagacgaggacaccacaccgtccctcgacttctctgggctgagcccttacgagcgcaagcgacttaaaaacataagcgaaaatgcggactttttcgcatccctccagctcagtgagagcgccgctagactccgcgagatgatcgagaaacggcaaccgcctaaatctaagagaaagaaaccaaaaagggaaaatggtatcggttgtagaagatctatgcggctgctcaaggtggatccaagcggtgtcagtttacctgcagctccaactcctccaacattggtggccgatgagactccattactgcctcctggccctctagagatgacttcagaaaatcaggaggataataatgaaaggttcaaaggatttctgcatacatgggctggaatgtcaaagcctagcagtaagaatacagaaaaaggcctgtcctcaatcaagtcctacaaagccaacctaaacggtatggtgatctcagaggacaccgtctacaaagttaccacggggcctatttttagcatggctctgcacccttctgagaccaggacgctcgtggctgtcggcgcaaagtttggccaggtgggcttgtgcgacctgacccagcaaccaaaagaggacggcgtctatgtgtttcacccacatagtcagcctgtgtcgtgtctgtactttagcccagccaatcctgcgcacatactctccttgtcttacgacgggaccctgcgatgcggcgacttctctcgagctatcttcgaggaagtgtaccggaacgagcggagctctttttcaagttttgacttcctggccgaggatgctagcacgctgatcgtgggacactgggacgggaacatgtcactcgtggacaggaggacaccaggcacttcttacgagaagttgacaagctcttccatgggaaaaatcagaacagtgcatgttcatccagtccaccgacaatacttcataacagctggactacgagacactcacatctacgacgcgcgacggctcaattcccggaggtcacagccactcatctctcttacagagcataccaaatctatcgcaagtgcatatttctcacctctgactggaaacagagtcgtgaccacctgcgcagactgcaaccttcgaatttttgattcatcttgtataagcagtaagatcccactcctcacgactatccgacataatacatttaccggaagatggctgaccagattccaggctatgtgggacccaaagcaggaggactgtgtgattgttggctcaatggcacaccccagacgggtcgagatatttcatgagaccggaaagcgagtgcattcgtttggcggtgaatacctggtgtccgtttgttccatcaatgccatgcacccgacccgctacattctggctgggggaaactcctccgggaaaatacacgtgttcatgaacgagaaatcgtgctag
